United States Patent Application Publication US 2024/0327476 A1 - sequence listing, part 37

SEQ ID NO: 60284 - protein, 1069 aa, Homo sapiens
MLRMRTAGWARGWCLGCCLLLPLSLSLAAAKQLLRYRLAEEGPADVRIGNVASDLGIVTGSGEVTFSLESGSEYLKIDNLTGELSTSERRIDREKLPQCQMIFDENECFLDFEVSVIGPSQSWVDLFEGQVIVLDINDNTPTFPSPVLTLTVEENRPVGTLYLLPTATDRDFGRNGIERYELLQEPGGGGSGGESRRAGAADSAPYPGGGGNGASGGGSGGSKRRLDASEGGGGTNPGGRSSVFELQVADTPDGEKQPQLIVKGALDREQRDSYELTLRVRDGGDPPRSSQAILRVLITDVNDNSPRFEKSVYEADLAENSAPGTPILQLRAADLDVGVNGQIEYVFGAATESVRRLLRLDETSGWLSVLHRIDREEVNQLRFTVMARDRGQPPKTDKATVVLNIKDENDNVPSIEIRKIGRIPLKDGVANVAEDVLVDTPIALVQVSDRDQGENGVVTCTVVGDVPFQLKPASDTEGDQNKKKYFLHTSTPLDYEATREFNVVIVAVDSGSPSLSSNNSLIVKVGDTNDNPPMFGQSVVEVYFPENNIPGERVATVLATDADSGKNAEIAYSLDSSVMGIFAIDPDSGDILVNTVLDREQTDRYEFKVNAKDKGIPVLQGSTTVIVQVADKNDNDPKFMQDVFTFYVKENLQPNSPVGMVTVMDADKGRNAEMSLYIEENNNIFSIENDTGTIYSTMSFDREHQTTYTFRVKAVDGGDPPRSATATVSLFVMDENDNAPTVTLPKNISYTLLPPSSNVRTVVATVLATDSDDGINADLNYSIVGGNPFKLFEIDPTSGVVSLVGKLTQKHYGLHRLVVQVNDSGQPSQSTTTLVHVFVNESVSNATAIDSQIARSLHIPLTQDIAGDPSYEISKQRLSIVIGVVAGIMTVILIILIVVMARYCRSKNKNGYEAGKKDHEDFFTPQQHDKSKKPKKDKKNKKSKQPLYSSIVTVEASKPNGQRYDSVNEKLSDSPSMGRYRSVNGGPGSPDLARHYKSSSPLPTVQLHPQSPTAGKKHQAVQDLPPANTFVGAGDNISIGSDHCSEYSCQTNNKYSKQMRLHPYITVFG

SEQ ID NO: 60285 - protein, 1255 aa, Homo sapiens
MLRMRTAGWARGWCLGCCLLLPLSLSLAAAKQLLRYRLAEEGPADVRIGNVASDLGIVTGSGEVTFSLESGSEYLKIDNLTGELSTSERRIDREKLPQCQMIFDENECFLDFEVSVIGPSQSWVDLFEGQVIVLDINDNTPTFPSPVLTLTVEENRPVGTLYLLPTATDRDFGRNGIERYELLQEPGGGGSGGESRRAGAADSAPYPGGGGNGASGGGSGGSKRRLDASEGGGGTNPGGRSSVFELQVADTPDGEKQPQLIVKGALDREQRDSYELTLRVRDGGDPPRSSQAILRVLITDVNDNSPRFEKSVYEADLAENSAPGTPILQLRAADLDVGVNGQIEYVFGAATESVRRLLRLDETSGWLSVLHRIDREEVNQLRFTVMARDRGQPPKTDKATVVLNIKDENDNVPSIEIRKIGRIPLKDGVANVAEDVLVDTPIALVQVSDRDQGENGVVTCTVVGDVPFQLKPASDTEGDQNKKKYFLHTSTPLDYEATREFNVVIVAVDSGSPSLSSNNSLIVKVGDTNDNPPMFGQSVVEVYFPENNIPGERVATVLATDADSGKNAEIAYSLDSSVMGIFAIDPDSGDILVNTVLDREQTDRYEFKVNAKDKGIPVLQGSTTVIVQVADKNDNDPKFMQDVFTFYVKENLQPNSPVGMVTVMDADKGRNAEMSLYIEENNNIFSIENDTGTIYSTMSFDREHQTTYTFRVKAVDGGDPPRSATATVSLFVMDENDNAPTVTLPKNISYTLLPPSSNVRTVVATVLATDSDDGINADLNYSIVGGNPFKLFEIDPTSGVVSLVGKLTQKHYGLHRLVVQVNDSGQPSQSTTTLVHVFVNESVSNATAIDSQIARSLHIPLTQDIAGDPSYEISKQRLSIVIGVVAGIMTVILIILIVVMARYCRSKNKNGYEAGKKDHEDFFTPQQHDKSKKPKKDKKNKKSKQPLYSSIVTVEASKPNGQRYDSVNEKLSDSPSMGRYRSVNGGPGSPDLARHYKSSSPLPTVQLHPQSPTAGKKHQAVQDLPPANTFVGAGDNISIGSDHCSEYSCQTNNKYSKQPFRRVTFSVVSQPQDPHQGSLQSCYDSGLEESETPSSKSSSGPRLGALPLPEDNYERTTPDGSVGEAEHMENDSRPLPDVALTGKCTRECDEYGHSDSCWMPVRTSPERKKSQPKLSTFMPVDERGSQEKLANGEAAIMGDRNRNLLNKKLTSSYETFSAASFSKNEEANPEDIPLTKTGEYKPSPVNTLTRREVYL

SEQ ID NO: 60286 - protein, 973 aa, Homo sapiens
MSPVRRWGSPCLFPLQLFSLCWVLSVAQSKTVRYSTFEEDAPGTVIGTLAEDLHMKVSGDTSFRLMKQFNSSLLRVREGDGQLTVGDAGLDRERLCGQAPQCVLAFDVVSFSQEQFRLVHVEVEVRDVNDHAPRFPRAQIPVEVSEGAAVGTRIPLEVPVDEDVGANGLQTVRLAEPHSPFRVELQTRADGAQCADLVLLQELDRESQAAYSLELVAQDGGRPPRSATAALSVRVLDANDHSPAFPQGAVAEVELAEDAPVGSLLLDLDAADPDEGPNGDVVFAFGARTPPEARRLFRLDPRSGRLTLAGPVDYERQDTYELDVRAQDRGPGPRAATCKVIVRIRDVNDNAPDIAITPLAAPGAPATSPFAAAAAAAALGGADASSPAGAGTPEAGATSLVPEGAARESLVALVSTSDRDSGANGQVRCALYGHEHFRLQPAYAGSYLVVTAASLDRERIAEYNLTLVAEDRGAPPLRTVRPYTVRVGDENDNAPLFTRPVYEVSVRENNPPGAYLATVAARDRDLGRNGQVTYRLLEAEVGRAGGAVSTYVSVDPATGAIYALRSFDYETLRQLDVRIQASDGGSPQLSSSALVQVRVLDQNDHAPVLVHPAPANGSLEVAVPGRTAKDTVVARVQARDADEGANGELAFELQQQEPREAFAIGRRTGEILLTGDLSQEPPGRVFRALLVISDGGRPPLTTTATVSFVVTAGGGRGPAAPASAGSPERSRPPGSRLGVSGSVLQWDTPLIVIIVLAGSCTLLLAAIIAIATTCNRRKKEPYGASPGFGKEPAPPVAVWKGHSFNTISGREAEKFSGKDSGKGDSDFNDSDSDISGDALKKDLINHMQSGLWACTAECKILGHSDRCWSPSCSGPNAHPSPHPPAQMSTFCKSTSLPRDPLRRDNYYQAQLPKTVGLQSVYEKVLHRDYDRTVTLLSPPRPGRLPDLQEIGVPLYQSPPGRYLSPKKGANENV

SEQ ID NO: 60287 - protein, 1070 aa, Homo sapiens
MSPVRRWGSPCLFPLQLFSLCWVLSVAQSKTVRYSTFEEDAPGTVIGTLAEDLHMKVSGDTSFRLMKQFNSSLLRVREGDGQLTVGDAGLDRERLCGQAPQCVLAFDVVSFSQEQFRLVHVEVEVRDVNDHAPRFPRAQIPVEVSEGAAVGTRIPLEVPVDEDVGANGLQTVRLAEPHSPFRVELQTRADGAQCADLVLLQELDRESQAAYSLELVAQDGGRPPRSATAALSVRVLDANDHSPAFPQGAVAEVELAEDAPVGSLLLDLDAADPDEGPNGDVVFAFGARTPPEARRLFRLDPRSGRLTLAGPVDYERQDTYELDVRAQDRGPGPRAATCKVIVRIRDVNDNAPDIAITPLAAPGAPATSPFAAAAAAAALGGADASSPAGAGTPEAGATSLVPEGAARESLVALVSTSDRDSGANGQVRCALYGHEHFRLQPAYAGSYLVVTAASLDRERIAEYNLTLVAEDRGAPPLRTVRPYTVRVGDENDNAPLFTRPVYEVSVRENNPPGAYLATVAARDRDLGRNGQVTYRLLEAEVGRAGGAVSTYVSVDPATGAIYALRSFDYETLRQLDVRIQASDGGSPQLSSSALVQVRVLDQNDHAPVLVHPAPANGSLEVAVPGRTAKDTVVARVQARDADEGANGELAFELQQQEPREAFAIGRRTGEILLTGDLSQEPPGRVFRALLVISDGGRPPLTTTATVSFVVTAGGGRGPAAPASAGSPERSRPPGSRLGVSGSVLQWDTPLIVIIVLAGSCTLLLAAIIAIATTCNRRKKEVRKGGALREERPGAAGGGASAPGSPEEAARGAGPRPNMFDVLTFPGTGKAPFGSPAADAPPPAVAAAEVPGSEGGSATGESACHFEGQQRLRGAHAEPYGASPGFGKEPAPPVAVWKGHSFNTISGREAEKFSGKDSGKGDSDFNDSDSDISGDALKKDLINHMQSGLWACTAECKILGHSDRCWSPSCSGPNAHPSPHPPAQMSTFCKSTSLPRDPLRRDNYYQAQLPKTVGLQSVYEKVLHRDYDRTVTLLSPPRPGRLPDLQEIGVPLYQSPPGRYLSPKKGANENV

SEQ ID NO: 60288 - protein, 596 aa, Homo sapiens
MSPVRRWGSPCLFPLQLFSLCWVLSVAQSKTVRYSTFEEDAPGTVIGTLAEDLHMKVSGDTSFRLMKQFNSSLLRVREGDGQLTVGDAGLDRERLCGQAPQCVLAFDVVSFSQEQFRLVHVEVEVRDVNDHAPVLVHPAPANGSLEVAVPGRTAKDTVVARVQARDADEGANGELAFELQQQEPREAFAIGRRTGEILLTGDLSQEPPGRVFRALLVISDGGRPPLTTTATVSFVVTAGGGRGPAAPASAGSPERSRPPGSRLGVSGSVLQWDTPLIVIIVLAGSCTLLLAAIIAIATTCNRRKKEVRKGGALREERPGAAGGGASAPGSPEEAARGAGPRPNMFDVLTFPGTGKAPFGSPAADAPPPAVAAAEVPGSEGGSATGESACHFEGQQRLRGAHAEPYGASPGFGKEPAPPVAVWKGHSFNTISGREAEKFSGKDSGKGDSDFNDSDSDISGDALKKDLINHMQSGLWACTAECKILGHSDRCWSPSCSGPNAHPSPHPPAQMSTFCKSTSLPRDPLRRDNYYQAQLPKTVGLQSVYEKVLHRDYDRTVTLLSPPRPGRLPDLQEIGVPLYQSPPGRYLSPKKGANENV

SEQ ID NO: 60289 - protein, 913 aa, Homo sapiens
MSPVRRWGSPCLFPLQLFSLCWVLSVAQSKTVRYSTFEEDAPGTVIGTLAEDLHMKVSGDTSFRLMKQFNSSLLRVREGDGQLTVGDAGLDRERLCGQAPQCVLAFDVVSFSQEQFRLVHVEVEVRDVNDHAPRFPRAQIPVEVSEGAAVGTRIPLEVPVDEDVGANGLQTVRLAEPHSPFRVELQTRADGAQCADLVLLQELDRESQAAYSLELVAQDGGRPPRSATAALSVRVLDANDHSPAFPQGAVAEVELAEDAPVGSLLLDLDAADPDEGPNGDVVFAFGARTPPEARRLFRLDPRSGRLTLAGPVDYERQDTYELDVRAQDRGPGPRAATCKVIVRIRDVNDNAPDIAITPLAAPGAGNLTLRRNGQVTYRLLEAEVGRAGGAVSTYVSVDPATGAIYALRSFDYETLRQLDVRIQASDGGSPQLSSSALVQVRVLDQNDHAPVLVHPAPANGSLEVAVPGRTAKDTVVARVQARDADEGANGELAFELQQQEPREAFAIGRRTGEILLTGDLSQEPPGRVFRALLVISDGGRPPLTTTATVSFVVTAGGGRGPAAPASAGSPERSRPPGSRLGVSGSVLQWDTPLIVIIVLAGSCTLLLAAIIAIATTCNRRKKEVRKGGALREERPGAAGGGASAPGSPEEAARGAGPRPNMFDVLTFPGTGKAPFGSPAADAPPPAVAAAEVPGSEGGSATGESACHFEGQQRLRGAHAEPYGASPGFGKEPAPPVAVWKGHSFNTISGREAEKFSGKDSGKGDSDFNDSDSDISGDALKKDLINHMQSGLWACTAECKILGHSDRCWSPSCSGPNAHPSPHPPAQMSTFCKSTSLPRDPLRRDNYYQAQLPKTVGLQSVYEKVLHRDYDRTVTLLSPPRPGRLPDLQEIGVPLYQSPPGRYLSPKKGANENV

SEQ ID NO: 60290 - protein, 1203 aa, Homo sapiens
MDLRDFYLLAALIACLRLDSAIAQELIYTIREELPENVPIGNIPKDLNISHINAATGTSASLVYRLVSKAGDAPLVKVSSSTGEIFTTSNRIDREKLCAGASYAEENECFFELEVVILPNDFFRLIKIKIIVKDTNDNAPMFPSPVINISIPENTLINSRFPIPSATDPDTGFNGVQHYELLNGQSVFGLDIVETPEGEKWPQLIVQQNLDREQKDTYVMKIKVEDGGTPQKSSTAILQVTVSDVNDNRPVFKEGQVEVHIPENAPVGTSVIQLHATDADIGSNAEIRYIFGAQVAPATKRLFALNNTTGLITVQRSLDREETAIHKVTVLASDGSSTPARATVTINVTDVNDNPPNIDLRYIISPINGTVYLSEKDPVNTKIALITVSDKDTDVNGKVICFIEREVPFHLKAVYDNQYLLETSSLLDYEGTKEFSFKIVASDSGKPSLNQTALVRVKLEDENDNPPIFNQPVIELSVSENNRRGLYLTTISATDEDSGKNADIVYQLGPNASFFDLDRKTGVLTASRVFDREEQERFIFTVTARDNGTPPLQSQAAVIVTVLDENDNSPKFTHNHFQFFVSENLPKYSTVGVITVTDADAGENKAVTLSILNDNDNFVLDPYSGVIKSNVSFDREQQSSYTFDVKATDGGQPPRSSTAKVTINVMDVNDNSPVVISPPSNTSFKLVPLSAIPGSVVAEVFAVDVDTGMNAELKYTIVSGNNKGLFRIDPVTGNITLEEKPAPTDVGLHRLVVNISDLGYPKSLHTLVLVFLYVNDTAGNASYIYDLIRRTMETPLDRNIGDSSQPYQNEDYLTIMIAIIAGAMVVIVVIFVTVLVRCRHASRFKAAQRSKQGAEWMSPNQENKQNKKKKRKKRKSPKSSLLNFVTIEESKPDDAVHEPINGTISLPAELEEQSIGRFDWGPAPPTTFKPNSPDLAKHYKSASPQPAFHLKPDTPVSVKKHHVIQELPLDNTFVGGCDTLSKRSSTSSDHFSASECSSQGGFKTKGPLHTRQSQRRVTFHLPDGSQESCSDSGLGDHEPVGSGTLISHPLPLVQPQDEFYDQASPDKRTEADGNSDPNSDGPLGPRGLAEATEMCTQECLVLGHSDNCWMPPGLGPYQHPKSPLSTFAPQKEWVKKDKLVNGHTLTRAWKEDSNRNQFNDRKQYGSNEGHFNNGSHMTDIPLANLKSYKQAGGATESPKEHQL

SEQ ID NO: 60291 - protein, 1032 aa, Homo sapiens
MDLRDFYLLAALIACLRLDSAIAQELIYTIREELPENVPIGNIPKDLNISHINAATGTSASLVYRLVSKAGDAPLVKVSSSTGEIFTTSNRIDREKLCAGASYAEENECFFELEVVILPNDFFRLIKIKIIVKDTNDNAPMFPSPVINISIPENTLINSRFPIPSATDPDTGFNGVQHYELLNGQSVFGLDIVETPEGEKWPQLIVQQNLDREQKDTYVMKIKVEDGGTPQKSSTAILQVTVSDVNDNRPVFKEGQVEVHIPENAPVGTSVIQLHATDADIGSNAEIRYIFGAQVAPATKRLFALNNTTGLITVQRSLDREETAIHKVTVLASDGSSTPARATVTINVTDVNDNPPNIDLRYIISPINGTVYLSEKDPVNTKIALITVSDKDTDVNGKVICFIEREVPFHLKAVYDNQYLLETSSLLDYEGTKEFSFKIVASDSGKPSLNQTALVRVKLEDENDNPPIFNQPVIELSVSENNRRGLYLTTISATDEDSGKNADIVYQLGPNASFFDLDRKTGVLTASRVFDREEQERFIFTVTARDNGTPPLQSQAAVIVTVLDENDNSPKFTHNHFQFFVSENLPKYSTVGVITVTDADAGENKAVTLSILNDNDNFVLDPYSGVIKSNVSFDREQQSSYTFDVKATDGGQPPRSSTAKVTINVMDVNDNSPVVISPPSNTSFKLVPLSAIPGSVVAEVFAVDVDTGMNAELKYTIVSGNNKGLFRIDPVTGNITLEEKPAPTDVGLHRLVVNISDLGYPKSLHTLVLVFLYVNDTAGNASYIYDLIRRTMETPLDRNIGDSSQPYQNEDYLTIMIAIIAGAMVVIVVIFVTVLVRCRHASRFKAAQRSKQGAEWMSPNQENKQNKKKKRKKRKSPKSSLLNFVTIEESKPDDAVHEPINGTISLPAELEEQSIGRFDWGPAPPTTFKPNSPDLAKHYKSASPQPAFHLKPDTPVSVKKHHVIQELPLDNTFVGGCDTLSKRSSTSSDHFSASECSSQGGFKTKGPLHTRQVNEHFYWSISTAYKCPVNQY

SEQ ID NO: 60292 - protein, 1237 aa, Homo sapiens
MDLRDFYLLAALIACLRLDSAIAQELIYTIREELPENVPIGNIPKDLNISHINAATGTSASLVYRLVSKAGDAPLVKVSSSTGEIFTTSNRIDREKLCAGASYAEENECFFELEVVILPNDFFRLIKIKIIVKDTNDNAPMFPSPVINISIPENTLINSRFPIPSATDPDTGFNGVQHYELLNGQSVFGLDIVETPEGEKWPQLIVQQNLDREQKDTYVMKIKVEDGGTPQKSSTAILQVTVSDVNDNRPVFKEGQVEVHIPENAPVGTSVIQLHATDADIGSNAEIRYIFGAQVAPATKRLFALNNTTGLITVQRSLDREETAIHKVTVLASDGSSTPARATVTINVTDVNDNPPNIDLRYIISPINGTVYLSEKDPVNTKIALITVSDKDTDVNGKVICFIEREVPFHLKAVYDNQYLLETSSLLDYEGTKEFSFKIVASDSGKPSLNQTALVRVKLEDENDNPPIFNQPVIELSVSENNRRGLYLTTISATDEDSGKNADIVYQLGPNASFFDLDRKTGVLTASRVFDREEQERFIFTVTARDNGTPPLQSQAAVIVTVLDENDNSPKFTHNHFQFFVSENLPKYSTVGVITVTDADAGENKAVTLSILNDNDNFVLDPYSGVIKSNVSFDREQQSSYTFDVKATDGGQPPRSSTAKVTINVMDVNDNSPVVISPPSNTSFKLVPLSAIPGSVVAEVFAVDVDTGMNAELKYTIVSGNNKGLFRIDPVTGNITLEEKPAPTDVGLHRLVVNISDLGYPKSLHTLVLVFLYVNDTAGNASYIYDLIRRTMETPLDRNIGDSSQPYQNEDYLTIMIAIIAGAMVVIVVIFVTVLVRCRHASRFKAAQRSKQGAEWMSPNQENKQNKKKKRKKRKSPKSSLLNFVTIEESKPDDAVHEPINGTISLPAELEEQSIGRFDWGPAPPTTFKPNSPDLAKHYKSASPQPAFHLKPDTPVSVKKHHVIQELPLDNTFVGGCDTLSKRSSTSSDHFSASECSSQGGFKTKGPLHTRQCNSHSKSDNIPVTPQKCPSSTGFHIQENEESHYESQRRVTFHLPDGSQESCSDSGLGDHEPVGSGTLISHPLPLVQPQDEFYDQASPDKRTEADGNSDPNSDGPLGPRGLAEATEMCTQECLVLGHSDNCWMPPGLGPYQHPKSPLSTFAPQKEWVKKDKLVNGHTLTRAWKEDSNRNQFNDRKQYGSNEGHFNNGSHMTDIPLANLKSYKQAGGATESPKEHQL

SEQ ID NO: 60293 - protein, 1203 aa, Homo sapiens; identical to SEQ ID NO: 60290

SEQ ID NO: 60294 - protein, 1237 aa, Homo sapiens; identical to SEQ ID NO: 60292

SEQ ID NO: 60295 - protein, 807 aa, Homo sapiens
MVFSRRGGLGARDLLLWLLLLAAWEVGSGQLHYSIPEEAKHGTFVGRVAQDLGLELAELVPRLFRVASKTHRDLLEVNLQNGILFVNSRIDREELCQWSAECSIHLELIADRPLQVFHVEVKVKDINDNPPVFRGREQIIFIPESRLLNSRFPIEGAADADIGANALLTYTLSPSDYFSLDVEASDELSKSLWLELRKYLDREETPELHLLLTATDGGKPELQGTVELLITVLDVNDNAPLFDQAVYRVHLLETTANGTLVTTLNASDADEGVNGEVVFSFDSGISRDIQEKFKVDSSSGEIRLIDKLDYEETKSYEIQVKAVDKGSPPMSNHCKVLVKVLDVNDNAPELAVTSLYLPIREDAPLSTVIALITVSDRDSGANGQVTCSLMPHVPFKLVSTFKNYYSLVLDSALDRESLSVYELVVTARDGGSPSLWATARVSVEVADVNDNAPAFAQPEYTVFVKENNPPGCHIFTVSARDADAQENALVSYSLVERRVGERALSNYVSVHAESGKVYALQPLDHEELELLQFQVSARDAGVPPLGSNVTLQVFVLDENDNAPALLAPRVGGTIGAVSELVPRLVGAGHVVAKVRAVDADSGYNAWLSYELQPAAGGARIPFRVGLYTGEISTTRVLDEADLSRYRLLVLVKDHGEPALTATATVLVSLVESGQAPKASSRASVGVAGPEAALVDVNVYLIIAICAVSSLLVLTLLLYTALRCSVPPTEGAYVPGKPTLVCSSALGSWSNSQQRRQRVCSSEGPPKTDLMAFSPGLSPSLNTSERNEQPEANLDLSGNVSPTFEFWL

SEQ ID NO: 60296 - protein, 686 aa, Homo sapiens
MVFSRRGGLGARDLLLWLLLLAAWEVGSGQLHYSIPEEAKHGTFVGRVAQDLGLELAELVPRLFRVASKTHRDLLEVNLQNGILFVNSRIDREELCQWSAECSIHLELIADRPLQVFHVEVKVKDINDNPPVFRGREQIIFIPESRLLNSRFPIEGAADADIGANALLTYTLSPSDYFSLDVEASDELSKSLWLELRKYLDREETPELHLLLTATDGGKPELQGTVELLITVLDVNDNAPLFDQAVYRVHLLETTANGTLVTTLNASDADEGVNGEVVFSFDSGISRDIQEKFKVDSSSGEIRLIDKLDYEETKSYEIQVKAVDKGSPPMSNHCKVLVKVLDVNDNAPELAVTSLYLPIREDAPLSTVIALITVSDRDSGANGQVTCSLMPHVPFKLVSTFKNYYSLVLDSALDRESLSVYELVVTARDGGSPSLWATARVSVEVADVNDNAPAFAQPEYTVFVKENNPPGCHIFTVSARDADAQENALVSYSLVERRVGERALSNYVSVHAESGKVYALQPLDHEELELLQFQPRQPNPDWRYSASLRAGMHSSVHLEEAGILRAGPGGPDQQWPTVSSATPEPEAGEVSPPVGAGVNSNSWTFKYGPGNPKQSGPGELPDKFIIPGSPAIISIRQEPTNSQIDKSDFITFGKKEETKKKKKKKKGNKTQEKKEKGNSTTDNSDQ

SEQ ID NO: 60297 - protein, 950 aa, Homo sapiens
MVFSRRGGLGARDLLLWLLLLAAWEVGSGQLHYSIPEEAKHGTFVGRVAQDLGLELAELVPRLFRVASKTHRDLLEVNLQNGILFVNSRIDREELCQWSAECSIHLELIADRPLQVFHVEVKVKDINDNPPVFRGREQIIFIPESRLLNSRFPIEGAADADIGANALLTYTLSPSDYFSLDVEASDELSKSLWLELRKYLDREETPELHLLLTATDGGKPELQGTVELLITVLDVNDNAPLFDQAVYRVHLLETTANGTLVTTLNASDADEGVNGEVVFSFDSGISRDIQEKFKVDSSSGEIRLIDKLDYEETKSYEIQVKAVDKGSPPMSNHCKVLVKVLDVNDNAPELAVTSLYLPIREDAPLSTVIALITVSDRDSGANGQVTCSLMPHVPFKLVSTFKNYYSLVLDSALDRESLSVYELVVTARDGGSPSLWATARVSVEVADVNDNAPAFAQPEYTVFVKENNPPGCHIFTVSARDADAQENALVSYSLVERRVGERALSNYVSVHAESGKVYALQPLDHEELELLQFQVSARDAGVPPLGSNVTLQVFVLDENDNAPALLAPRVGGTIGAVSELVPRLVGAGHVVAKVRAVDADSGYNAWLSYELQPAAGGARIPFRVGLYTGEISTTRVLDEADLSRYRLLVLVKDHGEPALTATATVLVSLVESGQAPKASSRASVGVAGPEAALVDVNVYLIIAICAVSSLLVLTLLLYTALRCSVPPTEGAYVPGKPTLVCSSALGSWSNSQQRRQRVCSSEGPPKTDLMAFSPGLSPSLNTSERNEQPEANLDLSGNPRQPNPDWRYSASLRAGMHSSVHLEEAGILRAGPGGPDQQWPTVSSATPEPEAGEVSPPVGAGVNSNSWTFKYGPGNPKQSGPGELPDKFIIPGSPAIISIRQEPTNSQIDKSDFITFGKKEETKKKKKKKKGNKTQEKKEKGNSTTDNSDQ

SEQ ID NO: 60298 - protein, 948 aa, Homo sapiens
MVSRCSCLGVQCLLLSLLLLAAWEVGSGQLHYSVYEEARHGTFVGRIAQDLGLELAELVQRLFRVASKRHGDLLEVNLQNGILFVNSRIDREELCGRSVECSIHLEVIVDRPLQVFHVDVEVKDINDNPPRFSVTEQKLSIPESRLLDSRFPLEGASDADVGENALLTYKLSPNEYFVLDIINKKDKDKFPVLVLRKLLDREENPQLKLLLTATDGGKPEFTGSVSLLILVLDANDNAPIFDRPVYEVKMYENQVNQTLVIRLNASDSDEGINKEMMYSFSSLVPPTIRRKFWINERTGEIKVNDAIDFEDSNTYEIHVDVTDKGNPPMVGHCTVLVELLDENDNSPEVIVTSLSLPVKEDAQVGTVIALISVSDHDSGANGQVTCSLTPHVPFKLVSTYKNYYSLVLDSALDRERVSAYELVVTARDGGSPPLWATASVSVEVADVNDNAPAFAQSEYTVFVKENNPPGCHIFTVSAWDADAQENALVSYSLVERRLGERSLSSYVSVHAESGKVYALQPLDHEELELLQFQVSARDGGVPPLGSNLTLQVFVLDENDNAPALLASPAGSAGGAVSELVLRSVVAGHVVAKVRAVDADSGYNAWLSYELQSAAVGARIPFRVGLYTGEISTTRALDETDSPRQRLLVLVKDHGEPSLTATATVLVSLVEGSQAPKASSRASVGVAPEVALVDVNVYLIIAICAVSSLLVLTLLLYTALRCSAAPTEGACGPVKPTLVCSSAVGSWSYSQQRRQRVCSGEGLPKADLMAFSPSLPPCPMVDVDGEDQSIGGDHSRKPRQPNPDWRYSASLRAGMHSSVHLEEAGILRAGPGGPDQQWPTVSSATPEPEAGEVSPPVGAGVNSNSWTFKYGPGNPKQSGPGELPDKFIIPGSPAIISIRQEPTNSQIDKSDFITFGKKEETKKKKKKKKGNKTQEKKEKGNSTTDNSDQ

SEQ ID NO: 60299 - protein, 685 aa, Homo sapiens
MVSRCSCLGVQCLLLSLLLLAAWEVGSGQLHYSVYEEARHGTFVGRIAQDLGLELAELVQRLFRVASKRHGDLLEVNLQNGILFVNSRIDREELCGRSVECSIHLEVIVDRPLQVFHVDVEVKDINDNPPRFSVTEQKLSIPESRLLDSRFPLEGASDADVGENALLTYKLSPNEYFVLDIINKKDKDKFPVLVLRKLLDREENPQLKLLLTATDGGKPEFTGSVSLLILVLDANDNAPIFDRPVYEVKMYENQVNQTLVIRLNASDSDEGINKEMMYSFSSLVPPTIRRKFWINERTGEIKVNDAIDFEDSNTYEIHVDVTDKGNPPMVGHCTVLVELLDENDNSPEVIVTSLSLPVKEDAQVGTVIALISVSDHDSGANGQVTCSLTPHVPFKLVSTYKNYYSLVLDSALDRERVSAYELVVTARDGGSPPLWATASVSVEVADVNDNAPAFAQSEYTVFVKENNPPGCHIFTVSAWDADAQENALVSYSLVERRLGERSLSSYVSVHAESGKVYALQPLDHEELELLQFQPRQPNPDWRYSASLRAGMHSSVHLEEAGILRAGPGGPDQQWPTVSSATPEPEAGEVSPPVGAGVNSNSWTFKYGPGNPKQSGPGELPDKFIIPGSPAIISIRQEPTNSQIDKSDFITFGKKEETKKKKKKKKGNKTQEKKEKGNSTTDNSDQ

SEQ ID NO: 60300 - protein, 949 aa, Homo sapiens
MFGFQRRGLGTPRLQLWLLLLEFWEVGSGQLHYSVSEEAKHGTFVGRIAQDLGLELAELVQRLFRVASKTHGDLLEVNLQNGILFVNSRIDREELCGQSAECSIHLEVIVDRPLQVFHVNVEVKDINDNPPVFSLREQKLLIAESKQSDSRFPLEGASDADIEENALLTYRLSKNEYFSLDSPTNGKQIKRLSLILKKSLDREKTPELNLLLTATDGGKPELTGTVRLLVQVLDVNDNDPEFDKSEYKVSLMENAAKETLVLKLNATDRDEGVNGEVTYSLMSIKPNGRHLFTLDQNNGEVRVNGTLDYEENKFYKIEVQATDKGTPPMAGHCTVWVEILDTNDNSPEVAVTSLSLPVREDAQPSTVIALISVSDRDSGVNGQVTCSLTPHVPFKLVSTFKNYYSLVLDSALDRENVWAYELVVTARDGGSPSLWATARVSVEVADVNDNAPAFAQPEYTVFVKENNPPGCHIFTVSARDADAQENALVSYSLVERRLGDRALSSYVSVHAESGKVYALQPLDHEELELLQFQVSARDAGVPPLSSNVTLQVFVLDENDNAPALLATQAGSAGGAVNKLVPRSVGAGHVVAKVRAVDADSGYNAWLSYELQPAAGGSRIPFRVGLYTGEISTTRALDEADSPRHRLLVLVKDHGEPALTATATVLVSLVESGQAPKASSRTLAGAASPEAALVDVNVYLIIAICVVSSLLVLTLLLYTALWWSATPTEGACAPGKPTLVCSRAVGSWSYSQQRRQRVCSEEGPPKTDLMAFSPSLPLGLNKEEEGERQEPGSNHPGQPRQPNPDWRYSASLRAGMHSSVHLEEAGILRAGPGGPDQQWPTVSSATPEPEAGEVSPPVGAGVNSNSWTFKYGPGNPKQSGPGELPDKFIIPGSPAIISIRQEPTNSQIDKSDFITFGKKEETKKKKKKKKGNKTQEKKEKGNSTTDNSDQ

SEQ ID NO: 60301 - protein, 941 aa, Homo sapiens
MVIIGPRGPGSQRLLLSLLLLAAWEVGSGQLHYSVYEEAKHGTFVGRIAQDLGLELAELVPRLFRVASKRHGDLLEVNLQNGILFVNSRIDREKLCGRSAECSIHLEVIVDRPLQVFHVDVEVKDINDNPPVFREREQKVPVSESAPLDSHFPLEGASDADIGVNSLLTYALSLNENFELKIKTKKDKSILPELVLRKLLDREQTPKLNLLLMVIDGGKPELTGSVQIQITVLDVNDNGPAFDKPSYKVVLSENVQNDTRVIQLNASDPDEGLNGEISYGIKMILPVSEKCMFSINPDTGEIRIYGELDFEENNAYEIQVNAIDKGIPSMAGHSMVLVEVLDVNDNVPEVMVTSLSLPVQEDAQVGTVIALISVSDRDSGANGQVICSLTPHVPFKLVSTYKNYYSLVLDSALDRESVSAYELVVTARDGGSPSLWATARVSVEVADVNDNAPAFAQPEYTVFVKENNPPGCHIFTVSAWDADAQKNALVSYSLVERRVGEHALSSYVSVHAESGKVYALQPLDHEELELLQFQVSARDAGVPPLGSNVTLQVFVLDENDNAPALLATPAGSAGGAVSELVPRSVGAGHVVAKVRAVDADSGYNAWLSYELQPAAVGAHIPFHVGLYTGEISTTRILDEADAPRHRLLVLVKDHGEPALTSTATVLVSLVENGQAPKTSSRASVGAVDPEAALVDINVYLIIAICAVSSLLVLTLLLYTALRCSAPPTVSRCAPGKPTLVCSSAVGSWSYSQQRRQRVCSAESPPKTDLMAFSPSLQLSREDCLNPPSEPRQPNPDWRYSASLRAGMHSSVHLEEAGILRAGPGGPDQQWPTVSSATPEPEAGEVSPPVGAGVNSNSWTFKYGPGNPKQSGPGELPDKFIIPGSPAIISIRQEPTNSQIDKSDFITFGKKEETKKKKKKKKGNKTQEKKEKGNSTTDNSDQ

SEQ ID NO: 60302 - protein, 950 aa, Homo sapiens
MLSSWQGGPRPRQLLLWLLILAAWETGSGQLHYSVPEEAKHGTFVGRIAQDLGLELAELVPRLFRVASKRHGDLLEVNLQNGILFVNSRIDREELCGRSAECSIHLEVIVDRPLQVFHVEVKVRDINDNPPIFPESKKRIIIAESRPPETRFPLDGASDADIGVNSALTYRLDPNDYFTLDAQNSLEQMSSLSLVLRKTLDREEIQEHSLLLTASDGGKPELTGTVQLLITILDVNDNAPEFYQSVYKVTVLENAFNGTLVIKLNATDPDDGTNGDIVYSFRRPVWPAVVYAFTINPNNGEIRTKGKLDFEEKKLYEISVEAVDKGNIPMAGHCTLLVEVLDVNDNAPEVTITSLSLPIREDTQPSAIIALISVSDRDSGSNGQVTCTLTPHVPFKLVSTYKNYYSLVLDSALDRESVSAYELVVTARDGGSPSLWATASVSVGVADVNDNAPAFAQPEYTVFVKENNPPGCHIFTVSAQDADAQENALVSYSLVERRVGERALSSYVSVHAESGKVYALQPLDHEELELLQFQVSARDSGVPPLGSNVTLQVFVLDENDNAPALLTPGAGSAGGTVSELMPRSVGAGHVVAKVRAVDADSGYNAWLSYELQLAAVGARIPFRVGLYTGEISTTRPLDEVDAPHHRLLVLVKDHGEPALTATATVLLSLVESGQAPQASSRASAGAVGPEAALVDVNVYLIIAICAVSSLLVLTLLLYTALRCSAPPTEGACAPGKPTLVCSSAAGSWSYSQQRRPRVCSGEGPHKTDLMAFSPSLPPCLGSAEGTGQREEDSECLKEPRQPNPDWRYSASLRAGMHSSVHLEEAGILRAGPGGPDQQWPTVSSATPEPEAGEVSPPVGAGVNSNSWTFKYGPGNPKQSGPGELPDKFIIPGSPAIISIRQEPTNSQIDKSDFITFGKKEETKKKKKKKKGNKTQEKKEKGNSTTDNSDQ

SEQ ID NO: 60303 - protein, 904 aa, Homo sapiens
MLSSWQGGPRPRQLLLWLLILAAWETGSGQLHYSVPEEAKHGTFVGRIAQDLGLELAELVPRLFRVASKRHGDLLEVNLQNGILFVNSRIDREELCGRSAECSIHLEVIVDRPLQVFHVEVKVRDINDNPPIFPESKKRIIIAESRPPETRFPLDGASDADIGVNSALTYRLDPNDYFTLDAQNSLEQMSSLSLVLRKTLDREEIQEHSLLLTASDGGKPELTGTVQLLITILDVNDNAPEFYQSVYKVTVLENAFNGTLVIKLNATDPDDGTNGDIVYSFRRPVWPAVVYAFTINPNNGEIRTKGKLDFEEKKLYEISVEAVDKGNIPMAGHCTLLVEVLDVNDNAPEVTITSLSLPIREDTQPSAIIALISVSDRDSGSNGQVTCTLTPHVPFKLVSTYKNYYSLVLDSALDRESVSAYELVVTARDGGSPSLWATASVSVGVADVNDNAPAFAQPEYTVFVKENNPPGCHIFTVSAQDADAQENALVSYSLVERRVGERALSSYVSVHAESGKVYALQPLDHEELELLQFQVSARDSGVPPLGSNVTLQVFVLDENDNAPALLTPGAGSAGGTVSELMPRSVGAGHVVAKVRAVDADSGYNAWLSYELQLAAVGARIPFRVGLYTGEISTTRPLDEVDAPHHRLLVLVKDHGEPALTATATVLLSLVESGQAPQASSRASAGAVGPEAALVDVNVYLIIAICAVSSLLVLTLLLYTALRCSAPPTEGACAPGKPTLVCSSAAGSWSYSQQRRPRVCSGEGPHKTDLMAFSPSLPPCLGSAEGTGQREEDSECLKEPRQPNPDWRYSASLRAGMHSSVHLEEAGILRAGPGGPDQQWPTVSSATPEPEAGEVSPPVGAGVNSNSWTFKYGPGNPKQSGPEPKKQTQVSFLLRRKGEASQPRQ

SEQ ID NO: 60304 - protein, 824 aa, Homo sapiens
MASSIRRGRGAWTRLLSLLLLAAWEVGSGQLRYSVPEEAKHGTFVGRIAQDLGLELEELVPRLFRVASKRHGDLLEVNLQNGILFVNSRIDREELCGRSAECSIHVEVIVDRPLQVFHVEVEVKDINDNPPIFPMTVKTIRFPESRLLDSRFPLEGASDADIGVNALLSYKLSSSEFFFLDIQANDELSESLSLVLGKSLDREETAEVNLLLVATDGGKPELTGTVQILIKVLDVNDNEPTFAQSVYKVKLLENTANGTLVVKLNASDADEGPNSEIVYSLGSDVSSTIQTKFTIDPISGEIRTKGKLDYEEAKSYEIQVTATDKGTPSMSGHCKISLKLVDINDNTPEVSITSLSLPISENASLGTVIALITVSDRDSGTNGHVTCSLTPHVPFKLVSTFKNYYSLVLDSALDRESVSAYELVVTARDGGSPSLWATTSVSIEVADVNDNAPAFAQPEYTVFVKENNPPGCHIFTVSAWDADAQENALVSYSLVERRVGERALSSYVSVHAESGKVYALQPLDHEEVELLQFQVSARDAGVPPLGSNVTLQVFVLDENDNAPALLAPRAGTAAGAVSELVPWSVGAGHVVAKVRAVDADSGYNAWLSYELQLGTGSARIPFRVGLYTGEISTTRALDEADSPRHRLLVLVKDHGEPALTATATVLVSLVESGQAPKASSRAWVGAAGSEATLVDVNVYLIIAICAVSSLLVLTVLLYTALRCSVPPTEGARAPGKPTLVCSSAVGSWSYSQQRRQRVCSGEDPPKTDLMAFSPSLSQGPDSAEEKQLSESEYVGKVSLLLFLANSKIVLFKKFYMISTSYLDS

SEQ ID NO: 60305 - protein, 948 aa, Homo sapiens
MASSIRRGRGAWTRLLSLLLLAAWEVGSGQLRYSVPEEAKHGTFVGRIAQDLGLELEELVPRLFRVASKRHGDLLEVNLQNGILFVNSRIDREELCGRSAECSIHVEVIVDRPLQVFHVEVEVKDINDNPPIFPMTVKTIRFPESRLLDSRFPLEGASDADIGVNALLSYKLSSSEFFFLDIQANDELSESLSLVLGKSLDREETAEVNLLLVATDGGKPELTGTVQILIKVLDVNDNEPTFAQSVYKVKLLENTANGTLVVKLNASDADEGPNSEIVYSLGSDVSSTIQTKFTIDPISGEIRTKGKLDYEEAKSYEIQVTATDKGTPSMSGHCKISLKLVDINDNTPEVSITSLSLPISENASLGTVIALITVSDRDSGTNGHVTCSLTPHVPFKLVSTFKNYYSLVLDSALDRESVSAYELVVTARDGGSPSLWATTSVSIEVADVNDNAPAFAQPEYTVFVKENNPPGCHIFTVSAWDADAQENALVSYSLVERRVGERALSSYVSVHAESGKVYALQPLDHEEVELLQFQVSARDAGVPPLGSNVTLQVFVLDENDNAPALLAPRAGTAAGAVSELVPWSVGAGHVVAKVRAVDADSGYNAWLSYELQLGTGSARIPFRVGLYTGEISTTRALDEADSPRHRLLVLVKDHGEPALTATATVLVSLVESGQAPKASSRAWVGAAGSEATLVDVNVYLIIAICAVSSLLVLTVLLYTALRCSVPPTEGARAPGKPTLVCSSAVGSWSYSQQRRQRVCSGEDPPKTDLMAFSPSLSQGPDSAEEKQLSESEYVGKPRQPNPDWRYSASLRAGMHSSVHLEEAGILRAGPGGPDQQWPTVSSATPEPEAGEVSPPVGAGVNSNSWTFKYGPGNPKQSGPGELPDKFIIPGSPAIISIRQEPTNSQIDKSDFITFGKKEETKKKKKKKKGNKTQEKKEKGNSTTDNSDQ

SEQ ID NO: 60306 - protein, 950 aa, Homo sapiens
MLFSWREDPGAQCLLLSLLLLAASEVGSGQLHYSVSEEAKHGTFVGRIAQDLGLELAELVPRLFRVASKRHGDLLEVNLQNGILFVNSRIDREELCGRSAECSIHLEVIVDRPLQVFHVEVEVKDINDNAPVFPMAVKNLFISESRQPGSRFSLEGASDADIGTNSLLTYSLDSTEYFTLDVKRNDEEIKSLGLVLKKNLNREDTPKHYLLITAIDGGKPELTGTTQLKITVLDVNDNAPAFERTIYKVRLLENAPNGTLVVTVNATDLDEGVNKDIAYSFNTDMSADILSKFHLDPVNGQISVKGNIDFEESKSYEIQVEATDKGNPPMSDHCTVLLEIVDINDNVPELVIQSLSLPVLEDSPLSTVIALISVSDRDSGVNGQVTCSLTPHVPFKLVSTFKNYYSLVLDSPLDRESVSAYELVVTARDGGSPSLWATASVSVEVADVNDNAPAFSQSEYTVFVKENNPPGCHIFTVSARDADAQENALVSYSLVERRVGERALSSYVSVHAESGKVYALQPLDHEELELLQFQVSARDAGVPPLGSNVTLQVFVLDENDNAPALLMPRVGGIGGAVSELVPRSVGAGHVVAKVRAVDADSGYNAWLSYELQPGTGGARIPFRVGLYTGEISTTRALDEVDAPRHRLLVLVKDHGEPSLTATATVLVSLVESGQAPKASSQASAGATGPEAALVDVNVYLIVAICAVSSLLVLTLLLYTALRCSAPPTEGDCGPGKPTLVCSSAVGSWSYSQQRQQRVCSGEGLPKTDLMAFSPSLPPCPISRDREEKQDVDVDLSAKPRQPNPDWRYSASLRAGMHSSVHLEEAGILRAGPGGPDQQWPTVSSATPEPEAGEVSPPVGAGVNSNSWTFKYGPGNPKQSGPGELPDKFIIPGSPAIISIRQEPTNSQIDKSDFITFGKKEETKKKKKKKKGNKTQEKKEKGNSTTDNSDQ

SEQ ID NO: 60307 - protein, 824 aa, Homo sapiens
MLFSWREDPGAQCLLLSLLLLAASEVGSGQLHYSVSEEAKHGTFVGRIAQDLGLELAELVPRLFRVASKRHGDLLEVNLQNGILFVNSRIDREELCGRSAECSIHLEVIVDRPLQVFHVEVEVKDINDNAPVFPMAVKNLFISESRQPGSRFSLEGASDADIGTNSLLTYSLDSTEYFTLDVKRNDEEIKSLGLVLKKNLNREDTPKHYLLITAIDGGKPELTGTTQLKITVLDVNDNAPAFERTIYKVRLLENAPNGTLVVTVNATDLDEGVNKDIAYSFNTDMSADILSKFHLDPVNGQISVKGNIDFEESKSYEIQVEATDKGNPPMSDHCTVLLEIVDINDNVPELVIQSLSLPVLEDSPLSTVIALISVSDRDSGVNGQVTCSLTPHVPFKLVSTFKNYYSLVLDSPLDRESVSAYELVVTARDGGSPSLWATASVSVEVADVNDNAPAFSQSEYTVFVKENNPPGCHIFTVSARDADAQENALVSYSLVERRVGERALSSYVSVHAESGKVYALQPLDHEELELLQFQVSARDAGVPPLGSNVTLQVFVLDENDNAPALLMPRVGGIGGAVSELVPRSVGAGHVVAKVRAVDADSGYNAWLSYELQPGTGGARIPFRVGLYTGEISTTRALDEVDAPRHRLLVLVKDHGEPSLTATATVLVSLVESGQAPKASSQASAGATGPEAALVDVNVYLIVAICAVSSLLVLTLLLYTALRCSAPPTEGDCGPGKPTLVCSSAVGSWSYSQQRQQRVCSGEGLPKTDLMAFSPSLPPCPISRDREEKQDVDVDLSAKVSNFYLFFPKCLCFSFLNVSTPLEIH

SEQ ID NO: 60308 - protein, 816 aa, Homo sapiens
MVYSRRGSLGSRLLLLWLLLAYWKAGSGQLHYSIPEEAKHGTFVGRIAQDLGLELAELVPRLFRVASKGRGDLLEVNLQNGILFVNSRIDREELCRRRAECSIHLEVIVDRPLQVFHVEVAVKDINDNPPRFSRQEQRLFILESRMPDSRFPLEGASDLDIGANAQLRYRLNPNEYFDLDVKTNEEETNFLELVLRKSLDREETQEHRLLVIATDGGKPELTGTVQLLINVLDANDNAPEFDKSIYNVRLLENAPSGTLVIKLNASDADEGINKEIVYFFSNLVLDDVKSKFIINSNTGEIKVNGELDYEDYNSYEINIDAMDKSTFPLSGHCKVVVKLLDVNDNTPEMAITTLFLPVKEDAPLSTVIALISVSDRDSGANGQVTCSLMPHVPFKLVSTFKNYYSLVLDSALDRESVSVYELVVTARDGGSPSLWATASVSVEVADVNDNAPAFAQPQYTVFVKENNPPGCHIFTVSARDADAQENALVSYSLVERRVGERPLSSYVSVHAESGKVYALQPLDHEEVELLQFQVSARDAGVPPLGSNVTLQVFVLDENDNAPALLVPRVGGTGGAVSELVPRSVGAGHVVAKVRAVDPDSGYNAWLSYELQPAPGSARIPFRVGLYTGEISTTRSLDETEAPRHRLLVLVKDHGEPPLTATATVLVSLVESGQAPKASSRASAGAVGPEAALVDVNVYLIIAICAVSSLLVLTLLLYTALRCSAQPTEAVCTRGKPTLLCSSAVGSWSYSQQRRQRVCSGEAPPKTDLMAFSPSLPQGPTSTDNVSFLILTSIFPSQFSNIKCHIHPLFLYLKIMS

SEQ ID NO: 60309 - protein, 890 aa, Homo sapiens
MVYSRRGSLGSRLLLLWLLLAYWKAGSGQLHYSIPEEAKHGTFVGRIAQDLGLELAELVPRLFRVASKGRGDLLEVNLQNGILFVNSRIDREELCRRRAECSIHLEVIVDRPLQVFHVEVAVKDINDNPPRFSRQEQRLFILESRMPDSRFPLEGASDLDIGANAQLRYRLNPNEYFDLDVKTNEEETNFLELVLRKSLDREETQEHRLLVIATDGGKPELTGTVQLLINVLDANDNAPEFDKSIYNVRLLENAPSGTLVIKLNASDADEGINKEIVYFFSNLVLDDVKSKFIINSNTGEIKVNGELDYEDYNSYEINIDAMDKSTFPLSGHCKVVVKLLDVNDNTPEMAITTLFLPVKEDAPLSTVIALISVSDRDSGANGQVTCSLMPHVPFKLVSTFKNYYSLVLDSALDRESVSVYELVVTARDGGSPSLWATASVSVEVADVNDNAPAFAQPQYTVFVKENNPPGCHIFTVSARDADAQENALVSYSLVERRVGERPLSSYVSVHAESGKVYALQPLDHEEVELLQFQVSARDAGVPPLGSNVTLQVFVLDENDNAPALLVPRVGGTGGAVSELVPRSVGAGHVVAKVRAVDPDSGYNAWLSYELQPAPGSARIPFRVGLYTGEISTTRSLDETEAPRHRLLVLVKDHGEPPLTATATVLVSLVESGQAPKASSRASAGAVGPEAALVDVNVYLIIAICAVSSLLVLTLLLYTALRCSAQPTEAVCTRGKPTLLCSSAVGSWSYSQQRRQRVCSGEAPPKTDLMAFSPSLPQGPTSTDNPRQPNPDWRYSASLRAGMHSSVHLEEAGILRAGPGGPDQQWPTVSSATPEPEAGEVSPPVGAGVNSNSWTFKYGPGNPKQSGPEPKKQTQVSFLLRRKGEASQPRQ

SEQ ID NO: 60310 - protein, 936 aa, Homo sapiens
MVYSRRGSLGSRLLLLWLLLAYWKAGSGQLHYSIPEEAKHGTFVGRIAQDLGLELAELVPRLFRVASKGRGDLLEVNLQNGILFVNSRIDREELCRRRAECSIHLEVIVDRPLQVFHVEVAVKDINDNPPRFSRQEQRLFILESRMPDSRFPLEGASDLDIGANAQLRYRLNPNEYFDLDVKTNEEETNFLELVLRKSLDREETQEHRLLVIATDGGKPELTGTVQLLINVLDANDNAPEFDKSIYNVRLLENAPSGTLVIKLNASDADEGINKEIVYFFSNLVLDDVKSKFIINSNTGEIKVNGELDYEDYNSYEINIDAMDKSTFPLSGHCKVVVKLLDVNDNTPEMAITTLFLPVKEDAPLSTVIALISVSDRDSGANGQVTCSLMPHVPFKLVSTFKNYYSLVLDSALDRESVSVYELVVTARDGGSPSLWATASVSVEVADVNDNAPAFAQPQYTVFVKENNPPGCHIFTVSARDADAQENALVSYSLVERRVGERPLSSYVSVHAESGKVYALQPLDHEEVELLQFQVSARDAGVPPLGSNVTLQVFVLDENDNAPALLVPRVGGTGGAVSELVPRSVGAGHVVAKVRAVDPDSGYNAWLSYELQPAPGSARIPFRVGLYTGEISTTRSLDETEAPRHRLLVLVKDHGEPPLTATATVLVSLVESGQAPKASSRASAGAVGPEAALVDVNVYLIIAICAVSSLLVLTLLLYTALRCSAQPTEAVCTRGKPTLLCSSAVGSWSYSQQRRQRVCSGEAPPKTDLMAFSPSLPQGPTSTDNPRQPNPDWRYSASLRAGMHSSVHLEEAGILRAGPGGPDQQWPTVSSATPEPEAGEVSPPVGAGVNSNSWTFKYGPGNPKQSGPGELPDKFIIPGSPAIISIRQEPTNSQIDKSDFITFGKKEETKKKKKKKKGNKTQEKKEKGNSTTDNSDQ

SEQ ID NO: 60311 - protein, 686 aa, Homo sapiens
MVFTPEDRLGKQCLLLPLLLLAAWKVGSGQLHYSVPEEAKHGTFVGRIAQDLGLELAELVPRLFRMASKDREDLLEVNLQNGILFVNSRIDREELCGRSAECSIHLEVIVDRPLQVFHVDVEVRDINDNPPLFPVEEQRVLIYESRLPDSVFPLEGASDADVGSNSILTYKLSSSEYFGLDVKINSDDNKQIGLLLKKSLDREEAPAHNLFLTATDGGKPELTGTVQLLVTVLDVNDNAPTFEQSEYEVRIFENADNGTTVIRLNASDRDEGANGAISYSFNSLVAAMVIDHFSIDRNTGEIVIRGNLDFEQENLYKILIDATDKGHPPMAGHCTVLVRILDKNDNVPEIALTSLSLPVREDAQFGTVIALISVNDLDSGANGQVNCSLTPHVPFKLVSTFKNYYSLVLDSALDRESVSAYELVVTARDGGSPSLWATASLSVEVADMNDNAPAFAQPEYTVFVKENNPPGCHIFTVSARDADAQENALVSYSLVERRVGERALSSYISVHAESGKVYALQPLDHEELELLQFQPRQPNPDWRYSASLRAGMHSSVHLEEAGILRAGPGGPDQQWPTVSSATPEPEAGEVSPPVGAGVNSNSWTFKYGPGNPKQSGPGELPDKFIIPGSPAIISIRQEPTNSQIDKSDFITFGKKEETKKKKKKKKGNKTQEKKEKGNSTTDNSDQ

SEQ ID NO: 60312 - protein, 950 aa, Homo sapiens
MVFTPEDRLGKQCLLLPLLLLAAWKVGSGQLHYSVPEEAKHGTFVGRIAQDLGLELAELVPRLFRMASKDREDLLEVNLQNGILFVNSRIDREELCGRSAECSIHLEVIVDRPLQVFHVDVEVRDINDNPPLFPVEEQRVLIYESRLPDSVFPLEGASDADVGSNSILTYKLSSSEYFGLDVKINSDDNKQIGLLLKKSLDREEAPAHNLFLTATDGGKPELTGTVQLLVTVLDVNDNAPTFEQSEYEVRIFENADNGTTVIRLNASDRDEGANGAISYSFNSLVAAMVIDHFSIDRNTGEIVIRGNLDFEQENLYKILIDATDKGHPPMAGHCTVLVRILDKNDNVPEIALTSLSLPVREDAQFGTVIALISVNDLDSGANGQVNCSLTPHVPFKLVSTFKNYYSLVLDSALDRESVSAYELVVTARDGGSPSLWATASLSVEVADMNDNAPAFAQPEYTVFVKENNPPGCHIFTVSARDADAQENALVSYSLVERRVGERALSSYISVHAESGKVYALQPLDHEELELLQFQVSARDAGVPPLGSNVTLQVFVLDENDNAPALLAPRVGGTGGAVSELVPRSLGAGQVVAKVRAVDADSGYNAWLSYELQPPASSARFPFRVGLYTGEISTTRVLDEADSPRHRLLVLVKDHGEPALTATATVLVSLVESGQAPKASSRASVGAAGPEAALVDVNVYLIIAICAVSSLLVLTLLLYTALRCSAPPTEGACTADKPTLVCSSAVGSWSYSQQRRQRVCSGEGPPKMDLMAFSPSLSPCPIMMGKAENQDLNEDHDAKPRQPNPDWRYSASLRAGMHSSVHLEEAGILRAGPGGPDQQWPTVSSATPEPEAGEVSPPVGAGVNSNSWTFKYGPGNPKQSGPGELPDKFIIPGSPAIISIRQEPTNSQIDKSDFITFGKKEETKKKKKKKKGNKTQEKKEKGNSTTDNSDQ

SEQ ID NO: 60313 - protein, 789 aa, Homo sapiens
MVCPNGYDPGGRHLLLFIIILAAWEAGRGQLHYSVPEEAKHGNFVGRIAQDLGLELAELVPRLFRAVCKFRGDLLEVNLQNGILFVNSRIDREELCGRSAECSIHLEVIVERPLQVFHVDVEVKDINDNPPVFPATQRNLFIAESRPLDSRFPLEGASDADIGENALLTYRLSPNEYFFLDVPTSNQQVKPLGLVLRKLLDREETPELHLLLTATDGGKPELTGTVQLLITVLDNNDNAPVFDRTLYTVKLPENVSIGTLVIHPNASDLDEGLNGDIIYSFSSDVSPDIKSKFHMDPLSGAITVIGHMDFEESRAHKIPVEAVDKGFPPLAGHCTVLVEVVDVNDNAPQLTLTSLSLPIPEDAQPGTVITLISVFDRDFGVNGQVTCSLTPRVPFKLVSTFKNYYSLVLDSALDRESVSAYELVVTARDGGSPSLWATASVSVEVADVNDNAPAFAQPEYTVFVKENNPPGCHIFTVSAGDADAQKNALVSYSLVELRVGERALSSYVSVHAESGKVYALQPLDHEELELLQFQVSARDAGVPPLGSNVTLQVFVLDENDNAPALLAPRVGGTGGAVRELVPRSVGAGHVVAKVRAVDADSGYNAWLSYELQPVAAGASIPFRVGLYTGEISTTRALDETDAPRHRLLVLVKDHGEPSLTATATVLVSLVESGQAPKASSRASLGIAGPETELVDVNVYLIIAICAVSSLLVLTLLLYTALRCSAPSSEGACSLVKPTLVCSSAVGSWSFSQQRRQRVCSGEGPPKTDLMAFSPSLPQGPSSTDNVSHK

SEQ ID NO: 60314 - protein, 937 aa, Homo sapiens
MVCPNGYDPGGRHLLLFIIILAAWEAGRGQLHYSVPEEAKHGNFVGRIAQDLGLELAELVPRLFRAVCKFRGDLLEVNLQNGILFVNSRIDREELCGRSAECSIHLEVIVERPLQVFHVDVEVKDINDNPPVFPATQRNLFIAESRPLDSRFPLEGASDADIGENALLTYRLSPNEYFFLDVPTSNQQVKPLGLVLRKLLDREETPELHLLLTATDGGKPELTGTVQLLITVLDNNDNAPVFDRTLYTVKLPENVSIGTLVIHPNASDLDEGLNGDIIYSFSSDVSPDIKSKFHMDPLSGAITVIGHMDFEESRAHKIPVEAVDKGFPPLAGHCTVLVEVVDVNDNAPQLTLTSLSLPIPEDAQPGTVITLISVFDRDFGVNGQVTCSLTPRVPFKLVSTFKNYYSLVLDSALDRESVSAYELVVTARDGGSPSLWATASVSVEVADVNDNAPAFAQPEYTVFVKENNPPGCHIFTVSAGDADAQKNALVSYSLVELRVGERALSSYVSVHAESGKVYALQPLDHEELELLQFQVSARDAGVPPLGSNVTLQVFVLDENDNAPALLAPRVGGTGGAVRELVPRSVGAGHVVAKVRAVDADSGYNAWLSYELQPVAAGASIPFRVGLYTGEISTTRALDETDAPRHRLLVLVKDHGEPSLTATATVLVSLVESGQAPKASSRASLGIAGPETELVDVNVYLIIAICAVSSLLVLTLLLYTALRCSAPSSEGACSLVKPTLVCSSAVGSWSFSQQRRQRVCSGEGPPKTDLMAFSPSLPQGPSSTDNPRQPNPDWRYSASLRAGMHSSVHLEEAGILRAGPGGPDQQWPTVSSATPEPEAGEVSPPVGAGVNSNSWTFKYGPGNPKQSGPGELPDKFIIPGSPAIISIRQEPTNSQIDKSDFITFGKKEETKKKKKKKKGNKTQEKKEKGNSTTDNSDQ

SEQ ID NO: 60315 - protein, 814 aa, Homo sapiens
MDYHWRGELGSWRLLLLLLLLAAWKVGSGQLHYSVPEEAKHGTFVGRIAQDLGLELAELVPRLFRVASKRHRDLLEVSLQNGILFVNSRIDREELCGRSAECSIHLEVIVDRPLQVFHVDVEVKDVNDNPPVFRVKDQKLFVSESRMPDSRFPLEGASDADVGANSVLTYRLSSHDYFMLDVNSKNDENKLVELVLRKSLDREDAPAHHLFLTATDGGKPELTGTVQLLVTVLDVNDNAPTFEQSEYEVRIFENADNGTTVIKLNASDPDEGANGAISYSFNSLVETMVIDHFSIDRNTGEIVIRGNLDFEQENLYKILIDATDKGHPPMAGHCTVLVRILDKNDNVPEIALTSLSLPVREDAQFGTVIALISVNDLDSGANGQVTCSLMPHVPFKLVSTFKNYYSLVLDSALDRERVSAYELVVTARDGGSPSLWATASLSVEVADVNDNAPAFAQPEYTVFVKENNPPGCHIFTVSARDADAQENALVSYSLVERRVGERSLSSYISVHTESGKVYALQPLDHEELELLQFQVSARDAGVPPLGSNVTLQVFVLDENDNAPALLEPRVGGTGGAASKLVPRSVGAGHVVAKVRAVDADSGYNAWLSYELQPAASSPRIPFRVGLYTGEISTTRVLDEADSPRHRLLVLVKDHGEPALTATATVLVSLVESGQAPKASSRQSAGVLGPEAALVDVNVYLIIAICAVSSLLVLTLLLYTALRCSALPTEGGCRAGKPTLVCSSAVGSWSYSQQQPQRVCSGEGPPKTDLMAFSPCLPPDLGSVDVGEEQDLNVDHGLKVSPFKFRTHKFYLWKL

SEQ ID NO: 60316 - protein, 950 aa, Homo sapiens
MDYHWRGELGSWRLLLLLLLLAAWKVGSGQLHYSVPEEAKHGTFVGRIAQDLGLELAELVPRLFRVASKRHRDLLEVSLQNGILFVNSRIDREELCGRSAECSIHLEVIVDRPLQVFHVDVEVKDVNDNPPVFRVKDQKLFVSESRMPDSRFPLEGASDADVGANSVLTYRLSSHDYFMLDVNSKNDENKLVELVLRKSLDREDAPAHHLFLTATDGGKPELTGTVQLLVTVLDVNDNAPTFEQSEYEVRIFENADNGTTVIKLNASDPDEGANGAISYSFNSLVETMVIDHFSIDRNTGEIVIRGNLDFEQENLYKILIDATDKGHPPMAGHCTVLVRILDKNDNVPEIALTSLSLPVREDAQFGTVIALISVNDLDSGANGQVTCSLMPHVPFKLVSTFKNYYSLVLDSALDRERVSAYELVVTARDGGSPSLWATASLSVEVADVNDNAPAFAQPEYTVFVKENNPPGCHIFTVSARDADAQENALVSYSLVERRVGERSLSSYISVHTESGKVYALQPLDHEELELLQFQVSARDAGVPPLGSNVTLQVFVLDENDNAPALLEPRVGGTGGAASKLVPRSVGAGHVVAKVRAVDADSGYNAWLSYELQPAASSPRIPFRVGLYTGEISTTRVLDEADSPRHRLLVLVKDHGEPALTATATVLVSLVESGQAPKASSRQSAGVLGPEAALVDVNVYLIIAICAVSSLLVLTLLLYTALRCSALPTEGGCRAGKPTLVCSSAVGSWSYSQQQPQRVCSGEGPPKTDLMAFSPCLPPDLGSVDVGEEQDLNVDHGLKPRQPNPDWRYSASLRAGMHSSVHLEEAGILRAGPGGPDQQWPTVSSATPEPEAGEVSPPVGAGVNSNSWTFKYGPGNPKQSGPGELPDKFIIPGSPAIISIRQEPTNSQIDKSDFITFGKKEETKKKKKKKKGNKTQEKKEKGNSTTDNSDQ

SEQ ID NO: 60317 - protein, 842 aa, Homo sapiens
MLYSSRGDPEGQPLLLSLLILAMWVVGSGQLHYSVPEEAEHGTFVGRIAQDLGLELAELVPRLFQLDSKGRGDLLEVNLQNGILFVNSRIDREELCGRSAECSIHLEVIVDRPLQVFHVDVEVKDINDNPPVFPATQKNLFIAESRPLDSRFPLEGASDADIGENALLTYRLSPNEYFFLDVPTSNQQVKPLGLVLRKLLDREETPELHLLLTATDGGKPELTGTVQLLITVLDNNDNAPVFDRTLYTVKLPENVSIGTLVIHPNASDLDEGLNGDIIYSFSSDVSPDIKSKFHMDPLSGAITVIGHMDFEESRAHKIPVEAVDKGFPPLAGHCTLLVEVVDVNDNAPQLTIKTLSVPVKEDAQLGTVIALISVIDLDADANGQVTCSLTPHVPFKLVSTYKNYYSLVLDRALDRESVSAYELVVTARDGGSPSLWATARVSVEVADVNDNAPAFAQSEYTVFVKENNPPGCHIFTVSARDADAQENALVSYSLVERRLGERSLSSYVSVHAESGKVYALQPLDHEELELLQFQVSARDAGVPPLGSNVTLQVFVLDENDNAPALLTPRMRGTDGAVSEMVLRSVGAGVVVGKVRAVDADSGYNAWLSYELQPETASASIPFRVGLYTGEISTTRALDETDAPRQRLLVLVKDHGEPALTATATVLVSLVESGQAPKSSSRASVGATGPEVTLVDVNVYLIIAICAVSSLLVLTLLLYTVLRCSAMPTEGECAPGKPTLVCSSAVGSWSYSQQRRQRVCSGEGKQKTDLMAFSPGLSPCAGSTERTGEPSASSDSTGKVGFSSILFIYIIFFLERYYRLLPGAVQIVLFIFLEIQQIFFLIK

SEQ ID NO: 60318 - protein, 950 aa, Homo sapiens
MLYSSRGDPEGQPLLLSLLILAMWVVGSGQLHYSVPEEAEHGTFVGRIAQDLGLELAELVPRLFQLDSKGRGDLLEVNLQNGILFVNSRIDREELCGRSAECSIHLEVIVDRPLQVFHVDVEVKDINDNPPVFPATQKNLFIAESRPLDSRFPLEGASDADIGENALLTYRLSPNEYFFLDVPTSNQQVKPLGLVLRKLLDREETPELHLLLTATDGGKPELTGTVQLLITVLDNNDNAPVFDRTLYTVKLPENVSIGTLVIHPNASDLDEGLNGDIIYSFSSDVSPDIKSKFHMDPLSGAITVIGHMDFEESRAHKIPVEAVDKGFPPLAGHCTLLVEVVDVNDNAPQLTIKTLSVPVKEDAQLGTVIALISVIDLDADANGQVTCSLTPHVPFKLVSTYKNYYSLVLDRALDRESVSAYELVVTARDGGSPSLWATARVSVEVADVNDNAPAFAQSEYTVFVKENNPPGCHIFTVSARDADAQENALVSYSLVERRLGERSLSSYVSVHAESGKVYALQPLDHEELELLQFQVSARDAGVPPLGSNVTLQVFVLDENDNAPALLTPRMRGTDGAVSEMVLRSVGAGVVVGKVRAVDADSGYNAWLSYELQPETASASIPFRVGLYTGEISTTRALDETDAPRQRLLVLVKDHGEPALTATATVLVSLVESGQAPKSSSRASVGATGPEVTLVDVNVYLIIAICAVSSLLVLTLLLYTVLRCSAMPTEGECAPGKPTLVCSSAVGSWSYSQQRRQRVCSGEGKQKTDLMAFSPGLSPCAGSTERTGEPSASSDSTGKPRQPNPDWRYSASLRAGMHSSVHLEEAGILRAGPGGPDQQWPTVSSATPEPEAGEVSPPVGAGVNSNSWTFKYGPGNPKQSGPGELPDKFIIPGSPAIISIRQEPTNSQIDKSDFITFGKKEETKKKKKKKKGNKTQEKKEKGNSTTDNSDQ

SEQ ID NO: 60319 - protein, 963 aa, Homo sapiens
MVGCGVAVLCLWVSCGAAAGQLEYSVPEETERGVAVGNLSADLRLPAAAMSSRNFRFLSSHRELYFGVDLPSGNLVVREPADREQLCRAKAACVLTYDLVLEDPLELHKIRIHVLDTNDNSPLFPAGDVQLHIPEFLTPGARFTLPNAQDDDEGSNGILSYSLSPSQHFRLDMGSRVDGSEYPELVLEKALDREQRATHLLVLTARDGGLPARSGDAQVTIIVVDTNDNAPVFERSVYRTKVPETAPNGTVLFRVQALDPDEGSNGEVQYSLSNSTQAELRHRFHVHPKSGEVQVAASLGPPETLLEAYIEARDEGVFGLASTAKLLVEVTDVNDHAPELDFLTLSNPVPEDAAPGTVIALFSVKDEDLDSNGRVICGMSSAGPFQLTASFDNYYSLLIDGPLDREQISEYQVLITASDSGSPPLSTRRTITVSVADVNDNTPNFPQPQQELFVAENNGPGASLGRVFAQDPDLGKNGLVSYELLDVISEGPSASSLLAVESSSGAITAKTSFDFEQLRGFHFQVEGRDGGIPPRSATVTINLFVVDRNDNYPVILFPLPRNGSVPVEIVPRSARTGHLVTKVVAEDADSGSNAWLSYHISRASDSSLFRISANIGELRTARLVLPTDAVKQRVVVVVRDHGDPPLSSSVTLGVLLSNSVPQLLPDFEDVWEPGGQLSAQNLYLVIALACISFLFLGCLLFFVCTKLHQSPGCCAQSCCRSTEDLRYGSKMVSNPCMTSATIDVTTVERLSQTYLYRASLGLGSDNNSLLLRGEYNAADLRNLATGVGLNLPISCIQIRNRKGDHANVNAMPRQPNPDWRYSASLRAGMHSSVHLEEAGILRAGPGGPDQQWPTVSSATPEPEAGEVSPPVGAGVNSNSWTFKYGPGNPKQSGPGELPDKFIIPGSPAIISIRQEPTNSQIDKSDFITFGKKEETKKKKKKKKGNKTQEKKEKGNSTTDNSDQ

SEQ ID NO: 60320 - protein, 818 aa, Homo sapiens
MVGCGVAVLCLWVSCGAAAGQLEYSVPEETERGVAVGNLSADLRLPAAAMSSRNFRFLSSHRELYFGVDLPSGNLVVREPADREQLCRAKAACVLTYDLVLEDPLELHKIRIHVLDTNDNSPLFPAGDVQLHIPEFLTPGARFTLPNAQDDDEGSNGILSYSLSPSQHFRLDMGSRVDGSEYPELVLEKALDREQRATHLLVLTARDGGLPARSGDAQVTIIVVDTNDNAPVFERSVYRTKVPETAPNGTVLFRVQALDPDEGSNGEVQYSLSNSTQAELRHRFHVHPKSGEVQVAASLGPPETLLEAYIEARDEGVFGLASTAKLLVEVTDVNDHAPELDFLTLSNPVPEDAAPGTVIALFSVKDEDLDSNGRVICGMSSAGPFQLTASFDNYYSLLIDGPLDREQISEYQVLITASDSGSPPLSTRRTITVSVADVNDNTPNFPQPQQELFVAENNGPGASLGRVFAQDPDLGKNGLVSYELLDVISEGPSASSLLAVESSSGAITAKTSFDFEQLRGFHFQVEGRDGGIPPRSATVTINLFVVDRNDNYPVILFPLPRNGSVPVEIVPRSARTGHLVTKVVAEDADSGSNAWLSYHISRASDSSLFRISANIGELRTARLVLPTDAVKQRVVVVVRDHGDPPLSSSVTLGVLLSNSVPQLLPDFEDVWEPGGQLSAQNLYLVIALACISFLFLGCLLFFVCTKLHQSPGCCAQSCCRSTEDLRYGSKMVSNPCMTSATIDVTTVERLSQTYLYRASLGLGSDNNSLLLRGEYNAADLRNLATGVGLNLPISCIQIRNRKGDHANVNAMVSKFYGI

SEQ ID NO: 60321 - protein, 1007 aa, Homo sapiens
MEQAGTRPAATEHPRLRRPMPWLLLLPLLLLLLLLLPGPAASQLRYSVPEEQAPGALVGNVARALGLELRRLGPGCLRINHLGAPSPRYLELDLTSGALFVNERIDREALCEQRPRCLLSLEVLAHNPVAVSAVEVEILDINDNSPRFPRPNYQLQVSESVAPGARFHIESAQDPDVGANSVQTYELSPSEHFELDLKPLQENSKVLELVLRKGLDREQAALHHLVLTAVDGGIPARSGTAQISVRVLDTNDNSPAFDQSTYRVQLREDSPPGTLVVKLNASDPDEGSNGELRYSLSSYTSDRERQLFSIDASTGEVRVIGGLDYEEASSYQIYVQATDRGPVPMAGHCKVLVDIVDVNDNAPEVVLTDLYSPVPENATPNTIVAVLSVNDQDSGPNRKVSLGLEATLPFRLNGFGNSYTLVVSGPLDRERVAVYNITVTATDGGIPQLTSLRTLKVEISDINDNPPSFLEDSYSIYIQENNLPGVLLCTVQATDPDEKENAEVTYSLLEREIQGLPVTSYVSINSASGSLYAVNSFDYEKFREFFVTVEAQDKGSPPLSSTVTANVYVVDMNDHAPHILYPTSTNSSAAFEMVPRTAPAGYLVTKVIAMDSDSGQNAWLFYHLAQTSDLDLFKVELHTGEIRTTRKMGDESGSTFNLTVVVRDNGEPSLSASVAITVAVVDRVSKILPDTQRHVKSPRTYSEITLYLIIALSTVSFIFLLTIIILSIIKCYRYTAYGTACCGGFCGVRERSPAELYKQANNNIDARIPHGLKVQPHFIEVRGNGSLTKTYCYKACLTAGSGSDTFMFYNTGAQTGPGPSGAQAAVTDSRNLTGQSGQNAGNLIILKNEAVSQNEPRQPNPDWRYSASLRAGMHSSVHLEEAGILRAGPGGPDQQWPTVSSATPEPEAGEVSPPVGAGVNSNSWTFKYGPGNPKQSGPGELPDKFIIPGSPAIISIRQEPTNSQIDKSDFITFGKKEETKKKKKKKKGNKTQEKKEKGNSTTDNSDQ

SEQ ID NO: 60322 - protein, 818 aa, Homo sapiens
MAGTRRKSLQNRQVGSLLIFLCISVGDATTIRYSVAEEMESGSFVANVAKDLGLEVGKLAARGARLVSEGNKMHFRLHRKTGDLFVKEKLDRESLCGKADPCVLHFEVVLVEPLQSFRAEVRVFDINDNAPVFLNKEPLLKIPESTPLGSRFPLQSAQDLDVGLNGLQNYTLSANGYFHLHTRFCSHGPKYAELVLNKPLDREEQPEVNLTITAVDGGSPPKSGTAHIHVVVLDVNDHVPQFSRLVYRAQVSENSPNGSLVATVTAVDLDEGTNKAITYSLAQNPEAILKTFQIDPQNGEVRLRGPLDFEAIETYDIDIQATDGGGLSAHSKVLVEVVDVNDNPPEVMVSSVSSPLPEDSPPQTVVALFTIRDRDIRVGGKVTCFLREDLPFVIKPTFGNSYSLVTDRSLDREEVSGYNITIVAMDTGPPSLSAETMIEVLISDVNDNPPIFREDSYILTVRENNSPAVFIGKVHAEDLDLGENAQITYSLLPPKNGDLSVFAYISINSGNGKLYALRTMDYEAIQDFQFVVKATDGGFLSLSSQVTVRVVVLDDNDNRPMILYPLQNGTLPCNDLVPRSAEAGYLVTKVVAVDGDSGQNSWLSYHLLKATDLGLFSVQRQNGEIHTLRQISERDPMMQKLIILVQDHGQPALSTTVSLNILLVDGFSEPYLQFQDPTKHSRKVNPSTKYLVISLVILSFLFLLSVIVIFIIHVYQKIKYREKFTIQEHFYDDCNFSNNLVQGQGNGSLSRPCPYEMCSATGTGNSEFRFLKRFMPNFPFPHATGEIKMEAGSSLPPNSDRNKSQRLEGHDQVSDDYM

SEQ ID NO: 60323 - protein, 797 aa, Homo sapiens
MENQGTRTQQIRQVLLLFVLLGMSQAGSETWSFSVAEEMQSGSFVGNLAKDLGLKVRELSSRGARVVSNDKKQRLQLDINTGDLLLSETLDREELCGSIEPCVLHLQVLMQNPTQFLQIELQVRDINDHSPIFSEKQMLLEIPENSPVGAVFLLESAKDLDVGINAVKSYTISPNSHFHIKMRVIPDNRKYPELVLDKALDYEELPELSFILSALDGGSPPRSGTALVRVVVVDINDNSPEFEQAFYEVKIRENSILGSLILIVSAWDLDSGTNGEICYTFSHASEDIRKTFEINQKSGEITLRAPLDFETIESYSIIIQATDGGGLFGKSTVIIHVIDVNDNAPEITVSSITSPIPENTPETVVMVFSIQDIDSGDNGRIVCSIPEDLPFVLKSSVENYYTLETERPLDRESTAEYNITITVTDLGIPRLKTEHNTTVLVSDVNDNAPTFTQTSYTLFVRENNSPALHIGSVSATDRDSGTNAQVNYSLLPPQDLHLPLASLVSINTDNGHLFALRSLDYEALQAFDFRVGATDRGSPALSSEALVRVLVLDANDNSPFVLYPLQNGSAPCTELVPRAAEPGYLVTKVVAVDGDSGQNAWLSYQLLKATEPGLFGVWAHNGEVRTARLLSERDAAKHRLVVLVKDNGEPPRSATATLQVLLVDGFSQPYLPLPEAAPAQAQADSLTVYLVVALASVSSLFLFSVLLFVAVRLCRRSRAASVGSCSVPKGPFPGHLVDVSGTGTLSQSYQYEVCLTGGSETNEFKFLKPVIPNIQAKGLGKNSEENSTFRNSFGFNF

SEQ ID NO: 60324 - protein, 432 aa, Homo sapiens
MVFSIQDIDSGDNGRIVCSIPEDLPFVLKSSVENYYTLETERPLDRESTAEYNITITVTDLGIPRLKTEHNTTVLVSDVNDNAPTFTQTSYTLFVRENNSPALHIGSVSATDRDSGTNAQVNYSLLPPQDLHLPLASLVSINTDNGHLFALRSLDYEALQAFDFRVGATDRGSPALSSEALVRVLVLDANDNSPFVLYPLQNGSAPCTELVPRAAEPGYLVTKVVAVDGDSGQNAWLSYQLLKATEPGLFGVWAHNGEVRTARLLSERDAAKHRLVVLVKDNGEPPRSATATLQVLLVDGFSQPYLPLPEAAPAQAQADSLTVYLVVALASVSSLFLFSVLLFVAVRLCRRSRAASVGSCSVPKGPFPGHLVDVSGTGTLSQSYQYEVCLTGGSETNEFKFLKPVIPNIQAKGLGKNSEENSTFRNSFGFNF

SEQ ID NO: 60325 - protein, 132 aa, Homo sapiens
TIESYSIIIQATDGGGLFGKSTVIIHVIDVNDNAPEITVSSITSPIPENTPETVVMVFSIQDIDGTTEELFVPFRKTSHVLKSSVENYYTLETERPLDRESTAEYNITITVTDLGIPRLKTEHNTTVLVSDV

SEQ ID NO: 60326 - protein, 795 aa, Homo sapiens
MENGGAGTLQIRQVLLFFVLLGMSQAGSETGNFLVMEELQSGSFVGNLAKTLGLEVSELSSRGARVVSNDNKECLQLDTNTGDLLLREMLDREELCGSNEPCVLYFQVLMKNPTQFLQIELQVRDINDHSPVFLEKEMLLEIPENSPVGAVFLLESAKDLDVGINAVKSYTINPNSHFHVKIRVNPDNRKYPELVLDKALDYEERPELSFILTALDGGSPPRSGTALVRVVVVDINDNSPEFEQAFYEVKILENSILGSLVVTVSAWDLDSGTNSELSYTFSHASEDIRKTFEINQKSGDITLTAPLDFEAIESYSIIIQATDGGGLFGKSTVRIQVMDVNDNAPEITVSSITSPIPENTPETVVMVFRIRDRDSGDNGKMVCSIPEDIPFVLKSSVNNYYTLETERPLDRESRAEYNITITVTDLGTPRLKTEHNITVLVSDVNDNAPAFTQTSYALFVRENNSPALHIGSISATDRDSGTNAQVNYSLLPSQDPHLPLASLVSINADNGHLFALRSLDYEALQGFQFRVGATDHGSPALSSEALVRVLVLDANDNSPFVLYPLQNGSAPCTELVPWAAEPGYLVTKVVAVDGDSGQNAWLSYQLLKATEPGLFGVWAHNGEVRTARLLSERDAAKHRLVVLVKDNGEPPRSATATLHVLLVDGFSQPYLPLPEAAPAQAQADSLTVYLVVALASVSSLFLFSVLLFVAVRLCRRSRAAPVGRCSVPEGPFPGHLVDVSGTGTLSQSYHYEVCVTGGSRSNKFKFLKPIIPNFLPQSTGSEVEENPPFQNNLGF

SEQ ID NO: 60327 - protein, 418 aa, Homo sapiens
MVCSIPEDIPFVLKSSVNNYYTLETERPLDRESRAEYNITITVTDLGTPRLKTEHNITVLVSDVNDNAPAFTQTSYALFVRENNSPALHIGSISATDRDSGTNAQVNYSLLPSQDPHLPLASLVSINADNGHLFALRSLDYEALQGFQFRVGATDHGSPALSSEALVRVLVLDANDNSPFVLYPLQNGSAPCTELVPWAAEPGYLVTKVVAVDGDSGQNAWLSYQLLKATEPGLFGVWAHNGEVRTARLLSERDAAKHRLVVLVKDNGEPPRSATATLHVLLVDGFSQPYLPLPEAAPAQAQADSLTVYLVVALASVSSLFLFSVLLFVAVRLCRRSRAAPVGRCSVPEGPFPGHLVDVSGTGTLSQSYHYEVCVTGGSRSNKFKFLKPIIPNFLPQSTGSEVEENPPFQNNLGFWIQ

SEQ ID NO: 60328 - protein, 458 aa, Homo sapiens
MDVNDNAPEITVSSITSPIPENTPETVVMVFRIRDRDSGDNGKMVCSIPEDIPFVLKSSVNNYYTLETERPLDRESRAEYNITITVTDLGTPRLKTEHNITVLVSDVNDNAPAFTQTSYALFVRENNSPALHIGSISATDRDSGTNAQVNYSLLPSQDPHLPLASLVSINADNGHLFALRSLDYEALQGFQFRVGATDHGSPALSSEALVRVLVLDANDNSPFVLYPLQNGSAPCTELVPWAAEPGYLVTKVVAVDGDSGQNAWLSYQLLKATEPGLFGVWAHNGEVRTARLLSERDAAKHRLVVLVKDNGEPPRSATATLHVLLVDGFSQPYLPLPEAAPAQAQADSLTVYLVVALASVSSLFLFSVLLFVAVRLCRRSRAAPVGRCSVPEGPFPGHLVDVSGTGTLSQSYHYEVCVTGGSRSNKFKFLKPIIPNFLPQSTGSEVEENPPFQNNLGF

SEQ ID NO: 60329 - protein, 798 aa, Homo sapiens
MEASGKLICRQRQVLFSFLLLGLSLAGAAEPRSYSVVEETEGSSFVTNLAKDLGLEQREFSRRGVRVVSRGNKLHLQLNQETADLLLNEKLDREDLCGHTEPCVLRFQVLLESPFEFFQAELQVIDINDHSPVFLDKQMLVKVSESSPPGTTFPLKNAEDLDVGQNNIENYIISPNSYFRVLTRKRSDGRKYPELVLDKALDREEEAELRLTLTALDGGSPPRSGTAQVYIEVLDVNDNAPEFEQPFYRVQISEDSPVGFLVVKVSATDVDTGVNGEISYSLFQASEEIGKTFKINPLTGEIELKKQLDFEKLQSYEVNIEARDAGTFSGKCTVLIQVIDVNDHAPEVTMSAFTSPIPENAPETVVALFSVSDLDSGENGKISCSIQEDLPFLLKSAENFYTLLTERPLDRESRAEYNITITVTDLGTPMLITQLNMTVLIADVNDNAPAFTQTSYTLFVRENNSPALHIRSVSATDRDSGTNAQVTYSLLPPQDPHLPLTSLVSINADNGHLFALRSLDYEALQGFQFRVGASDHGSPALSSEALVRVVVLDANDNSPFVLYPLQNGSAPCTELVPRAAEPGYLVTKVVAVDGDSGQNAWLSYQLLKATELGLFGVWAHNGEVRTARLLSERDAAKHRLVVLVKDNGEPPRSATATLHVLLVDGFSQPYLPLPEAAPTQAQADLLTVYLVVALASVSSLFLFSVLLFVAVRLCRRSRAASVGRCLVPEGPLPGHLVDMSGTRTLSQSYQYEVCLAGGSGTNEFKFLKPIIPNFPPQCPGKEIQGNSTFPNNFGFNIQ

SEQ ID NO: 60330 - protein, 744 aa, Homo sapiens
MEASGKLICRQRQVLFSFLLLGLSLAGAAEPRSYSVVEETEGSSFVTNLAKDLGLEQREFSRRGVRVVSRGNKLHLQLNQETADLLLNEKLDREDLCGHTEPCVLRFQVLLESPFEFFQAELQVIDINDHSPVFLDKQMLVKVSESSPPGTTFPLKNAEDLDVGQNNIENYIISPNSYFRVLTRKRSDGRKYPELVLDKALDREEEAELRLTLTALDGGSPPRSGTAQVYIEVLDVNDNAPEFEQPFYRVQISEDSPVGFLVVKVSATDVDTGVNGEISYSLFQASEEIGKTFKINPLTGEIELKKQLDFEKLQSYEVNIEARDAGTFSGKCTVLIQVIDVNDHAPEVTMSAFTSPIPENAPETVVALFSVSDLDSGENGKISCSIQEDLPFLLKSAENFYTLLTERPLDRESRAEYNITITVTDLGTPMLITQLNMTVLIADVNDNAPAFTQTSYTLFVRENNSPALHIRSVSATDRDSGTNAQVTYSLLPPRVVVLDANDNSPFVLYPLQNGSAPCTELVPRAAEPGYLVTKVVAVDGDSGQNAWLSYQLLKATELGLFGVWAHNGEVRTARLLSERDAAKHRLVVLVKDNGEPPRSATATLHVLLVDGFSQPYLPLPEAAPTQAQADLLTVYLVVALASVSSLFLFSVLLFVAVRLCRRSRAASVGRCLVPEGPLPGHLVDMSGTRTLSQSYQYEVCLAGGSGTNEFKFLKPIIPNFPPQCPGKEIQGNSTFPNNFGFNIQ

SEQ ID NO: 60331 - protein, 802 aa, Homo sapiens
MEASGKLICRQRQVLFSFLLLGLSLAGAAEPRSYSVVEETEGSSFVTNLAKDLGLEQREFSRRGVRVVSRGNKLHLQLNQETADLLLNEKLDREDLCGHTEPCVLRFQVLLESPFEFFQAELQVIDINDHSPVFLDKQMLVKVSESSPPGTTFPLKNAEDLDVGQNNIENYIISPNSYFRVLTRKRSDGRKYPELVLDKALDREEEAELRLTLTALDGGSPPRSGTAQVYIEVLDVNDNAPEFEQPFYRVQISEDSPVGFLVVKVSATDVDTGVNGEISYSLFQASEEIGKTFKINPLTGEIELKKQLDFEKLQSYEVNIEARDAGTFSGKCTVLIQVIDVNDHAPEVTMSAFTSPIPENAPETVVALFSVSDLDSGENGKISCSIQEDLPFLLKSAENFYTLLTERPLDRESRAEYNITITVTDLGTPMLITQLNMTVLIADVNDNAPAFTQTSYTLFVRENNSPALHIRSVSATDRDSGTNAQVTYSLLPPQDPHLPLTSLVSINADNGHLFALRSLDYEALQGFQFRVGASDHGSPALSSEALVRVVVLDANDNSPFVLYPLQNGSAPCTELVPRAAEPGYLVTKVVAVDGDSGQNAWLSYQLLKATELGLFGVWAHNGEVRTARLLSERDAAKHRLVVLVKDNGEPPRSATATLHVLLVDGFSQPYLPLPEAAPTQAQADLLTVYLVVALASVSSLFLFSVLLFVAVRLCRRSRAASVGRCLVPEGPLPGHLVDMSGTRTLSQSYQYEVCLAGGSGTNEFKFLKPIIPNFPPQCPGKEIQGNSTFPNLCVCNIVRIYS

SEQ ID NO: 60332 - protein, 798 aa, Homo sapiens
MEIRGALDLRKRQVLIFLVLLGLSRAGTESAHYSVAEETEIGSFVANLARDLGLGVEELSSREARVVSDDNKKYLHLDLLTGNLLLNEKLDRDELCGSTEPCVLHFQVVLENPLQFFRFELCVKDINDHSPTFLDKEILIKISEGTTVGATFLMESAQDLDVGSNSLQNYTISPNSHFYIKIPDSSDRKIYPELVLDRALDYEQEAELRLTLTAVDGGSPPKSGTTLVLIKVLDINDNAPEFPQSLYEVQVPEDRPLGSWIATISAKDLDAGNYGKISYTFFHASEDIRKTFEINPISGEVNLRSPLDFEVIQSYTINIQATDGGGLSGKCTLLVKVMDINDNPPEVTISSITKRIPENASETLVALFSILDQDSGDNGRMICSIQDNLPFFLKPTFKNFFTLVSEKALDRESQAEYNITITVTDLGTPRLKTEYNITVLLSDVNDNAPTFTQTSYTLFVRENNSPALHIGSVSATDRDSGTNAQVNYSLLPPQDRHLPLASLVSINADNGHLFALRSLDYEALQEFEFRVGATDRGSPALSSEALVRVLVLDANDNSPFVLYPLQNGSAPCTELVPRAAEPGYLVTKVVAVDGDSGQNAWLSYQLLKATEPGLFGVWAHNGEVRTARLLSERDAAKHRLVVLVKDNGEPPRSATATLHVLLVDGFSQPYLPLPEAAPAQAQADSLTVYLVVALASVSSLFLFSVLLFVAVRLCRRSRAASVGRCSVPEGPFPGHLVDVSGTGTLSQSYQYEVCLTGGSGTNEFKFLKPIIPNFQVHDTGRNMGEIENFRNSFGLNIQ

SEQ ID NO: 60333 - protein, 645 aa, Homo sapiens
MESAQDLDVGSNSLQNYTISPNSHFYIKIPDSSDRKIYPELVLDRALDYEQEAELRLTLTAVDGGSPPKSGTTLVLIKVLDINDNAPEFPQSLYEVQVPEDRPLGSWIATISAKDLDAGNYGKISYTFFHASEDIRKTFEINPISGEVNLRSPLDFEVIQSYTINIQATDGGGLSGKCTLLVKVMDINDNPPEVTISSITKRIPENASETLVALFSILDQDSGDNGRMICSIQDNLPFFLKPTFKNFFTLVSEKALDRESQAEYNITITVTDLGTPRLKTEYNITVLLSDVNDNAPTFTQTSYTLFVRENNSPALHIGSVSATDRDSGTNAQVNYSLLPPQDRHLPLASLVSINADNGHLFALRSLDYEALQEFEFRVGATDRGSPALSSEALVRVLVLDANDNSPFVLYPLQNGSAPCTELVPRAAEPGYLVTKVVAVDGDSGQNAWLSYQLLKATEPGLFGVWAHNGEVRTARLLSERDAAKHRLVVLVKDNGEPPRSATATLHVLLVDGFSQPYLPLPEAAPAQAQADSLTVYLVVALASVSSLFLFSVLLFVAVRLCRRSRAASVGRCSVPEGPFPGHLVDVSGTGTLSQSYQYEVCLTGGSGTNEFKFLKPIIPNFQVHDTGRNMGEIENFRNSFGLNIQ

SEQ ID NO: 60334 - protein, 787 aa, Homo sapiens
MEPAGERFPEQRQVLILLLLLEVTLAGWEPRRYSVMEETERGSFVANLANDLGLGVGELAERGARVVSEDNEQGLQLDLQTGQLILNEKLDREKLCGPTEPCIMHFQVLLKKPLEVFRAELLVTDINDHSPEFPEREMTLKIPETSSLGTVFPLKKARDLDVGSNNVQNYNISPNSHFHVSTRTRGDGRKYPELVLDTELDREEQAELRLTLTAVDGGSPPRSGTVQILILVLDANDNAPEFVQALYEVQVPENSPVGSLVVKVSARDLDTGTNGEISYSLYYSSQEIDKPFELSSLSGEIRLIKKLDFETMSSYDLDIEASDGGGLSGKCSVSVKVLDVNDNFPELSISSLTSPIPENSPETEVALFRIRDRDSGENGKMICSIQDDVPFKLKPSVENFYRLVTEGALDRETRAEYNITITITDLGTPRLKTEQSITVLVSDVNDNAPAFTQTSYTLFVRENNSPALHIGSVSATDRDSGTNAQVTYSLLPPRDPHLPLTSLVSINTDNGHLFALQSLDYEALQAFEFRVGATDRGFPALSSEALVRVLVLDANDNSPFVLYPLQNGSAPCTELVPRAAEPGYLVTKVVAVDGDSGQNAWLSYQLLKATEPGLFGVWAHNGEVRTARLLSERDVAKHRLVVLVKDNGEPPRSATATLQVLLVDGFSQPYLPLPEAAPAQAQADSLTVYLVVALASVSSLFLFSVFLFVAVRLCRRSRAASVGRCSVPEGPFPGHLVDVSGTGTLSQSYQYEVCLTGGSESNDFKFLKPIFPNIVSQDSRRKSEFLE

SEQ ID NO: 60335 - protein, 776 aa, Homo sapiens
MEIGWMHNRRQRQVLVFFVLLSLSGAGAELGSYSVVEETERGSFVANLGKDLGLGLTEMSTRKARIISQGNKQHLQLKAQTGDLLINEKLDREELCGPTEPCILHFQVLMENPLEIFQAELRVIDINDHSPMFTEKEMILKIPENSPLGTEFPLNHALDLDVGSNNVQNYKISPSSHFRVLIHEFRDGRKYPELVLDKELDREEEPQLRLTLTALDGGSPPRSGTAQVRIEVVDINDNAPEFEQPIYKVQIPENSPLGSLVATVSARDLDGGANGKISYTLFQPSEDISKTLEVNPMTGEVRLRKQVDFEMVTSYEVRIKATDGGGLSGKCTLLLQVVDVNDNPPQVTMSALTSPIPENSPEIVVAVFSVSDPDSGNNGKTISSIQEDLPFLLKPSVKNFYTLVTERALDREARAEYNITLTVTDMGTPRLKTEHNITVQISDVNDNAPTFTQTSYTLFVRENNSPALHIGSVSATDRDSGTNAQVTYSLLPPQDPHLPLASLVSINADNGHLFALRSLDYEALREFEFRVSATDRGSPALSSEALVRVLVLDANDNSPFVLYPLQNGSAPCTELVPRAAEPGYLVTKVVAVDGDSGQNAWLSYQLLKATEPGLFGVWAHNGEVRTARLLSERDAAKQRLVVLVKDNGEPPRSATATLHVLLVDGFSQPFLPLPEAAPGQTQANSLTVYLVVALASVSSLFLFSVLLFVAVRLCRRSRAASVGRCSMPEGPFPGRLVDVSGTGTLSQSYQYEVCLTGGSETSEFKFLKPIIPNFSP

SEQ ID NO: 60336 - protein, 798 aa, Homo sapiens
MEAGEGKERVPKQRQVLIFFVLLGIAQASCQPRHYSVAEETESGSFVANLLKDLGLEIGELAVRGARVVSKGKKMHLQFDRQTGDLLLNEKLDREELCGPTEPCVLPFQVLLENPLQFFQAELRIRDVNDHSPVFLDKEILLKIPESITPGTTFLIERAQDLDVGTNSLQNYTISPNFHFHLNLQDSLDGIILPQLVLNRALDREEQPEIRLTLTALDGGSPPRSGTALVRIEVVDINDNVPEFAKLLYEVQIPEDSPVGSQVAIVSARDLDIGTNGEISYAFSQASEDIRKTFRLSAKSGELLLRQKLDFESIQTYTVNIQATDGGGLSGTCVVFVQVMDLNDNPPELTMSTLINQIPENLQDTLIAVFSVSDPDSGDNGRMVCSIQDDLPFFLKPSVENFYTLVISTALDRETRSEYNITITVTDFGTPRLKTEHNITVLVSDVNDNAPAFTQTSYTLFVRENNSPALHIGSVSATDRDSGTNAQVTYSLLPPQDPHLPLASLVSINADNGHLFALQSLDYEALQAFEFRVGAADRGSPALSSEALVRVLVLDANDNSPFVLYPLQNGSAPCTELVPRAAEPGYLVTKVVAVDGDSGQNAWLSYQLLKATEPGLFGVWAHNGEVRTARLLRERDAAKQRLVVLVKDNGEPPRSATATLHVLLVDGFSQPYLLLPEAAPAQAQADLLTVYLVVALASVSSLFLFSVLLFVAVRLCRRSRAASVGRCSVPEGPFPGQMVDVSGTGTLSQSYQYEVCLTGGSGTNEFKFLKPIIPNFVAQGAERVSEANPSFRKSFEFT

SEQ ID NO: 60337 - protein, 796 aa, Homo sapiens
MEAGGERFLRQRQVLLLFVFLGGSLAGSESRRYSVAEEKEKGFLIANLAKDLGLRVEELAARGAQVVSKGNKQHFQLSHQTGDLLLNEKLDREELCGPTEPCILHFQILLQNPLQFVTNELRIIDVNDHSPVFFENEMHLKILESTLPGTVIPLGNAEDLDVGRNSLQNYTITPNSHFHVLTRSRRDGRKYPELVLDKALDREEQPELSLTLTALDGGSPPRSGTAQINIQVLDINDNAPEFAQPLYEVAVLENTPVNSVIVTVSASDLDTGSFGTISYAFFHASEEIRKTFQLNPITGDMQLVKYLNFEAINSYEVDIEAKDGGGLSGKSTVIVQVVDVNDNPPELTLSSVNSPIPENSGETVLAVFSVSDLDSGDNGRVMCSIENNLPFFLKPSVENFYTLVSEGALDRETRSEYNITITITDLGTPRLKTKYNITVLVSDVNDNAPAFTQISYTLFVRENNSPALHIGSVSATDRDSGTNAQVTYSLLPPQDPHLPLSSLVSINADNGHLFALRSLDYEALQAFEFRVGATDRGSPALSSEALVRVLVLDANDNSPFVLYPLQNGSAPCTELVPRAAEPGYLVTKVVAVDGDSGQNAWLSYQLLKATEPGLFGVWAHNGEVRTARLLSERDAAKHRLVVLVKDNGEPPRSATATLHVLLVDGFSQPYLPLPEAAPAQAQADLLTVYLVVALASVSSLFLFSVLLFVAVRLCRRSRAASVGRCSVPEGPFPGQMVDVSGTGTLSQSYQYEVCLTGGSGTNEFKFLKPIIPNFVAQGAERVSEANPSFRKSFEFS

SEQ ID NO: 60338 - protein, 795 aa, Homo sapiens
MKKLGRIHPNRQVLAFILMVFLSQVRLEPIRYSVLEETESGSFVAHLAKDLGLGIGELASRSARVLSDDDKQRLQLDRQTGDLLLREKLDREELCGPIEPCVLHFQVFLEMPVQFFQGELLIQDINDHSPIFPEREVLLKILENSQPGTLFPLLIAEDLDVGSNGLQKYTISPNSHFHILTRNHSEGKKYPDLVQDKPLDREEQPEFSLTLVALDGGSPPRSGTVMVRILIMDINDNAPEFVHTPYGVQVLENSPLDSPIVRVLARDIDAGNFGSVSYGLFQASDEIKQTFSINEVTGEILLKKKLDFEKIKSYHVEIEATDGGGLSGKGTVVIEVVDVNDNPPELIISSLTSSIPENAPETVVSIFRIRDRDSGENGKMICSIPDNLPFILKPTLKNFYTLVTERPLDRETSAEYNITIAVTDLGTPRLKTQQNITVQVSDVNDNAPAFTQTSYTLFVRENNSPALHIGSVSATDRDSGTNAQVTYSLLPPQDPHLPLASLVSINADNGHLFALRSLDYEALQAFEFRVGASDRGSPALSSEALVRVLVLDTNDNSPFVLYPLQNGSAPCTELVPRAAEPGYLVTKVVAVDGDSGQNAWLSYQLLKATEPGLFGVWAHNGEVRTARLLSERDAAKHRLVVLVKDNGEPPRSATATLHVLLVDGFSQPYLPLPEAAPAQAQADSLTVYLVVALASVSSLFLFSVLLFVAVRLCRRSRAASVGRCSVPEGPFPGHLVDVSGTGTLSQSYQYEVCLTGDSGTGEFKFLKPIFPNLLVQDTGREVKENPKFRNSLVFS

SEQ ID NO: 60339 - protein, 795 aa, Homo sapiens
METALAKTPQKRQVMFLAILLLLWEAGSEAVRYSIPEETESGYSVANLAKDLGLGVGELATRGARMHYKGNKELLQLDIKTGNLLLYEKLDREVMCGATEPCILHFQLLLENPVQFFQTDLQLTDINDHAPEFPEKEMLLKIPESTQPGTVFPLKIAQDFDIGSNTVQNYTISPNSHFHVATHNRGDGRKYPELVLDKALDREERPELSLTLTALDGGAPPRSGTTTIRIVVLDNNDNAPEFLQSFYEVQVPENSPLNSLVVVVSARDLDAGAYGSVAYALFQGDEVTQPFVIDEKTAEIRLKRALDFEATPYYNVEIVATDGGGLSGKCTVAIEVVDVNDNAPELTMSTLSSPTPENAPETVVAVFSVSDPDSGDNGRMICSIQNDLPFLLKPTLKNFYTLVTQRTLDRESQAEYNITITVTDMGTPRLKTEHNITVLVSDVNDNAPAFTQTSYTLFVRENNSPALHIGSVSATDRDSGTNAQVTYSLLPPQNPHLRLASLVSINADNGHLFALRSLDYEALQAFEFRVGATDRGSPALSSEALVRVLVLDANDNSPFVLYPLQNGSAPCTELVPRAAEPGYLVTKVVAVDGDSGQNAWLSYQLLKATEPGLFSMWAHNGEVRTARLLSERDAAKHRLVVLVKDNGEPPRSATATLHVLLVDGFSQPYLPLPEAAPAQAQADSLTVYLVVALASVSSLFLFSVLLFVAVRLCRRSRAASVGRCSVPEGPFPGHLVDVSGTGTLSQSYHYEVCLTGDSGAGEFKFLKPIIPNLLPQGAGEEIGKTAAFRNSFGLN

SEQ ID NO: 60340 - protein, 368 aa, Homo sapiens
GGAPPRSGTTTIRIVVLDNNDNAPEFLQSFYEVQVPENSPLNSLVVVVSARDLDAGAYGSVAYALFQGDEVTQPFVIDEKTAEIRLKRALDFEATPYYNVEIVATDGGGLSGKCTVAIEVVDVNDNAPELTMSTLSSPTPENAPETVVAVFSVSDPDSGDNGRMICSIQNDLPFLLKPTLKNFYTLVTQRTLDRESQAEYNITITVTDMGTPRLKTEHNITVLVSDVNDNAPAFTQTSYTLFVRENNSPALHIGSVSATDRDSGTNAQVTYSLLPPQNPHLRLASLVSINADNGHLFALRSLDYEALQAFEFRVGATDRGSPALSSEALVRVLCWTPTTTRPSCCIRCRTARRLAPSWCPGRPSRATW

SEQ ID NO: 60341 - protein, 794 aa, Homo sapiens
MMQTKVQNKKRQVAFFILLMLWGEVGSESIQYSVLEETESGTFVANLTKDLGLRVGELASRGARVVFKGNRQHLQFDPQTHDLLLNEKLDREELCGSTEPCVLPFQVLLENPLQFFQASLRVRDINDHAPEFPAREMLLKISEITMPGKIFPLKMAHDLDTGSNGLQRYTISSNPHFHVLTRNRSEGRKFPELVLDKPLDREEQPQLRLTLIALDGGSPPRSGTSEIQIQVLDINDNVPEFAQELYEAQVPENNPLGSLVITVSARDLDAGSFGKVSYALFQVDDVNQPFEINAITGEIRLRKALDFEEIQSYDVDVEATDGGGLSGKCSLVVRVLDVNDNAPELTMSFFISLIPENLPEITVAVFSVSDADSGHNQQVICSIENNLPFLLRPSVENFYTLVTEGALDRESRAEYNITITVTDLGTPRLKTQQSITVQVSDVNDNVPAFTQTSYTLFVRENNSPALHIGSVSATDRDSGINAQVTYSLLPPQDPHLPLSSLVSINADNGHLFALRSLDYEALQSFEFRVGATDRGSPALSSEALVRLLVLDANDNSPFVLYPLQNGSAPCTELVPRAAEPGYLVTKVVAVDGDSGQNAWLSYQLLKATELGLFGVWAHNGEVRTARLLSERDAAKHRLVVLVKDNGEPPRSATATLHVLLVDGFSQPYLPLPEAAPAQAQADSLTVYLVVALASVSSLFLFSVLLFVAVRLCRRSRAASVGRYSVPEGPFPGHLVDVSGTGTLSQSYQYKVCLTGGSETNEFKFLKPIMPNFPPQGTEREMEETPTSRNSFPFS

SEQ ID NO: 60342 - protein, 368 aa, Homo sapiens
GGSPPRSGTSEIQIQVLDINDNVPEFAQELYEAQVPENNPLGSLVITVSARDLDAGSFGKVSYALFQVDDVNQPFEINAITGEIRLRKALDFEEIQSYDVDVEATDGGGLSGKCSLVVRVLDVNDNAPELTMSFFISLIPENLPEITVAVFSVSDADSGHNQQVICSIENNLPFLLRPSVENFYTLVTEGALDRESRAEYNITITVTDLGTPRLKTQQSITVQVSDVNDNVPAFTQTSYTLFVRENNSPALHIGSVSATDRDSGINAQVTYSLLPPQDPHLPLSSLVSINADNGHLFALRSLDYEALQSFEFRVGATDRGSPALSSEALVRLLCWTPTTTRPSCCTRCRTAPRPAPSWCPGRPSRATW

SEQ ID NO: 60343 - protein, 658 aa, Homo sapiens
MLLKISEITMPGKIFPLKMAHDLDTGSNGLQRYTISSNPHFHVLTRNRSEGRKFPELVLDKPLDREEQPQLRLTLIALDGGSPPRSGTSEIQIQVLDINDNVPEFAQELYEAQVPENNPLGSLVITVSARDLDAGSFGKVSYALFQVDDVNQPFEINAITGEIRLRKALDFEEIQSYDVDVEATDGGGLSGKCSLVVRVLDVNDNAPELTMSFFISLIPENLPEITVAVFSVSDADSGHNQQVICSIENNLPFLLRPSVENFYTLVTEGALDRESRAEYNITITVTDLGTPRLKTQQSITVQVSDVNDNVPAFTQTSYTLFVRENNSPALHIGSVSATDRDSGINAQVTYSLLPPQDPHLPLSSLVSINADNGHLFALRSLDYEALQSFEFRVGATDRGSPALSSEALVRLLVLDANDNSPFVLYPLQNGSAPCTELVPRAAEPGYLVTKVVAVDGDSGQNAWLSYQLLKATELGLFGVWAHNGEVRTARLLSERDAAKHRLVVLVKDNGEPPRSATATLHVLLVDGFSQPYLPLPEAAPAQAQADSLTVYLVVALASVSSLFLFSVLLFVAVRLCRRSRAASVGRYSVPEGPFPGHLVDVSGTGTLSQSYQYKVCLTGGSETNEFKFLKPIMPNFPPQGTEREMEETPTSRNSFPFS

SEQ ID NO: 60344 - protein, 793 aa, Homo sapiens
MEARVERAVQKRQVLFLCVFLGMSWAGAEPLRYFVAEETERGTFLTNLAKDLGLGVGELRARGTRIVSDQNMQILLLSSLTGDLLLNEKLDREELCGPREPCVLPFQLLLEKPFQIFRAELWVRDINDHAPVFLDREISLKILESTTPGAAFLLESAQDSDVGTNSLSNYTISPNAYFHINVHDSGEGNIYPELVLNQVLDREEIPEFSLTLTALDGGSPPRSGTALVRILVLDVNDNAPDFVRSLYKVQVPENSPVGSMVVSVSARDLDTGSNGEIAYAFSYATERILKTFQINPTSGSLHLKAQLDYEAIQTYTLTIQAKDGGGLSGKCTVVVDVTDINDNRPELLLSSLTSPIAENSPETVVAVFRIRDRDSGNNGKTVCSIQDDVPFILKPSVENFYTLVTEKPLDRERNTEYNITITVTDLGTPRLKTEHNITVLVSDVNDNAPAFTQTSYTLFVRENNSPALPIGSVSATDRDSGTNAQVIYSLLPSQDPHLPLASLVSINADNGHLFALRSLDYEALQAFEFRVGATDRGSPALSSEALVRVLVLDANDNSPFVLYPLQNSSAPCTEPLPRAAEPGYLVTKVVAVDGDSGQNAWLSYQLLKATEPGLFGVWAHNGEVRTARLLSERDAAKQRLVVLVKDNGEPPRSATATLHVLLVDGFSQPYLRLPEAAPDQANSLTVYLVVALASVSSLFLLSVLLFVAVRLCRRSRAAPVGRCSVPEGPFPRHLVDLSGTGTLSQSYQYEVCLTGGSGTNEFKFLKPIIPNLLPQSTGREVEENRPFQNNLGF

SEQ ID NO: 60345 - protein, 368 aa, Homo sapiens
GSPPRSGTALVRILVLDVNDNAPDFVRSLYKVQVPENSPVGSMVVSVSARDLDTGSNGEIAYAFSYATERILKTFQINPTSGSLHLKAQLDYEAIQTYTLTIQAKDGGGLSGKCTVVVDVTDINDNRPELLLSSLTSPIAENSPETVVAVFRIRDRDSGNNGKTVCSIQDDVPFILKPSVENFYTLVTEKPLDRERNTEYNITITVTDLGTPRLKTEHNITVLVSDVNDNAPAFTQTSYTLFVRENNSPALPIGSVSATDRDSGTNAQVIYSLLPSQDPHLPLASLVSINADNGHLFALRSLDYEALQAFEFRVGATDRGSPALSSEALVRVLCWTPTTTRPSCCTRCRTAPRPAPSRCPGRPSRATW

SEQ ID NO: 60346 - protein, 801 aa, Homo sapiens
MEASGKLICRQRQVLFSFLLLGLSLAGAAEPRSYSVVEETEGSSFVTNLAKDLGLEQREFSRRGVRVVSRGNKLHLQLNQETADLLLNEKLDREDLCGHTEPCVLRFQVLLESPFEFFQAELQVIDINDHSPVFLDKQMLVKVSESSPPGTAFPLKNAEDLDIGQNNIENYIISPNSYFRVLTRKRSDGRKYPELVLDKALDREEEAELRLTLTALDGGSPPRSGTAQVYIEVVDVNDNAPEFEQPFYRVQISEDSPISFLVVKVSATDVDTGVNGEISYSLFQASDEISKTFKVDFLTGEIRLKKQLDFEKFQSYEVNIEARDAGGFSGKCTVLIQVIDVNDHAPEVTMSAFTSPIPENAPETVVALFSVSDLDSGENGKISCSIQEDLPFLLKSSVGNFYTLLTETPLDRESRAEYNVTITVTDLGTPRLTTHLNMTVLVSDVNDNAPAFTQTSYTLFVRENNSPALHIGSVSATDRDSGTNAQVTYSLLPPQDPHLPLASLVSINTDNGHLFALRSLDYEALQAFEFRVGASDRGSPALSSEALVRVLVLDANDNSPFVLYPLQNGSAPCTELVPRAAEPGYLVTKVVAVDGDSGQNAWLSYQLLKATEPGLFGVWAHNGEVRTARLLSERDAAKQRLVVLVKDNGEPPCSATATLHLLLVDGFSQPYLPLPEAAPAQGQADSLTVYLVVALASVSSLFLFSVLLFVAVLLCRRSRAASVGRCSVPEGPFPGHLVDVRGTGSLSQNYQYEVCLAGGSGTNEFQFLKPVLPNIQGHSFGPEMEQNSNFRNGFGFSLQLK

SEQ ID NO: 60347 - protein, 823 aa, Homo sapiens
MKIQKKLTGCSRLMLLCLSLELLLEAGAGNIHYSVPEETDKGSFVGNIAKDLGLQPQELADGGVRIVSRGRMPLFALNPRSGSLITARRIDREELCAQSMPCLVSFNILVEDKMKLFPVEVEIIDINDNTPQFQLEELEFKMNEITTPGTRVSLPFGQDLDVGMNSLQSYQLSSNPHFSLDVQQGADGPQHPEMVLQSPLDREEEAVHHLILTASDGGEPVRSGTLRIYIQVVDANDNPPAFTQAQYHINVPENVPLGTQLLMVNATDPDEGANGEVTYSFHNVDHRVAQIFRLDSYTGEISNKEPLDFEEYKMYSMEVQAQDGAGLMAKVKVLIKVLDVNDNAPEVTITSVTTAVPENFPPGTIIALISVHDQDSGDNGYTTCFIPGNLPFKLEKLVDNYYRLVTERTLDRELISGYNITITAIDQGTPALSTETHISLLVTDINDNSPVFHQDSYSAYIPENNPRGASIFSVRAHDLDSNENAQITYSLIEDTIQGAPLSAYLSINSDTGVLYALRSFDYEQFRDMQLKVMARDSGDPPLSSNVSLSLFLLDQNDNAPEILYPALPTDGSTGVELAPLSAEPGYLVTKVVAVDRDSGQNAWLSYRLLKASEPGLFSVGLHTGEVRTARALLDRDALKQSLVVAVQDHGQPPLSATVTLTVAVADRISDILADLGSLEPSAKPNDSDLTLYLVVAAAAVSCVFLAFVIVLLAHRLRRWHKSRLLQASGGGLASMPGSHFVGVDGVRAFLQTYSHEVSLTADSRKSHLIFPQPNYADTLISQESCEKKGFLSAPQSLLEDKKEPFSQVNFCDECISYLEKNNS

SEQ ID NO: 60348 - protein, 931 aa, Homo sapiens
MKIQKKLTGCSRLMLLCLSLELLLEAGAGNIHYSVPEETDKGSFVGNIAKDLGLQPQELADGGVRIVSRGRMPLFALNPRSGSLITARRIDREELCAQSMPCLVSFNILVEDKMKLFPVEVEIIDINDNTPQFQLEELEFKMNEITTPGTRVSLPFGQDLDVGMNSLQSYQLSSNPHFSLDVQQGADGPQHPEMVLQSPLDREEEAVHHLILTASDGGEPVRSGTLRIYIQVVDANDNPPAFTQAQYHINVPENVPLGTQLLMVNATDPDEGANGEVTYSFHNVDHRVAQIFRLDSYTGEISNKEPLDFEEYKMYSMEVQAQDGAGLMAKVKVLIKVLDVNDNAPEVTITSVTTAVPENFPPGTIIALISVHDQDSGDNGYTTCFIPGNLPFKLEKLVDNYYRLVTERTLDRELISGYNITITAIDQGTPALSTETHISLLVTDINDNSPVFHQDSYSAYIPENNPRGASIFSVRAHDLDSNENAQITYSLIEDTIQGAPLSAYLSINSDTGVLYALRSFDYEQFRDMQLKVMARDSGDPPLSSNVSLSLFLLDQNDNAPEILYPALPTDGSTGVELAPLSAEPGYLVTKVVAVDRDSGQNAWLSYRLLKASEPGLFSVGLHTGEVRTARALLDRDALKQSLVVAVQDHGQPPLSATVTLTVAVADRISDILADLGSLEPSAKPNDSDLTLYLVVAAAAVSCVFLAFVIVLLAHRLRRWHKSRLLQASGGGLASMPGSHFVGVDGVRAFLQTYSHEVSLTADSRKSHLIFPQPNYADTLISQESCEKKGFLSAPQSLLEDKKEPFSQQAPPNTDWRFSQAQRPGTSGSQNGDDTGTWPNNQFDTEMLQAMILASASEAADGSSTLGGGAGTMGLSARYGPQFTLQHVPDYRQNVYIPGSNATLTNAAGKRDGKAPAGGNGNKKKSGKKEKK

SEQ ID NO: 60349 - protein, 936 aa, Homo sapiens
MAAQRNRSKESKDCSGLVLLCLFFGIPWEAGARQISYSIPEELEKGSFVGNISKDLGLAPRELAERGVRIVSRGRTQLFSLNPRSGSLITAGRIDREELCAQSARCVVSFNILVEDRVKLFGIEIEVTDINDNAPKFQAENLDVKINENVAAGMRFPLPEAIDPDVGVNSLQSYQLSPNKHFSLRVQSRANGVKYPELVLEHSLDREEEAIHHLVLTASDGGDPLRSGTVLVSVTVFDANDNAPVFTLPEYRVSVPENLPVGTQLLTVTATDRDEGANGEVTYSFRKLPDTQLLKFQLNKYTGEIKISENLDYEETGFYEIEIQAEDGGAYLATAKVLITVEDVNDNSPELTITSLFSPVTEDSPLGTVVALLNVHDLDSEQNGQVTCSILAYLPFKLEKSIDSYYRLVIHRALDREQVSSYNITVTATDGGSPPLSTEAHFMLQVADINDNPPTFSQVSYFTYIPENNARGASIFSVTALDPDSKENAQIIYSLAEDTIQGVPLSSYISINSDTGVLYALRSFDYEQFHELQMQVTASDSGDPPLSSNVSLSLFVLDQNDNAPEILYPALPTDGSTGVELAPRSAEPGYLVTKVVAVDRDSGQNAWLSYRLLKASEPGLFAVGEHTGEVRTARALLDRDALKQSLVVAVQDHGQPPLSATVTLTVAVADSIPQVLADLGSFESPANSETSDLTLYLVVAVAAVSCVFLAFVIVLLAHRLRRWHKSRLLQASGGGLTGVSGSHFVGVDGVRAFLQTYSHEVSLTADSRKSHLIFPQPNYADTLISQESCEKNDPLSLLDDSKFPIEDTPLVPQAPPNTDWRFSQAQRPGTSGSQNGDDTGTWPNNQFDTEMLQAMILASASEAADGSSTLGGGAGTMGLSARYGPQFTLQHVPDYRQNVYIPGSNATLTNAAGKRDGKAPAGGNGNKKKSGKKEKK

SEQ ID NO: 60350 - protein, 935 aa, Homo sapiens
MANRLQRGDRSRLLLLLCIFLGTLRGFRARQIRYSVPEETEKGSFVGNISKDLGLEPRELAKRGVRIVSRGKTQLFAVNPRSGSLITAGRIDREELCETVSSCFLNMELLVEDTLKIYGVEVEIIDINDNAPSFQEDEVEIKVSEHAIPGARFALPNARDPDVGVNSLQSYQLSPNNYFSLQLRGRTDGAKNPELVLEGSLDREKEAAHLLLLTALDGGDPIRKGAVPIRVVVLDVNDHIPMFTQSVYRVSVPENISSGTRVLMVNATDPDEGINGEVMYSFRNMESKASEIFQLDSQTGEVQVRGSLDFEKYRFYEMEIQGQDGGGLFTTTTMLITVVDVNDNAPEITITSSINSILENSPPGTVIALLNVQDQDSGENGQVSCFIPNHLPFKLEKTYGNYYKLITSRVLDRELVQSYNITLTATDQGSPPLSAETHVWLNVADDNDNPPVFPHSSYSAYIPENNPRGASIFSVTALDPDSKQNALVTYSLTDDTVQGVPLSSYVSINSNTGVLYALQSFDYEQFRDLELRVIARDSGDPPLSSNVSLSLFVLDQNDNAPEILYPALPTDGSTGVELAPRSAEPGYLVTKVVAVDKDSGQNAWLSYRLLKASEPGLFAVGEHTGEVRTARALLDRDALKQSLVVAVQDHGQPPLSATVTLTVAVADSIPEVLADLGSLESLANSETSDLSLYLVVAVAAVSCIFLVFVIVLLALRLWRWHKSRLLQASEGGLAGMPTSHFVGVDGVQAFLQTYSHEVSLIADSQKSHLIFPQPNYGDTLISQESCEKSEPLLIAEDSAIILGKCDPTSNQQAPPNTDWRFSQAQRPGTSGSQNGDDTGTWPNNQFDTEMLQAMILASASEAADGSSTLGGGAGTMGLSARYGPQFTLQHVPDYRQNVYIPGSNATLTNAAGKRDGKAPAGGNGNKKKSGKKEKK

SEQ ID NO: 60351 - protein, 750 aa, Homo sapiens
MANRLQRGDRSRLLLLLCIFLGTLRGFRARQIRYSVPEETEKGSFVGNISKDLGLEPRELAKRGVRIVSRGKTQLFAVNPRSGSLITAGRIDREELCETVSSCFLNMELLVEDTLKIYGVEVEIIDINDNAPSFQEDEVEIKVSEHAIPGARFALPNARDPDVGVNSLQSYQLSPNNYFSLQLRGRTDGAKNPELVLEGSLDREKEAAHLLLLTALDGGDPIRKGAVPIRVVVLDVNDHIPMFTQSVYRVSVPENISSGTRVLMVNATDPDEGINGEVMYSFRNMESKASEIFQLDSQTGEVQVRGSLDFEKYRFYEMEIQGQDGGGLFTTTTMLITVVDVNDNAPEITITSSINSILENSPPGTVIALLNVQDQDSGENGQVSCFIPNHLPFKLEKTYGNYYKLITSRVLDRELVQSYNITLTATDQGSPPLSAETHVWLNVADDNDNPPVFPHSSYSAYIPENNPRGASIFSVTALDPDSKQNALVTYSLTDDTVQGVPLSSYVSINSNTGVLYALQSFDYEQFRDLELRVIARDSGDPPLSSNVSLSLFVLDQNDNAPEILYPALPTDGSTGVELAPRSAEPGYLVTKVVAVDKDSGQNAWLSYRLLKASEPGLFAVGEHTGEQAPPNTDWRFSQAQRPGTSGSQNGDDTGTWPNNQFDTEMLQAMILASASEAADGSSTLGGGAGTMGLSARYGPQFTLQHVPDYRQNVYIPGSNATLTNAAGKRDGKAPAGGNGNKKKSGKKEKK

SEQ ID NO: 60352 - protein, 932 aa, Homo sapiens
MIPARLHRDYKGLVLLGILLGTLWETGCTQIRYSVPEELEKGSRVGDISRDLGLEPRELAERGVRIIPRGRTQLFALNPRSGSLVTAGRIDREELCMGAIKCQLNLDILMEDKVKIYGVEVEVRDINDNAPYFRESELEIKISENAATEMRFPLPHAWDPDIGKNSLQSYELSPNTHFSLIVQNGADGSKYPELVLKRALDREEKAAHHLVLTASDGGDPVRTGTARIRVMVLDANDNAPAFAQPEYRASVPENLALGTQLLVVNATDPDEGVNAEVRYSFRYVDDKAAQVFKLDCNSGTISTIGELDHEESGFYQMEVQAMDNAGYSARAKVLITVLDVNDNAPEVVLTSLASSVPENSPRGTLIALLNVNDQDSEENGQVICFIQGNLPFKLEKSYGNYYSLVTDIVLDREQVPSYNITVTATDRGTPPLSTETHISLNVADTNDNPPVFPQASYSAYIPENNPRGVSLVSVTAHDPDCEENAQITYSLAENTIQGASLSSYVSINSDTGVLYALSSFDYEQFRDLQVKVMARDNGHPPLSSNVSLSLFVLDQNDNAPEILYPALPTDGSTGVELAPRSAEPGYLVTKVVAVDRDSGQNAWLSYRLLKASEPGLFSVGLHTGEVRTARALLDRDALKQSLVVAVQDHGQPPLSATVTLTVAVADSIPQVLADLGSLESPANSETSDLTLYLVVAVAAVSCVFLAFVILLLALRLRRWHKSRLLQASGGGLTGAPASHFVGVDGVQAFLQTYSHEVSLTTDSRKSHLIFPQPNYADMLVSQESFEKSEPLLLSGDSVFSKDSHGLIEQAPPNTDWRFSQAQRPGTSGSQNGDDTGTWPNNQFDTEMLQAMILASASEAADGSSTLGGGAGTMGLSARYGPQFTLQHVPDYRQNVYIPGSNATLTNAAGKRDGKAPAGGNGNKKKSGKKEKK

SEQ ID NO: 60353 - protein, 932 aa, Homo sapiens
MAALQKLPHCRKLVLLCFLLATLWEARAGQIRYSVREEIDRGSFVGNIAKDLGLEPLALAEQGVRIVSRGRSQLFALNPRSGSLVTANRIDREELCAQSAPCLLNFNILLEDKLTIYSVEVEITDINDNAPRFGVEELELKISETTTPGFRIPLKNAHDADVGENALQKYALNPNDHFSLDVRRGADGNKYPELVLERSLDREEEAVHHLVLVASDGGDPVLSGTSRICVKVLDANDNAPVFTQPEYRISIPENTLVGTRILTVTATDADEGYYAQVVYFLEKSPGETSEVFELKSTSGELTIIKDLDYEDATFHEIDIEAQDGPGLLTRAKVIVTVLDVNDNAPEFYMTSATSSVSEDSLPGTIIGLFNVHDRDSGQNAFTTCSLPEDLPFKLEKSVDNYYRLVTTRALDREQFSFYNITLTAKDGGNPSLSTDAHILLQVADINDNAPAFSRTSYSTYIPENNPRGASVFSVTAHDPDSNDNAHVTYSFAEDTVQGAPLSSYISINSDTGVLYALRSFDYEQLRDLQVWVIARDSGNPPLSSNVSLSLFVLDQNDNAPEILYPAFPTDGSTGVELAPRSAEPGYLVTKVVAVDRDSGQNAWLSYHLLKASEPGLFSVGLHTGEVRTARALLDRDALKQSLVVAIQDHGQPPLSATVTLTVAVADRIPDILADLGSLEPSAIPNDSDLTLYLVVAVAAVSCVFLAFVIVLLAHRLRRWHKSRLLQASGGSLTGMQSSHFVGVDGVRAFLQTYSHEVSLTADSRKSHLIFPQPNYADTLISQESCEKKDFLSAPQSLLEEEREETFSQQAPPNTDWRFSQAQRPGTSGSQNGDDTGTWPNNQFDTEMLQAMILASASEAADGSSTLGGGAGTMGLSARYGPQFTLQHVPDYRQNVYIPGSNATLTNAAGKRDGKAPAGGNGNKKKSGKKEKK

SEQ ID NO: 60354 - protein, 932 aa, Homo sapiens
MTNCLSFRNGRGLALLCALLGTLCETGSGQIRYSVSEELDKGSFVGNIANDLGLEPRELAERGVRIVSRGRTQLFSLNPQSGSLVTAERIDREELCAQIPLCLVKINILVEDKLKIFEVEIEIKDINDNAPNFPTEELEIKIGELTVPGTRFPIKTAFDPDVGINSLQNYKLSPNDYFSLAVNSVSEGAKYPELVLERALDREKKEIHQLVLVASDGGDPVHSGNLHIQVIVLDANDNPPMFTQPEYRVSVWENVPVGTRLLTVNATDPDEGFNAQVSYILDKMPGKIAEIFHLNSVSGEVSILKSLDYEDAMFYEIKIEAQDGPGLLSRAKILVTVLDVNDNAPEITITSLTSSVPEEGTVGREIALIDVHDRDSGQNGQVEVFVLGNLPFKLEKSIDQYYRLVTATSLDREQISEYNISLRASDGGSPPLSTETHITLHVIDINDNPPTFPHLSYSAYIPENNPRGASIFSVTAQDPDSNNNARITYALTEDTLQGAPLSSFVSINSNTGVLYALRSFDYEQFRDLKLLVTASDSGNPPLSSNVSLNLFVLDQNDNAPEILYPALPTDGSTGVELAPRSAEPGYLVTKVVAVDRDSGQNAWLSYRLLKASEPGLFSVGLHTGEVRTARALLDRDALKQSLVVAVQDHGQPPLSATVTLTVAVADRIPDILADLGSLEPSAKPNDSDLTLYLVVAVAAVSCVFLAFVIVLLALRLRRWHKSRLLQASGGGLASTPGSHFVGADGVRAFLQTYSHEVSLTADSRKSHLIFPQPNYADTLISQESCEKSEPLLITQDLLEMKGDSNLLQQAPPNTDWRFSQAQRPGTSGSQNGDDTGTWPNNQFDTEMLQAMILASASEAADGSSTLGGGAGTMGLSARYGPQFTLQHVPDYRQNVYIPGSNATLTNAAGKRDGKAPAGGNGNKKKSGKKEKK

SEQ ID NO: 60355 - protein, 931 aa, Homo sapiens
MASPPRGWGCGELLLPFMLLGTLCEPGSGQIRYSMPEELDKGSFVGNIAKDLGLEPQELAERGVRIVSRGRTQLFALNPRSGSLVTAGRIDREELCAQSPLCVVNFNILVENKMKIYGVEVEIIDINDNFPRFRDEELKVKVNENAAAGTRLVLPFARDADVGVNSLRSYQLSSNLHFSLDVVSGTDGQKYPELVLEQPLDREKETVHDLLLTALDGGDPVLSGTTHIRVTVLDANDNAPLFTPSEYSVSVPENIPVGTRLLMLTATDPDEGINGKLTYSFRNEEEKISETFQLDSNLGEISTLQSLDYEESRFYLMEVVAQDGGALVASAKVVVTVQDVNDNAPEVILTSLTSSISEDCLPGTVIALFSVHDGDSGENGEIACSIPRNLPFKLEKSVDNYYHLLTTRDLDREETSDYNITLTVMDHGTPPLSTESHIPLKVADVNDNPPNFPQASYSTSVTENNPRGVSIFSVTAHDPDSGDNARVTYSLAEDTFQGAPLSSYVSINSDTGVLYALRSFDYEQLRDLQLWVTASDSGNPPLSSNVSLSLFVLDQNDNTPEILYPALPTDGSTGVELAPRSAEPGYLVTKVVAVDKDSGQNAWLSYRLLKASEPGLFAVGLHTGEVRTARALLDRDALKQSLVVAVEDHGQPPLSATFTVTVAVADRIPDILADLGSIKTPIDPEDLDLTLYLVVAVAAVSCVFLAFVIVLLVLRLRRWHKSRLLQAEGSRLAGVPASHFVGVDGVRAFLQTYSHEVSLTADSRKSHLIFPQPNYADTLLSEESCEKSEPLLMSDKVDANKEERRVQQAPPNTDWRFSQAQRPGTSGSQNGDDTGTWPNNQFDTEMLQAMILASASEAADGSSTLGGGAGTMGLSARYGPQFTLQHVPDYRQNVYIPGSNATLTNAAGKRDGKAPAGGNGNKKKSGKKEKK

SEQ ID NO: 60356 - protein, 932 aa, Homo sapiens
MAPPQRHPQRSEQVLLLTLLGTLWGAAAAQIRYSIPEELEKGSFVGNIVKDLGLEPQELAEHGVRIVSRGRMQLFSLNPRNGSLVTAGRIDREELCAQSPRCLVSFNILVEDKLNLYPVEVEIVDINDNTPRFLKEELEVKILENAAPSSRFPLMEVYDPDVGMNSLQGFKLSGNSHFSVDVQSEAHGPKYPELVLEGTLDREGEAVYRLVLTAMDGGDPVRSSVAQILVTVLDVNDNTPMFTQPVYRVSVPENLPVGTPVLAVTATDQDEGVHGEVTYSFVKITEKISQIFCLNVLTGEISTSANLDYEDSSFYELGVEARDGPGLRDRAKVLITILDVNDNVPEVVVTSGSRTIAESAPPGTVIALFQVFDRDSGLNGLVTCSIPRSLPFELEKSVGNYYRLVTNAALDREEVFLYNITVTATDKGTPPLSTETIISLNVADTNDNPPTFPHSSYSVYVLENNPRGASIFSVNALDPDVDQNAQVSYSLAEDTLQGAPLSSYVSINSDTGILYALRSFDYEQLRDLQLWVTASDSGDPPLSSNVSLSLFVLDQNDNAPEILYPALPTDGSTGVELAPRSAEPGYLVTKVVAVDRDSGQNAWLSYRLLKASEPGLFSVGLHTGEVRTARALLDRDALKQSLVVAVQDHGQPPLSATVTLTVAVADRIPDILADLGSLEPSAKPNDSDLTLYLVVAVAAVSCVFLAFVIVLLALRLQRWHKSRLLQASGGGLASMPGSHFVGVEGVRAFLQTYSHEVSLTADSRKSHLIFPQPNYADTLINQESYEKSEPLLITQDLLETKGEPRQLQQAPPNTDWRFSQAQRPGTSGSQNGDDTGTWPNNQFDTEMLQAMILASASEAADGSSTLGGGAGTMGLSARYGPQFTLQHVPDYRQNVYIPGSNATLTNAAGKRDGKAPAGGNGNKKKSGKKEKK

SEQ ID NO: 60357 - protein, 932 aa, Homo sapiens
MAAQPRGGDYRGFFLLSILLGTPWEAWAGRILYSVSEETDKGSFVGDIAKDLGLEPRELAERGVRIISRGRTQLFALNQRSGSLVTAGRIDREEICAQSARCLVNFNILMEDKMNLYPIDVEIIDINDNVPRFLTEEINVKIMENTAPGVRFPLSEAGDPDVGTNSLQSYQLSPNRHFSLAVQSGDDETKYPELVLERVLDREEERVHHLVLTASDGGDPPRSSTAHIQVTVVDVNDHTPVFSLPQYQVTVPENVPVGTRLLTVHAIDLDEGVNGEVTYSFRKITPKLPKMFHLNSLTGEISTLEGLDYEETAFYEMEVQAQDGPGSLTKAKVLITVLDVNDNAPEVTMTSLSSSIPEDTPLGTVIALFYLQDRDSGKNGEVTCTIPENLPFKLEKSIDNYYRLVTTKNLDRETLSLYNITLKATDGGTPPLSRETHIFMQVADTNDNPPTFPHSSYSVYIAENNPRGASIFLVTAQDHDSEDNAQITYSLAEDTIQGAPVSSYVSINSDTGVLYALQSFDYEQLRELQLRVTAHDSGDPPLSSNMSLSLFVLDQNDNPPEILYPALPTDGSTGMELAPRSAEPGYLVTKVVAVDKDSGQNAWLSYLLLKASEPGLFAVGLYTGEVRTARALLDRDALKQSLVVAVQDHGQPPLSATVTLTVAVADSIPEVLADLGSLEPSDGPYNYDLTLYLVVAVATVSCVFLAFVLVLLALRLRRWHKSRLLQASEGGLANVPTSHFVGMDGVQAFLQTYSHEVSLTADSRKSHLIFPQPNYVDMLISQESCEKNDSLLTSVDFQECKENLPSIQQAPPNTDWRFSQAQRPGTSGSQNGDDTGTWPNNQFDTEMLQAMILASASEAADGSSTLGGGAGTMGLSARYGPQFTLQHVPDYRQNVYIPGSNATLTNAAGKRDGKAPAGGNGNKKKSGKKEKK

SEQ ID NO: 60358 - protein, 932 aa, Homo sapiens
MAAPQSRPRRGELILLCALLGTLWEIGRGQIRYSVPEETDKGSFVGNISKDLGLDPRKLAKHGVRIVSRGRTQLFALNPRSGSLITAGRIDREELCAQSPRCLININTLVEDKGKLFGVEIEIIDINDNNPKFQVEDLEVKINEIAVPGARYPLPEAVDPDVGVNSLQSYQLSPNHHFSLDVQTGDNGAINPELVLERALDREEEAAHHLVLTASDGGKPPRSSTVRIHVTVLDTNDNAPVFPHPIYRVKVLENMPPGTRLLTVTASDPDEGINGKVAYKFRKINEKQTPLFQLNENTGEISIAKSLDYEECSFYEMEIQAEDVGALLGRTKLLISVEDVNDNRPEVIITSLFSPVLENSLPGTVIAFLSVHDQDSGKNGQVVCYTRDNLPFKLEKSIGNYYRLVTRKYLDRENVSIYNITVMASDLGTPPLSTETQIALHVADINDNPPTFPHASYSAYILENNLRGASIFSLTAHDPDSQENAQVTYSVTEDTLQGAPLSSYISINSDTGVLYALQSFDYEQIRDLQLLVTASDSGDPPLSSNMSLSLFVLDQNDNAPEILYPALPTDGSTGVELAPRSAERGYLVTKVVAVDRDSGQNAWLSYRLLKASEPGLFSVGLHTGEVRTARALLDRDALKQSLVVAVQDHGQPPLSATVTLTVAVADSIPEVLTELGSLKPSVDPNDSSLTLYLVVAVAAISCVFLAFVAVLLGLRLRRWHKSRLLQDSGGRLVGVPASHFVGVEEVQAFLQTYSQEVSLTADSRKSHLIFPQPNYADMLISQEGCEKNDSLLTSVDFHEYKNEADHGQQAPPNTDWRFSQAQRPGTSGSQNGDDTGTWPNNQFDTEMLQAMILASASEAADGSSTLGGGAGTMGLSARYGPQFTLQHVPDYRQNVYIPGSNATLTNAAGKRDGKAPAGGNGNKKKSGKKEKK

SEQ ID NO: 60359 - protein, 927 aa, Homo sapiens
MQRAREAEMMKSQVLFPFLLSLFCGAISQQIRYTIPEELANGSRVGKLAKDLGLSVRELPTRKLRVSAEDYFNVSLESGDLLVNGRIDREKICGRKLECALEFETVAENPMNVFHVVVVIQDINDNAPRFVAKGIDLEICESALPGVKFSLDSAQDADVEGNSLKLYTINPNQYFSLSTKESPDGSKYPVLLLEKPLDREHQSSHRLILTAMDGGDPPLSGTTHIWIRVTDANDNAPVFSQEVYRVSLQENVPWGTSVLRVMATDQDEGINAEITYAFLNSPISTSLFNLNPNTGDITTNGTLDFEETSRYVLSVEAKDGGVHTAHCNVQIEIVDENDNAPEVTFMSFSNQIPEDSDLGTVIALIKVRDKDSGQNGMVTCYTQEEVPFKLESTSKNYYKLVIAGALNREQTADYNVTIIATDKGKPALSSRTSITLHISDINDNAPVFHQASYVVHVSENNPPGASIAQVSASDPDLGPNGRVSYSILASDLEPRELLSYVSVSPQSGVVFAQRAFDHEQLRAFELTLQARDQGSPALSANVSLRVLVGDLNDNAPRVLYPALGPDGSALFDMVPRAAEPGYLVTKVVAVDADSGHNAWLSYHVLQASEPGLFSLGLRTGEVRTARALGDRDAARQRLLVAVRDGGQPPLSATATLHLIFADSLQEVLPDLSDRPEPSDPQTELQFYLVVALALISVLFLLAVILAIALRLRRSSSLDTEGCFQTGLCSKSGPGVPPNHSEGTLPYSYNLCIASHSAKTEFNSLNLTPEMAPPQDLLCDDPSMVVCASNEDHKIAYDPSLSSHQAPPNTDWRFSQAQRPGTSGSQNGDDTGTWPNNQFDTEMLQAMILASASEAADGSSTLGGGAGTMGLSARYGPQFTLQHVPDYRQNVYIPGSNATLTNAAGKRDGKAPAGGNGNKKKSGKKEKK

SEQ ID NO: 60360 - protein, 931 aa, Homo sapiens
MKASSGRCGLVRWLQVLLPFLLSLFPGALPVQIRYSIPEELAKNSVVGNLAKDLGLSVRDLPARKLRVSAEKEYFTVNPESGDLLVSDRIDREQICGKQPLCVLDFDTVAENPLNIFYIAVIVQDINDNTPLFKQTKINLKIGESTKPGTTFPLDPALDSDVGPNSLQRYHLNDNEYFDLAEKQTPDGRKYPELILKHSLDREEHSLHQLVLTAVDGGDPPQSGTTQIRIKVTDANDNPPVFSQDVYRVTLREDVPPGFFVLQVTATDRDEGINAEITYSFHNVDEQVKHFFNLNEKTGEITTKDDLDFEIASSYTLSIEAKDPGDLAAHCSIQVEILDDNDCAPEVIVTSVSTPLPEDSPPGTVIALIKTRDRDSGENGEVYCQVLGNAKFILKSSSKNYYKLVTDGALDREEIPEYNLTITATDGGKPPLSSSIIVTLHISDVNDNAPVFQQTSYMVHVAENNPPGASIAQISASDPDLGPSGQVSYSIVASDLKPREILSYVSVSAQSGVVFAQRAFDHEQLRAFELTLQARDQGSPALSANVSLRVLVGDLNDNAPRVLYPALGPDGSALFDMVPRAAEPGYLVTKVVAVDADSGHNAWLSYHVLQASEPGLFSLGLRTGEVRTARALGDRDAARQRLLVAVRDGGQPPLSATATLHLIFADSLQEVLPDLSDRREPSDPQAKLQFYLVVALALISVLFFLAVILAISLRLRLSSRSDAWDCFQPGLSSKPGPGVLPNYSEGTLPYSYNLCVASQSAKTEFNFLNITPELVPAQDLVCDNASWEQNTNHGAAGVPFASDTILKQAPPNTDWRFSQAQRPGTSGSQNGDDTGTWPNNQFDTEMLQAMILASASEAADGSSTLGGGAGTMGLSARYGPQFTLQHVPDYRQNVYIPGSNATLTNAAGKRDGKAPAGGNGNKKKSGKKEKK

SEQ ID NO: 60361 - protein, 923 aa, Homo sapiens
MGSGAGELGRAERLPVLFLFLLSLFCPALCEQIRYRIPEEMPKGSVVGNLATDLGFSVQELPTRKLRVSSEKPYFTVSAESGELLVSSRLDREEICGKKPACALEFEAVAENPLNFYHVNVEIEDINDHTPKFTQNSFELQISESAQPGTRFILGSAHDADIGSNTLQNYQLSPSDHFSLINKEKSDGSKYPEMVLKTPLDREKQKSYHLTLTALDFGAPPLSSTAQIHVLVTDANDNAPVFSQDVYRVSLSENVYPGTTVLQVTATDQDEGVNAEITFSFSEASQITQFDLNSNTGEITVLNTLDFEEVKEYSIVLEARDGGGMIAQCTVEVEVIDENDNAPEVIFQSLPNLIMEDAELGTHIALLKVRDKDSRHNGEVTCKLEGDVPFKILTSSRNTYKLVTDAVLDREQNPEYNITVTATDRGKPPLSSSSSITLHIGDVNDNAPVFSQSSYIVHVAENNPPGASISQVRASDPDLGPNGQVSYCIMASDLEQRELSSYVSISAESGVVFAQRAFDHEQLRAFELTLQARDQGSPALSANVSLRVLVDDRNDNAPRVLYPALGPDGSALFDMVPHAAEPGYLVTKVVAVDADSGHNAWLSYHVLQASEPGLFSLGLRTGEVRTARALGDRDAVRQRLLVAVRDGGQPPLSATATLHLVFADSLQEVLPDITDRPDPSDLQAELQFYLVVALALISVLFLVAMILAIALRLRRSSSPASWSCFQPGLCVKSESVVPPNYSEGTLPYSYNLCVAHTGKTEFNFLKCSEQLSSGQDILCGDSSGALFPLCNSSELTSHQQAPPNTDWRFSQAQRPGTSGSQNGDDTGTWPNNQFDTEMLQAMILASASEAADGSSTLGGGAGTMGLSARYGPQFTLQHVPDYRQNVYIPGSNATLTNAAGKRDGKAPAGGNGNKKKSGKKEKK

SEQ ID NO: 60362 - protein, 930 aa, Homo sapiens
MGGSCAQRRRAGPRQVLFPLLLPLFYPTLSEPIRYSIPEELAKGSVVGNLAKDLGLSVLDVSARKLRVSAEKLHFSVDAESGDLLVKNRIDREQICKERRRCELQLEAVVENPLNIFHVIVVIEDVNDHAPQFDKKEIHLEIFESASAGTRLSLDPATDPDININSIKDYKINSNPYFSLMVRVNSDGGKYPELSLEKLLDREEQRSHSLILTALDGGDPPRSATAHIEISVKDTNDNPPVFSRDEYRISLSENLPPGSPVLQVTATDQDEGVNAEINYYFRSTAQSTKHMFSLDEKTGMIKNNQSFDFEDVERYTMEVEAKDGGGLSTQCKVIIEILDENDNSPEIIITSLSDQILENSPPGMVVALFKTRDLDFGGNGEVRCNIETDIPFKIYSSSNNYYKLVTDGALDREQTPEYNVTIVATDRGKPPLSSSRSITLYVADINDNAPVFDQTSYVVHVAENNPPGASIAQVSASDPDLGLNGHISYSIVASDLEPLAVSSYVSVSAQSGVVFAQRAFDHEQLRAFALTLQARDHGSPTLSANVSLRVLVGDRNDNAPRVLYPALGPDGSAFFDMVPRSAEPGYLVTKVVAVDADSGHNAWLSYHVLQASEPGLFSLGLRTGEVRTARALGDRDAARQRLLVAVRDGGQPPLSATATLHLVFADNLQEILPDLSDRPVLSDPQAELQFYLVVALALISVLFLLAVILAIALRLRRSLSPATWDCFHPGLCVKSGPVVPPNYSEGTLPYSYNLCIAHTGTKEFNFLKCSVPLHSNEDMVCSVSPGALIPPHGGEDLTSHPETLTSQAPPNTDWRFSQAQRPGTSGSQNGDDTGTWPNNQFDTEMLQAMILASASEAADGSSTLGGGAGTMGLSARYGPQFTLQHVPDYRQNVYIPGSNATLTNAAGKRDGKAPAGGNGNKKKSGKKEKK

SEQ ID NO: 60363 - protein, 929 aa, Homo sapiens
MGGSCAQRRRAGPRQVLFPLLLPLFYPTLCEPIRYSIPEELAKGSVVGNLAKDLGLSVLDVSARELRVSAEKLHFSVDAQSGDLLVKDRIDREQICKERRRCELQLEAVVENPLNIFHVIVVIEDVNDHAPQFRKDEINLEISESVSLGMGTILESAEDPDISMNSLSKYQLSPNEYFSLVEKDNPDGGKYPELVLQKTLDRETQSAHHLVLTALDGGDPPRSGTAQIRILVIDANDNPPVFSQDVYRVSLREDVPPGTSILRVKATDQDEGINSEITYSFFGVADKAQHVFSLDYTTGNILTQQPLDFEEVERYTINIEAKDRGSLSTRCKVIVEVVDENDNSPEIIITSLSDQIMEDSPPGVVVALFKTRDQDSGENGEVRCSLSRGVPFKIHSSSNNYYKLVTDEALDREQTPEYNVTIAATDRGKPPLSSSKTITLHITDVNDNAPVFGQSAYLVHVPENNQPGASIAQVSASDPDFGLNGRVSYSLIASDLESRTLSSYVSVSAQSGVVFAQRAFDHEQLRTFELTLQARDQGSPALSANVSLRVLVGDRNDNAPRVLYPALGPDGSALFDTVPRAAQPGYLVTKVVAVDADSGHNAWLSYHVVQASEPGLFSLGLRTGEVRMVRALGDKDSVRQRLLVAVRDGGQPPLSATATLHLVFADSLQEVLPDFSDHPTPSDSQAEMQFYLVVALALISVLFLLAVILAIALRLRQSFSPTAGDCFESVLCSKSGPVGPPNYSEGTLPYAYNFCVPGDQMNPEFNFFTSVDHCPATQDNLNKDSMLLASILTPSVEADKKILKQQAPPNTDWRFSQAQRPGTSGSQNGDDTGTWPNNQFDTEMLQAMILASASEAADGSSTLGGGAGTMGLSARYGPQFTLQHVPDYRQNVYIPGSNATLTNAAGKRDGKAPAGGNGNKKKSGKKEKK

SEQ ID NO: 60364 - protein, 934 aa, Homo sapiens
MVPEAWRSGLVSTGRVVGVLLLLGALNKASTVIHYEIPEEREKGFAVGNVVANLGLDLGSLSARRFRVVSGASRRFFEVNRETGEMFVNDRLDREELCGTLPSCTVTLELVVENPLELFSVEVVIQDINDNNPAFPTQEMKLEISEAVAPGTRFPLESAHDPDVGSNSLQTYELSRNEYFALRVQTREDSTKYAELVLERALDREREPSLQLVLTALDGGTPALSASLPIHIKVLDANDNAPVFNQSLYRARVLEDAPSGTRVVQVLATDLDEGPNGEIIYSFGSHNRAGVRQLFALDLVTGMLTIKGRLDFEDTKLHEIYIQAKDKGANPEGAHCKVLVEVVDVNDNAPEITVTSVYSPVPEDAPLGTVIALLSVTDLDAGENGLVTCEVPPGLPFSLTSSLKNYFTLKTSADLDRETVPEYNLSITARDAGTPSLSALTIVRVQVSDINDNPPQSSQSSYDVYIEENNLPGAPILNLSVWDPDAPQNARLSFFLLEQGAETGLVGRYFTINRDNGIVSSLVPLDYEDRREFELTAHISDGGTPVLATNISVNIFVTDRNDNAPQVLYPRPGGSSVEMLPRGTSAGHLVSRVVGWDADAGHNAWLSYSLLGSPNQSLFAIGLHTGQISTARPVQDTDSPRQTLTVLIKDNGEPSLSTTATLTVSVTEDSPEARAEFPSGSAPREQKKNLTFYLLLSLILVSVGFVVTVFGVIIFKVYKWKQSRDLYRAPVSSLYRTPGPSLHADAVRGGLMSPHLYHQVYLTTDSRRSDPLLKKPGAASPLASRQNTLRSCDPVFYRQVLGAESAPPGQQAPPNTDWRFSQAQRPGTSGSQNGDDTGTWPNNQFDTEMLQAMILASASEAADGSSTLGGGAGTMGLSARYGPQFTLQHVPDYRQNVYIPGSNATLTNAAGKRDGKAPAGGNGNKKKSGKKEKK

SEQ ID NO: 60365 - protein, 938 aa, Homo sapiens
MLRKVRSWTEIWRWATLLFLFYHLGYVCGQIRYPVPEESQEGTFVGNVAQDFLLDTDSLSARRLQVAGEVNQRHFRVDLDSGALLIKNPIDREALCGLSASCIVPLEFVTEGPLEMYRAEVEIVDVNDHAPRFPRQQLDLEIGEAAPPGQRFPLEKAQDADVGSNSISSYRLSSNEHFALDVKKRSDGSLVPELLLEKPLDREKQSDYRLVLTAVDGGNPPRSGTAELRVSVLDVNDNAPAFQQSSYRISVLESAPAGMVLIQLNASDPDLGPSGNVTFYFSGHTPDRVRNLFSLHPTTGKLTLLGPLDFESENYYEFDVRARDGGSPAMEQHCSLRVDLLDVNDNAPYITVTSELGTLPESAEPGTVVALISVQDPDSGSNGDVSLRIPDHLPFALKSAFRNQFSLVTAGPLDREAKSSYDIMVTASDAGNPPLSTHRTIFLNISDVNDNPPSFFQRSHEVFVPENNRPGDLLCSLAASDPDSGLNALISYSLLEPRNRDVSASSFISLNPQTGAVHATRSFDYEQTQTLQFEVQARDRGNPPLSSTVTVRLFVLDLNDNAPAVLRPRARPGSLCPQALPPSVGAGHLITKVTAVDLDSGYNAWVSYQLLEAPDPSLFAVSRYAGEVRTAVPIPADLPPQKLVIVVKDSGSPPLSTSVTLLVSLEEDTHPVVPDLRESSAPREGESRLTLYLAVSLVAICFVSFGSFVALLSKCLRGAACGVTCFPAGTCACLTRSRRREGLPPSNGILRIQLGSDDPIKFVDVGGHSHGCTPLASAPTRSDSFMMVKSPSAPMAGEPVRPSCPPSDLLYGLEQAPPNTDWRFSQAQRPGTSGSQNGDDTGTWPNNQFDTEMLQAMILASASEAADGSSTLGGGAGTMGLSARYGPQFTLQHVPDYRQNVYIPGSNATLTNAAGKRDGKAPAGGNGNKKKSGKKEKK

SEQ ID NO: 60366 - protein, 944 aa, Homo sapiens
MGPKTLPQLAGKWQVLCMLSLCCWGWVSGQLRYSVVEESEPGTLVGNVAQDLGLKMTDLLSRRLQLGSEENGRYFSLSLMSGALAVNQKIDRESLCGASTSCLLPVQVVTEHPLELIRVEVEILDLNDNSPSFATPEREMRISESAASGARFPLDSAQDPDVGTNTVSFYTLSPNSHFSLNVKTLKDGKPFPELVLEQQLDREAQARHQLVLTAVDGGTPARSGTTLISVIVLDINDNAPTFQSSVLRVGIPENAPIGTLLLRLNATDPDEGTNGQLDYSFGDHTSEAVRNLFGLDPSSGAIHVLGPIDFEESRFYEIHARARDQGQPAMEGHCVIQVDVGDVNDNAPEVLLASLANPVLESTPVGTVVGLFNVRDRDSGRNGEVSLDISPDLPFQIKPSENHYSLLTSQPLDREATSHYIIELLASDAGSPSLHKHLTIRLNISDVNDNAPRFNQQLYTAYILENRPPGSLLCTVAASDPDTGDNARLTYSIVGNQVQGAPASSFVYVNPEDGRIFAQRTFDYELLQMLQIVVGVRDSGSPPLHANTSLHVFVLDENDNAPAVLHPRPDWEHSAPQRLPRSAPPGSLVTKVTAVDADAGHNAWLSYSLLPQSTAPGLFLVSTHTGEVRTARALLEDDSDTQQVVVLVRDNGDPSLSSTATVLLVLEDEDPEEMPKSSDFLIHPPERSDLTLYLIVALATVSLLSLVTFTFLSAKCLQGNADGDGGGGQCCRRQDSPSPDFYKQSSPNLQVSSDGTLKYMEVTLRPTDSQSHCYRTCFSPASDGSDFTFLRPLSVQQPTALALEPDAIRSRSNTLRERSQQAPPNTDWRFSQAQRPGTSGSQNGDDTGTWPNNQFDTEMLQAMILASASEAADGSSTLGGGAGTMGLSARYGPQFTLQHVPDYRQNVYIPGSNATLTNAAGKRDGKAPAGGNGNKKKSGKKEKK

SEQ ID NO: 60367 - protein, 1955 aa, Homo sapiens
MFRQFYLWTCLASGIILGSLFEICLGQYDDDCKLARGGPPATIVAIDEESRNGTILVDNMLIKGTAGGPDPTIELSLKDNVDYWVLMDPVKQMLFLNSTGRVLDRDPPMNIHSIVVQVQCINKKVGTIIYHEVRIVVRDRNDNSPTFKHESYYATVNELTPVGTTIFTGFSGDNGATDIDDGPNGQIEYVIQYNPDDPTSNDTFEIPLMLTGNIVLRKRLNYEDKTRYFVIIQANDRAQNLNERRTTTTTLTVDVLDGDDLGPMFLPCVLVPNTRDCRPLTYQAAIPELRTPEELNPIIVTPPIQAIDQDRNIQPPSDRPGILYSILVGTPEDYPRFFHMHPRTAELSLLEPVNRDFHQKFDLVIKAEQDNGHPLPAFAGLHIEILDENNQSPYFTMPSYQGYILESAPVGATISDSLNLTSPLRIVALDKDIEDTKDPELHLFLNDYTSVFTVTQTGITRYLTLLQPVDREEQQTYTFSITAFDGVQESEPVIVNIQVMDANDNTPTFPEISYDVYVYTDMRPGDSVIQLTAVDADEGSNGEITYEILVGAQGDFIINKTTGLITIAPGVEMIVGRTYALTVQAADNAPPAERRNSICTVYIEVLPPNNQSPPRFPQLMYSLEISEAMRVGAVLLNLQATDREGDSITYAIENGDPQRVFNLSETTGILTLGKALDRESTDRYILIITASDGRPDGTSTATVNIVVTDVNDNAPVFDPYLPRNLSVVEEEANAFVGQVKATDPDAGINGQVHYSLGNFNNLFRITSNGSIYTAVKLNREVRDYYELVVVATDGAVHPRHSTLTLAIKVLDIDDNSPVFTNSTYTVLVEENLPAGTTILQIEAKDVDLGANVSYRIRSPEVKHFFALHPFTGELSLLRSLDYEAFPDQEASITFLVEAFDIYGTMPPGIATVTVIVKDMNDYPPVFSKRIYKGMVAPDAVKGTPITTVYAEDADPPGLPASRVRYRVDDVQFPYPASIFEVEEDSGRVITRVNLNEEPTTIFKLVVVAFDDGEPVMSSSATVKILVLHPGEIPRFTQEEYRPPPVSELATKGTMVGVISAAAINQSIVYSIVSGNEEDTFGINNITGVIYVNGPLDYETRTSYVLRVQADSLEVVLANLRVPSKSNTAKVYIEIQDENNHPPVFQKKFYIGGVSEDARMFTSVLRVKATDKDTGNYSVMAYRLIIPPIKEGKEGFVVETYTGLIKTAMLFHNMRRSYFKFQVIATDDYGKGLSGKADVLVSVVNQLDMQVIVSNVPPTLVEKKIEDLTEILDRYVQEQIPGAKVVVESIGARRHGDAFSLEDYTKCDLTVYAIDPQTNRAIDRNELFKFLDGKLLDINKDFQPYYGEGGRILEIRTPEAVTSIKKRGESLGYTEGALLALAFIIILCCIPAILVVLVSYRQFKVRQAECTKTARIQAALPAAKPAVPAPAPVAAPPPPPPPPPGAHLYEELGDSSILFLLYHFQQSRGNNSVSEDRKHQQVVMPFSSNTIEAHKSAHVDGSLKSNKLKSARKFTFLSDEDDLSAHNPLYKENISQVSTNSDISQRTDFVDPFSPKIQAKSKSLRGPREKIQRLWSQSVSLPRRLMRKVPNRPEIIDLQQWQGTRQKAENENTGICTNKRGSSNPLLTTEEANLTEKEEIRQGETLMIEGTEQLKSLSSDSSFCFPRPHFSFSTLPTVSRTVELKSEPNVISSPAECSLELSPSRPCVLHSSLSRRETPICMLPIETERNIFENFAHPPNISPSACPLPPPPPISPPSPPPAPAPLAPPPDISPFSLFCPPPSPPSIPLPLPPPTFFPLSVSTSGPPTPPLLPPFPTPLPPPPPSIPCPPPPSASFLSTECVCITGVKCTTNLMPAEKIKSSMTQLSTTTVCKTDPQREPKGILRHVKNLAELEKSVANMYSQIEKNYLRTNVSELQTMCPSEVTNMEITSEQNKGSLNNIVEGTEKQSHSQSTSL

SEQ ID NO: 60368 - protein, 1957 aa, Homo sapiens
MFRQFYLWTCLASGIILGSLFEICLGQYDDDCKLARGGPPATIVAIDEESRNGTILVDNMLIKGTAGGPDPTIELSLKDNVDYWVLMDPVKQMLFLNSTGRVLDRDPPMNIHSIVVQVQCINKKVGTIIYHEVRIVVRDRNDNSPTFKHESYYATVNELTPVGTTIFTGFSGDNGATDIDDGPNGQIEYVIQYNPDDPTSNDTFEIPLMLTGNIVLRKRLNYEDKTRYFVIIQANDRAQNLNERRTTTTTLTVDVLDGDDLGPMFLPCVLVPNTRDCRPLTYQAAIPELRTPEELNPIIVTPPIQAIDQDRNIQPPSDRPGILYSILVGTPEDYPRFFHMHPRTAELSLLEPVNRDFHQKFDLVIKAEQDNGHPLPAFAGLHIEILDENNQSPYFTMPSYQGYILESAPVGATISDSLNLTSPLRIVALDKDIEDTKDPELHLFLNDYTSVFTVTQTGITRYLTLLQPVDREEQQTYTFSITAFDGVQESEPVIVNIQVMDANDNTPTFPEISYDVYVYTDMRPGDSVIQLTAVDADEGSNGEITYEILVGAQGDFIINKTTGLITIAPGVEMIVGRTYALTVQAADNAPPAERRNSICTVYIEVLPPNNQSPPRFPQLMYSLEISEAMRVGAVLLNLQATDREGDSITYAIENGDPQRVFNLSETTGILTLGKALDRESTDRYILIITASDGRPDGTSTATVNIVVTDVNDNAPVFDPYLPRNLSVVEEEANAFVGQVKATDPDAGINGQVHYSLGNFNNLFRITSNGSIYTAVKLNREVRDYYELVVVATDGAVHPRHSTLTLAIKVLDIDDNSPVFTNSTYTVLVEENLPAGTTILQIEAKDVDLGANVSYRIRSPEVKHFFALHPFTGELSLLRSLDYEAFPDQEASITFLVEAFDIYGTMPPGIATVTVIVKDMNDYPPVFSKRIYKGMVAPDAVKGTPITTVYAEDADPPGLPASRVRYRVDDVQFPYPASIFEVEEDSGRVITRVNLNEEPTTIFKLVVVAFDDGEPVMSSSATVKILVLHPGEIPRFTQEEYRPPPVSELATKGTMVGVISAAAINQSIVYSIVSGNEEDTFGINNITGVIYVNGPLDYETRTSYVLRVQADSLEVVLANLRVPSKSNTAKVYIEIQDENNHPPVFQKKFYIGGVSEDARMFTSVLRVKATDKDTGNYSVMAYRLIIPPIKEGKEGFVVETYTGLIKTAMLFHNMRRSYFKFQVIATDDYGKGLSGKADVLVSVVNQLDMQVIVSNVPPTLVEKKIEDLTEILDRYVQEQIPGAKVVVESIGARRHGDAFSLEDYTKCDLTVYAIDPQTNRAIDRNELFKFLDGKLLDINKDFQPYYGEGGRILEIRTPEAVTSIKKRGESLGYTEGALLALAFIIILCCIPAILVVLVSYRQFKVRQAECTKTARIQAALPAAKPAVPAPAPVAAPPPPPPPPPGAHLYEELGDSSMHNLFLLYHFQQSRGNNSVSEDRKHQQVVMPFSSNTIEAHKSAHVDGSLKSNKLKSARKFTFLSDEDDLSAHNPLYKENISQVSTNSDISQRTDFVDPFSPKIQAKSKSLRGPREKIQRLWSQSVSLPRRLMRKVPNRPEIIDLQQWQGTRQKAENENTGICTNKRGSSNPLLTTEEANLTEKEEIRQGETLMIEGTEQLKSLSSDSSFCFPRPHFSFSTLPTVSRTVELKSEPNVISSPAECSLELSPSRPCVLHSSLSRRETPICMLPIETERNIFENFAHPPNISPSACPLPPPPPISPPSPPPAPAPLAPPPDISPFSLFCPPPSPPSIPLPLPPPTFFPLSVSTSGPPTPPLLPPFPTPLPPPPPSIPCPPPPSASFLSTECVCITGVKCTTNLMPAEKIKSSMTQLSTTTVCKTDPQREPKGILRHVKNLAELEKSVANMYSQIEKNYLRTNVSELQTMCPSEVTNMEITSEQNKGSLNNIVEGTEKQSHSQSTSL

SEQ ID NO: 60369 - protein, 961 aa, Homo sapiens
MFRQFYLWTCLASGIILGSLFEICLGQYDDDCKLARGGPPATIVAIDEESRNGTILVDNMLIKGTAGGPDPTIELSLKDNVDYWVLMDPVKQMLFLNSTGRVLDRDPPMNIHSIVVQVQCINKKVGTIIYHEVRIVVRDRNDNSPTFKHESYYATVNELTPVGTTIFTGFSGDNGATDIDDGPNGQIEYVIQYNPDDPTSNDTFEIPLMLTGNIVLRKRLNYEDKTRYFVIIQANDRAQNLNERRTTTTTLTVDVLDGDDLGPMFLPCVLVPNTRDCRPLTYQAAIPELRTPEELNPIIVTPPIQAIDQDRNIQPPSDRPGILYSILVGTPEDYPRFFHMHPRTAELSLLEPVNRDFHQKFDLVIKAEQDNGHPLPAFAGLHIEILDENNQSPYFTMPSYQGYILESAPVGATISDSLNLTSPLRIVALDKDIEDTKDPELHLFLNDYTSVFTVTQTGITRYLTLLQPVDREEQQTYTFSITAFDGVQESEPVIVNIQVMDANDNTPTFPEISYDVYVYTDMRPGDSVIQLTAVDADEGSNGEITYEILVGAQGDFIINKTTGLITIAPGVEMIVGRTYALTVQAADNAPPAERRNSICTVYIEVLPPNNQSPPRFPQLMYSLEISEAMRVGAVLLNLQATDREGDSITYAIENGDPQRVFNLSETTGILTLGKALDRESTDRYILIITASDGRPDGTSTATVNIVVTDVNDNAPVFDPYLPRNLSVVEEEANAFVGQVKATDPDAGINGQVHYSLGNFNNLFRITSNGSIYTAVKLNREVRDYYELVVVATDGAVHPRHSTLTLAIKVLDIDDNSPVFTNSTYTVLVEENLPAGTTILQIEAKDVDLGANVSYRIRSPEVKHFFALHPFTGELSLLRSLDYEAFPDQEASITFLVEAFDIYGTMPPGIATVTVIVKDMNDYPPVFSKRIYKGMVAPDAVKGTPITTVYAEDADPPVSRRH

SEQ ID NO: 60370 - protein, 809 aa, Homo sapiens
MFRQFYLWTCLASGIILGSLFEICLGQYDDGTILVDNMLIKGTAGGPDPTIELSLKDNVDYWVLMDPVKQMLFLNSTGRVLDRDPPMNIHSIVVQVQCINKKVGTIIYHEVRIVVRDRNDNSPTFKHESYYATVNELTPVGTTIFTGFSGDNGATDIDDGPNGQIEYVIQYNPDDPTSNDTFEIPLMLTGNIVLRKRLNYEDKTRYFVIIQANDRAQNLNERRTTTTTLTVDVLDGDDLGPMFLPCVLVPNTRDCRPLTYQAAIPELRTPEELNPIIVTPPIQAIDQDRNIQPPSDRPGILYSILVGTPEDYPRFFHMHPRTAELSLLEPVNRDFHQKFDLVIKAEQDNGHPLPAFAGLHIEILDENNQSPYFTMPSYQGYILESAPVGATISDSLNLTSPLRIVALDKDIEDTKDPELHLFLNDYTSVFTVTQTGITRYLTLLQPVDREEQQTYTFSITAFDGVQESEPVIVNIQVMDANDNTPTFPEISYDVYVYTDMRPGDSVIQLTAVDADEGSNGEITYEILVGAQGDFIINKTTGLITIAPGVEMIVGRTYALTVQAADNAPPAERRNSICTVYIEVLPPNNQSPPRFPQLMYSLEISEAMRVGAVLLNLQATDREGDSITYAIENGDPQRVFNLSETTGILTLGKALDRESTDRYILIITASDGRPDGTSTATVNIVVTDVNDNAPVFDPYLPRNLSVVEEEANAFVGQVKLSTTTVCKTDPQREPKGILRHVKNLAELEKSVANMYSQIEKNYLRTNVSELQTMCPSEVTNMEITSEQNKGSLNNIVEGTEKQSHSQSTSL

SEQ ID NO: 60371 - protein, 1684 aa, Homo sapiens
MFRQFYLWTCLASGIILGSLFEICLGQYDDDCKLARGGPPATIVAIDEESRNGTILVDNMLIKGTAGGPDPTIELSLKDNVDYWVLMDPVKQMLFLNSTGRVLDRDPPMNIHSIVVQVQCINKKVGTIIYHEVRIVVRDRNDNSPTFKHESYYATVNELTPVGTTIFTGFSGDNGATDIDDGPNGQIEYVIQYNPDDPTSNDTFEIPLMLTGNIVLRKRLNYEDKTRYFVIIQANDRAQNLNERRTTTTTLTVDVLDGDDLGPMFLPCVLVPNTRDCRPLTYQAAIPELRTPEELNPIIVTPPIQAIDQDRNIQPPSDRPGILYSILVGTPEDYPRFFHMHPRTAELSLLEPVNRDFHQKFDLVIKAEQDNGHPLPAFAGLHIEILDENNQSPYFTMPSYQGYILESAPVGATISDSLNLTSPLRIVALDKDIEDVPPSGVPTKDPELHLFLNDYTSVFTVTQTGITRYLTLLQPVDREEQQTYTFSITAFDGVQESEPVIVNIQVMDANDNTPTFPEISYDVYVYTDMRPGDSVIQLTAVDADEGSNGEITYEILVGAQGDFIINKTTGLITIAPGVEMIVGRTYALTVQAADNAPPAERRNSICTVYIEVLPPNNQSPPRFPQLMYSLEISEAMRVGAVLLNLQATDREGDSITYAIENGDPQRVFNLSETTGILTLGKALDRESTDRYILIITASDGRPDGTSTATVNIVVTDVNDNAPVFDPYLPRNLSVVEEEANAFVGQVKATDPDAGINGQVHYSLGNFNNLFRITSNGSIYTAVKLNREVRDYYELVVVATDGAVHPRHSTLTLAIKVLDIDDNSPVFTNSTYTVLVEENLPAGTTILQIEAKDVDLGANVSYRIRSPEVKHFFALHPFTGELSLLRSLDYEAFPDQEASITFLVEAFDIYGTMPPGIATVTVIVKDMNDYPPVFSKRIYKGMVAPDAVKGTPITTVYAEDADPPGLPASRVRYRVDDVQFPYPASIFEVEEDSGRVITRVNLNEEPTTIFKLVVVAFDDGEPVMSSSATVKILVLHPGEIPRFTQEEYRPPPVSELATKGTMVGVISAAAINQSIVYSIVSGNEEDTFGINNITGVIYVNGPLDYETRTSYVLRVQADSLEVVLANLRVPSKSNTAKVYIEIQDENNHPPVFQKKFYIGGVSEDARMFTSVLRVKATDKDTGNYSVMAYRLIIPPIKEGKEGFVVETYTGLIKTAMLFHNMRRSYFKFQVIATDDYGKGLSGKADVLVSVVNQLDMQVIVSNVPPTLVEKKIEDLTEILDRYVQEQIPGAKVVVESIGARRHGDAFSLEDYTKCDLTVYAIDPQTNRAIDRNELFKFLDGKLLDINKDFQPYYGEGGRILEIRTPEAVTSIKKRGESLGYTEGALLALAFIIILCCIPAILVVLVSYRQFKVRQAECTKTARIQAALPAAKPAVPAPAPVAAPPPPPPPPPGAHLYEELGDSSMHKYEMPQYGSRRRLLPPAGQEEYGEVVGEAEEEYEEEEWARKRMIKLVVDREYETSSTGEDSAPECQRNRLHHPSIHSNINGNIYIAQNGSVVRTRRACLTDNLKVASPVRLGGPFKKLDKLAVTHEENVPLNTLSKGPFSTEKMNARPTLVTFAPCPVGTDNTAVKPLRNRLKSTVEQESMIDSKNIKEALEFHSDHTQSDDEELWMGPWNNLHIPMTKL

SEQ ID NO: 60372 - protein, 1952 aa, Homo sapiens
MFRQFYLWTCLASGIILGSLFEICLGQYDDDCKLARGGPPATIVAIDEESRNGTILVDNMLIKGTAGGPDPTIELSLKDNVDYWVLMDPVKQMLFLNSTGRVLDRDPPMNIHSIVVQVQCINKKVGTIIYHEVRIVVRDRNDNSPTFKHESYYATVNELTPVGTTIFTGFSGDNGATDIDDGPNGQIEYVIQYNPDDPTSNDTFEIPLMLTGNIVLRKRLNYEDKTRYFVIIQANDRAQNLNERRTTTTTLTVDVLDGDDLGPMFLPCVLVPNTRDCRPLTYQAAIPELRTPEELNPIIVTPPIQAIDQDRNIQPPSDRPGILYSILVGTPEDYPRFFHMHPRTAELSLLEPVNRDFHQKFDLVIKAEQDNGHPLPAFAGLHIEILDENNQSPYFTMPSYQGYILESAPVGATISDSLNLTSPLRIVALDKDIEDTKDPELHLFLNDYTSVFTVTQTGITRYLTLLQPVDREEQQTYTFSITAFDGVQESEPVIVNIQVMDANDNTPTFPEISYDVYVYTDMRPGDSVIQLTAVDADEGSNGEITYEILVGAQGDFIINKTTGLITIAPGVEMIVGRTYALTVQAADNAPPAERRNSICTVYIEVLPPNNQSPPRFPQLMYSLEISEAMRVGAVLLNLQATDREGDSITYAIENGDPQRVFNLSETTGILTLGKALDRESTDRYILIITASDGRPDGTSTATVNIVVTDVNDNAPVFDPYLPRNLSVVEEEANAFVGQVKATDPDAGINGQVHYSLGNFNNLFRITSNGSIYTAVKLNREVRDYYELVVVATDGAVHPRHSTLTLAIKVLDIDDNSPVFTNSTYTVLVEENLPAGTTILQIEAKDVDLGANVSYRIRSPEVKHFFALHPFTGELSLLRSLDYEAFPDQEASITFLVEAFDIYGTMPPGIATVTVIVKDMNDYPPVFSKRIYKGMVAPDAVKGTPITTVYAEDADPPGLPASRVRYRVDDVQFPYPASIFEVEEDSGRVITRVNLNEEPTTIFKLVVVAFDDGEPVMSSSATVKILVLHPGEIPRFTQEEYRPPPVSELATKGTMVGVISAAAINQSIVYSIVSGNEEDTFGINNITGVIYVNGPLDYETRTSYVLRVQADSLEVVLANLRVPSKSNTAKVYIEIQDENNHPPVFQKKFYIGGVSEDARMFTSVLRVKATDKDTGNYSVMAYRLIIPPIKEGKEGFVVETYTGLIKTAMLFHNMRRSYFKFQVIATDDYGKGLSGKADVLVSVVNQLDMQVIVSNVPPTLVEKKIEDLTEILDRYVQEQIPGAKVVVESIGARRHGDAFSLEDYTKCDLTVYAIDPQTNRAIDRNELFKFLDGKLLDINKDFQPYYGEGGRILEIRTPEAVTSIKKRGESLGYTEGALLALAFIIILCCIPAILVVLVSYRQRQAECTKTARIQAALPAAKPAVPAPAPVAAPPPPPPPPPGAHLYEELGDSSILFLLYHFQQSRGNNSVSEDRKHQQVVMPFSSNTIEAHKSAHVDGSLKSNKLKSARKFTFLSDEDDLSAHNPLYKENISQVSTNSDISQRTDFVDPFSPKIQAKSKSLRGPREKIQRLWSQSVSLPRRLMRKVPNRPEIIDLQQWQGTRQKAENENTGICTNKRGSSNPLLTTEEANLTEKEEIRQGETLMIEGTEQLKSLSSDSSFCFPRPHFSFSTLPTVSRTVELKSEPNVISSPAECSLELSPSRPCVLHSSLSRRETPICMLPIETERNIFENFAHPPNISPSACPLPPPPPISPPSPPPAPAPLAPPPDISPFSLFCPPPSPPSIPLPLPPPTFFPLSVSTSGPPTPPLLPPFPTPLPPPPPSIPCPPPPSASFLSTECVCITGVKCTTNLMPAEKIKSSMTQLSTTTVCKTDPQREPKGILRHVKNLAELEKSVANMYSQIEKNYLRTNVSELQTMCPSEVTNMEITSEQNKGSLNNIVEGTEKQSHSQSTSL

SEQ ID NO: 60373 - protein, 1915 aa, Homo sapiens
MFRQFYLWTCLASGIILGSLFEICLGQYDDDCKLARGGPPATIVAIDEESRNGTILVDNMLIKGTAGGPDPTIELSLKDNVDYWVLMDPVKQMLFLNSTGRVLDRDPPMNIHSIVVQVQCINKKVGTIIYHEVRIVVRDRNDNSPTFKHESYYATVNELTPVGTTIFTGFSGDNGATDIDDGPNGQIEYVIQYNPDDPDRAQNLNERRTTTTTLTVDVLDGDDLGPMFLPCVLVPNTRDCRPLTYQAAIPELRTPEELNPIIVTPPIQAIDQDRNIQPPSDRPGILYSILVGTPEDYPRFFHMHPRTAELSLLEPVNRDFHQKFDLVIKAEQDNGHPLPAFAGLHIEILDENNQSPYFTMPSYQGYILESAPVGATISDSLNLTSPLRIVALDKDIEDTKDPELHLFLNDYTSVFTVTQTGITRYLTLLQPVDREEQQTYTFSITAFDGVQESEPVIVNIQVMDANDNTPTFPEISYDVYVYTDMRPGDSVIQLTAVDADEGSNGEITYEILVGAQGDFIINKTTGLITIAPGVEMIVGRTYALTVQAADNAPPAERRNSICTVYIEVLPPNNQSPPRFPQLMYSLEISEAMRVGAVLLNLQATDREGDSITYAIENGDPQRVFNLSETTGILTLGKALDRESTDRYILIITASDGRPDGTSTATVNIVVTDVNDNAPVFDPYLPRNLSVVEEEANAFVGQVKATDPDAGINGQVHYSLGNFNNLFRITSNGSIYTAVKLNREVRDYYELVVVATDGAVHPRHSTLTLAIKVLDIDDNSPVFTNSTYTVLVEENLPAGTTILQIEAKDVDLGANVSYRIRSPEVKHFFALHPFTGELSLLRSLDYEAFPDQEASITFLVEAFDIYGTMPPGIATVTVIVKDMNDYPPVFSKRIYKGMVAPDAVKGTPITTVYAEDADPPGLPASRVRYRVDDVQFPYPASIFEVEEDSGRVITRVNLNEEPTTIFKLVVVAFDDGEPVMSSSATVKILVLHPGEIPRFTQEEYRPPPVSELATKGTMVGVISAAAINQSIVYSIVSGNEEDTFGINNITGVIYVNGPLDYETRTSYVLRVQADSLEVVLANLRVPSKSNTAKVYIEIQDENNHPPVFQKKFYIGGVSEDARMFTSVLRVKATDKDTGNYSVMAYRLIIPPIKEGKEGFVVETYTGLIKTAMLFHNMRRSYFKFQVIATDDYGKGLSGKADVLVSVVNQLDMQVIVSNVPPTLVEKKIEDLTEILDRYVQEQIPGAKVVVESIGARRHGDAFSLEDYTKCDLTVYAIDPQTNRAIDRNELFKFLDGKLLDINKDFQPYYGEGGRILEIRTPEAVTSIKKRGESLGYTEGALLALAFIIILCCIPAILVVLVSYRQRQAECTKTARIQAALPAAKPAVPAPAPVAAPPPPPPPPPGAHLYEELGDSSILFLLYHFQQSRGNNSVSEDRKHQQVVMPFSSNTIEAHKSAHVDGSLKSNKLKSARKFTFLSDEDDLSAHNPLYKENISQVSTNSDISQRTDFVDPFSPKIQAKSKSLRGPREKIQRLWSQSVSLPRRLMRKVPNRPEIIDLQQWQGTRQKAENENTGICTNKRGSSNPLLTTEEANLTEKEEIRQGETLMIEGTEQLKSLSSDSSFCFPRPHFSFSTLPTVSRTVELKSEPNVISSPAECSLELSPSRPCVLHSSLSRRETPICMLPIETERNIFENFAHPPNISPSACPLPPPPPISPPSPPPAPAPLAPPPDISPFSLFCPPPSPPSIPLPLPPPTFFPLSVSTSGPPTPPLLPPFPTPLPPPPPSIPCPPPPSASFLSTECVCITGVKCTTNLMPAEKIKSSMTQLSTTTVCKTDPQREPKGILRHVKNLAELEKSVANMYSQIEKNYLRTNVSELQTMCPSEVTNMEITSEQNKGSLNNIVEGTEKQSHSQSTSL

SEQ ID NO: 60374 - protein, 1932 aa, Homo sapiens
MFRQFYLWTCLASGIILGSLFEICLGQYDDGTILVDNMLIKGTAGGPDPTIELSLKDNVDYWVLMDPVKQMLFLNSTGRVLDRDPPMNIHSIVVQVQCINKKVGTIIYHEVRIVVRDRNDNSPTFKHESYYATVNELTPVGTTIFTGFSGDNGATDIDDGPNGQIEYVIQYNPDDPTSNDTFEIPLMLTGNIVLRKRLNYEDKTRYFVIIQANDRAQNLNERRTTTTTLTVDVLDGDDLGPMFLPCVLVPNTRDCRPLTYQAAIPELRTPEELNPIIVTPPIQAIDQDRNIQPPSDRPGILYSILVGTPEDYPRFFHMHPRTAELSLLEPVNRDFHQKFDLVIKAEQDNGHPLPAFAGLHIEILDENNQSPYFTMPSYQGYILESAPVGATISDSLNLTSPLRIVALDKDIEDTKDPELHLFLNDYTSVFTVTQTGITRYLTLLQPVDREEQQTYTFSITAFDGVQESEPVIVNIQVMDANDNTPTFPEISYDVYVYTDMRPGDSVIQLTAVDADEGSNGEITYEILVGAQGDFIINKTTGLITIAPGVEMIVGRTYALTVQAADNAPPAERRNSICTVYIEVLPPNNQSPPRFPQLMYSLEISEAMRVGAVLLNLQATDREGDSITYAIENGDPQRVFNLSETTGILTLGKALDRESTDRYILIITASDGRPDGTSTATVNIVVTDVNDNAPVFDPYLPRNLSVVEEEANAFVGQVKATDPDAGINGQVHYSLGNFNNLFRITSNGSIYTAVKLNREVRDYYELVVVATDGAVHPRHSTLTLAIKVLDIDDNSPVFTNSTYTVLVEENLPAGTTILQIEAKDVDLGANVSYRIRSPEVKHFFALHPFTGELSLLRSLDYEAFPDQEASITFLVEAFDIYGTMPPGIATVTVIVKDMNDYPPVFSKRIYKGMVAPDAVKGTPITTVYAEDADPPGLPASRVRYRVDDVQFPYPASIFEVEEDSGRVITRVNLNEEPTTIFKLVVVAFDDGEPVMSSSATVKILVLHPGEIPRFTQEEYRPPPVSELATKGTMVGVISAAAINQSIVYSIVSGNEEDTFGINNITGVIYVNGPLDYETRTSYVLRVQADSLEVVLANLRVPSKSNTAKVYIEIQDENNHPPVFQKKFYIGGVSEDARMFTSVLRVKATDKDTGNYSVMAYRLIIPPIKEGKEGFVVETYTGLIKTAMLFHNMRRSYFKFQVIATDDYGKGLSGKADVLVSVVNQLDMQVIVSNVPPTLVEKKIEDLTEILDRYVQEQIPGAKVVVESIGARRHGDAFSLEDYTKCDLTVYAIDPQTNRAIDRNELFKFLDGKLLDINKDFQPYYGEGGRILEIRTPEAVTSIKKRGESLGYTEGALLALAFIIILCCIPAILVVLVSYRQRQAECTKTARIQAALPAAKPAVPAPAPVAAPPPPPPPPPGAHLYEELGDSSMHNLFLLYHFQQSRGNNSVSEDRKHQQVVMPFSSNTIEAHKSAHVDGSLKSNKLKSARKFTFLSDEDDLSAHNPLYKENISQVSTNSDISQRTDFVDPFSPKIQAKSKSLRGPREKIQRLWSQSVSLPRRLMRKVPNRPEIIDLQQWQGTRQKAENENTGICTNKRGSSNPLLTTEEANLTEKEEIRQGETLMIEGTEQLKSLSSDSSFCFPRPHFSFSTLPTVSRTVELKSEPNVISSPAECSLELSPSRPCVLHSSLSRRETPICMLPIETERNIFENFAHPPNISPSACPLPPPPPISPPSPPPAPAPLAPPPDISPFSLFCPPPSPPSIPLPLPPPTFFPLSVSTSGPPTPPLLPPFPTPLPPPPPSIPCPPPPSASFLSTECVCITGVKCTTNLMPAEKIKSSMTQLSTTTVCKTDPQREPKGILRHVKNLAELEKSVANMYSQIEKNYLRTNVSELQTMCPSEVTNMEITSEQNKGSLNNIVEGTEKQSHSQSTSL

SEQ ID NO: 60375 - protein, 1539 aa, Homo sapiens
MFRQFYLWTCLASGIILGSLFEICLGQYDDDCKLARGGPPATIVAIDEESRNGTILVDNMLIKGTAGGPDPTIELSLKDNVDYWVLMDPVKQMLFLNSTGRVLDRDPPMNIHSIVVQVQCINKKVGTIIYHEVRIVVRDRNDNSPTFKHESYYATVNELTPVGTTIFTGFSGDNGATDIDDGPNGQIEYVIQYNPDDPTSNDTFEIPLMLTGNIVLRKRLNYEDKTRYFVIIQANDRAQNLNERRTTTTTLTVDVLDGDDLGPMFLPCVLVPNTRDCRPLTYQAAIPELRTPEELNPIIVTPPIQAIDQDRNIQPPSDRPGILYSILVGTPEDYPRFFHMHPRTAELSLLEPVNRDFHQKFDLVIKAEQDNGHPLPAFAGLHIEILDENNQSPYFTMPSYQGYILESAPVGATISDSLNLTSPLRIVALDKDIEDTKDPELHLFLNDYTSVFTVTQTGITRYLTLLQPVDREEQQTYTFSITAFDGVQESEPVIVNIQVMDANDNTPTFPEISYDVYVYTDMRPGDSVIQLTAVDADEGSNGEITYEILVGAQGDFIINKTTGLITIAPGVEMIVGRTYALTVQAADNAPPAERRNSICTVYIEVLPPNNQSPPRFPQLMYSLEISEAMRVGAVLLNLQATDREGDSITYAIENGDPQRVFNLSETTGILTLGKALDRESTDRYILIITASDGRPDGTSTATVNIVVTDVNDNAPVFDPYLPRNLSVVEEEANAFVGQVKATDPDAGINGQVHYSLGNFNNLFRITSNGSIYTAVKLNREVRDYYELVVVATDGAVHPRHSTLTLAIKVLDIDDNSPVFTNSTYTVLVEENLPAGTTILQIEAKDVDLGANVSYRIRSPEVKHFFALHPFTGELSLLRSLDYEAFPDQEASITFLVEAFDIYGTMPPGIATVTVIVKDMNDYPPVFSKRIYKGMVAPDAVKGTPITTVYAEDADPPGLPASRVRYRVDDVQFPYPASIFEVEEDSGRVITRVNLNEEPTTIFKLVVVAFDDGEPVMSSSATVKILVLHPGEIPRFTQEEYRPPPVSELATKGTMVGVISAAAINQSIVYSIVSGNEEDTFGINNITGVIYVNGPLDYETRTSYVLRVQADSLEVVLANLRVPSKSNTAKVYIEIQDENNHPPVFQKKFYIGGVSEDARMFTSVLRVKATDKDTGNYSVMAYRLIIPPIKEGKEGFVVETYTGLIKTAMLFHNMRRSYFKFQVIATDDYGKGLSGKADVLVSVVNQLDMQVIVSNVPPTLVEKKIEDLTEILDRYVQEQIPGAKVVVESIGARRHGDAFSLEDYTKCDLTVYAIDPQTNRAIDRNELFKFLDGKLLDINKDFQPYYGEGGRILEIRTPEAVTSIKKRGESLGYTEGALLALAFIIILCCIPAILVVLVSYRQFKVRQAECTKTARIQAALPAAKPAVPAPAPVAAPPPPPPPPPGAHLYEELGDSSMHKNYPWSLELILARNMDKIITVMSMGMKCLNMGVAVDCYHQLDRRNMVRWLVKLRKNMRRKRKSQRKLKNQRLKLESLVRRKK

SEQ ID NO: 60376 - protein, 719 aa, Homo sapiens
MFRQFYLWTCLASGIILGSLFEICLGQYDDDCKLARGGPPATIVAIDEESRNGTILVDNMLIKGTAGGPDPTIELSLKDNVDYWVLMDPVKQMLFLNSTGRVLDRDPPMNIHSIVVQVQCINKKVGTIIYHEVRIVVRDRNDNSPTFKHESYYATVNELTPVGTTIFTGFSGDNGATDIDDGPNGQIEYVIQYNPDDPTSNDTFEIPLMLTGNIVLRKRLNYEDKTRYFVIIQANDRAQNLNERRTTTTTLTVDVLDGDDLGPMFLPCVLVPNTRDCRPLTYQAAIPELRTPEELNPIIVTPPIQAIDQDRNIQPPSDRPGILYSILVGTPEDYPRFFHMHPRTAELSLLEPVNRDFHQKFDLVIKAEQDNGHPLPAFAGLHIEILDENNQSPYFTMPSYQGYILESAPVGATISDSLNLTSPLRIVALDKDIEDEEPKKIKKPKVEIREPSEEEEVVVTIEKPPAAEPTYTTWKRARIFPMIFKKVRGLADKRGIVDLEGEEWQRRLEEEDKDYLKLTLDQEEATESTVESEEESSSDYTEYSEEESEFSESETTEEESESETPSEEEESSTPESEESESTESEGEKARKNIVLARRRPMVEEVKEVKGRKEEPQEEQKEPKMEEEEHSEEEESGPAPVEESTDPEAQDIPEEGSAESASVEGGVESEEESESGSSSSSSESQSGGPWGYQVPAYDRSKNANQKKSPGANSEGYNTAL

SEQ ID NO: 60377 - protein, 650 aa, Homo sapiens
MFRQFYLWTCLASGIILGSLFEICLGQYDDDCKLARGGPPATIVAIDEESRNGTILVDNMLIKGTAGGPDPTIELSLKDNVDYWVLMDPVKQMLFLNSTGRVLDRDPPMNIHSIVVQVQCINKKVGTIIYHEVRIVVRDRNDNSPTFKHESYYATVNELTPVGTTIFTGFSGDNGATDIDDGPNGQIEYVIQYNPDDPTSNDTFEIPLMLTGNIVLRKRLNYEDKTRYFVIIQANDRAQNLNERRTTTTTLTVDVLDGDDLGPMFLPCVLVPNTRDCRPLTYQAAIPELRTPEELNPIIVTPPIQAIDQDRNIQPPSDRPGILYSILVGTPEDYPRFFHMHPRTAELSLLEPVNRDFHQKFDLVIKEEPKKIKKPKVEIREPSEEEEVVVTIEKPPAAEPTYTTWKRARIFPMIFKKVRGLADKRGIVDLEGEEWQRRLEEEDKDYLKLTLDQEEATESTVESEEESSSDYTEYSEEESEFSESETTEEESESETPSEEEESSTPESEESESTESEGEKARKNIVLARRRPMVEEVKEVKGRKEEPQEEQKEPKMEEEEHSEEEESGPAPVEESTDPEAQDIPEEGSAESASVEGGVESEEESESGSSSSSSESQSGGPWGYQVPAYDRSKNANQKKSPGANSEGYNTAL

SEQ ID NO: 60378 - protein, 1785 aa, Homo sapiens
MFRQFYLWTCLASGIILGSLFEICLGQYDDDCKLARGGPPATIVAIDEESRNGTILVDNMLIKGTAGGPDPTIELSLKDNVDYWVLMDPVKQMLFLNSTGRVLDRDPPMNIHSIVVQVQCINKKVGTIIYHEVRIVVRDRNDNSPTFKHESYYATVNELTPVGTTIFTGFSGDNGATDIDDGPNGQIEYVIQYNPDDPTSNDTFEIPLMLTGNIVLRKRLNYEDKTRYFVIIQANDRAQNLNERRTTTTTLTVDVLDGDDLGPMFLPCVLVPNTRDCRPLTYQAAIPELRTPEELNPIIVTPPIQAIDQDRNIQPPSDRPGILYSILVGTPEDYPRFFHMHPRTAELSLLEPVNRDFHQKFDLVIKAEQDNGHPLPAFAGLHIEILDENNQSPYFTMPSYQGYILESAPVGATISDSLNLTSPLRIVALDKDIEDVPPSGVPTKDPELHLFLNDYTSVFTVTQTGITRYLTLLQPVDREEQQTYTFSITAFDGVQESEPVIVNIQVMDANDNTPTFPEISYDVYVYTDMRPGDSVIQLTAVDADEGSNGEITYEILVGAQGDFIINKTTGLITIAPGVEMIVGRTYALTVQAADNAPPAERRNSICTVYIEVLPPNNQSPPRFPQLMYSLEISEAMRVGAVLLNLQATDREGDSITYAIENGDPQRVFNLSETTGILTLGKALDRESTDRYILIITASDGRPDGTSTATVNIVVTDVNDNAPVFDPYLPRNLSVVEEEANAFVGQVKATDPDAGINGQVHYSLGNFNNLFRITSNGSIYTAVKLNREVRDYYELVVVATDGAVHPRHSTLTLAIKVLDIDDNSPVFTNSTYTVLVEENLPAGTTILQIEAKDVDLGANVSYRIRSPEVKHFFALHPFTGELSLLRSLDYEAFPDQEASITFLVEAFDIYGTMPPGIATVTVIVKDMNDYPPVFSKRIYKGMVAPDAVKGTPITTVYAEDADPPGLPASRVRYRVDDVQFPYPASIFEVEEDSGRVITRVNLNEEPTTIFKLVVVAFDDGEPVMSSSATVKILVLHPGEIPRFTQEEYRPPPVSELATKGTMVGVISAAAINQSIVYSIVSGNEEDTFGINNITGVIYVNGPLDYETRTSYVLRVQADSLEVVLANLRVPSKSNTAKVYIEIQDENNHPPVFQKKFYIGGVSEDARMFTSVLRVKATDKDTGNYSVMAYRLIIPPIKEGKEGFVVETYTGLIKTAMLFHNMRRSYFKFQVIATDDYGKGLSGKADVLVSVVNQLDMQVIVSNVPPTLVEKKIEDLTEILDRYVQEQIPGAKVVVESIGARRHGDAFSLEDYTKCDLTVYAIDPQTNRAIDRNELFKFLDGKLLDINKDFQPYYGEGGRILEIRTPEAVTSIKKRGESLGYTEGALLALAFIIILCCIPAILVVLVSYRQFKVRQAECTKTARIQAALPAAKPAVPAPAPVAAPPPPPPPPPGAHLYEELGDSSMHKYEMPQYGSRRRLLPPAGQEEYGEVVGEAEEEYEEEEEEPKKIKKPKVEIREPSEEEEVVVTIEKPPAAEPTYTTWKRARIFPMIFKKVRGLADKRGIVDLEGEEWQRRLEEEDKDYLKLTLDQEEATESTVESEEESSSDYTEYSEEESEFSESETTEEESESETPSEEEESSTPESEESESTESEGEKARKNIVLARRRPMVEEVKEVKGRKEEPQEEQKEPKMEEEEHSEEEESGPAPVEESTDPEAQDIPEEGSAESASVEGGVESEEESESGSSSSSSESQSGGPWGYQVPAYDRSKNANQKKSPGANSEGYNTAL

SEQ ID NO: 60379 - protein, 981 aa, Homo sapiens
MFRQFYLWTCLASGIILGSLFEICLGQYDDDCKLARGGPPATIVAIDEESRNGTILVDNMLIKGTAGGPDPTIELSLKDNVDYWVLMDPVKQMLFLNSTGRVLDRDPPMNIHSIVVQVQCINKKVGTIIYHEVRIVVRDRNDNSPTFKHESYYATVNELTPVGTTIFTGFSGDNGATDIDDGPNGQIEYVIQYNPDDPTSNDTFEIPLMLTGNIVLRKRLNYEDKTRYFVIIQANDRAQNLNERRTTTTTLTVDVLDGDDLGPMFLPCVLVPNTRDCRPLTYQAAIPELRTPEELNPIIVTPPIQAIDQDRNIQPPSDRPGILYSILVGTPEDYPRFFHMHPRTAELSLLEPVNRDFHQKFDLVIKAEQDNGHPLPAFAGLHIEILDENNQSPYFTMPSYQGYILESAPVGATISDSLNLTSPLRIVALDKDIEDTKDPELHLFLNDYTSVFTVTQTGITRYLTLLQPVDREEQQTYTFSITAFDGVQESEPVIVNIQVMDANDNTPTFPEISYDVYVYTDMRPGDSVIQLTAVDADEGSNGEITYEILVGAQGDFIINKTTGLITIAPGVEMIVGRTYALTVQAADNAPPAERRNSICTVYIEVLPPNNQSPPRFPQLMYSLEISEAMRVGAVLLNLQATDREGDSITYAIENGDPQRVFNLSETTGILTLGKALDRESTDRYILIITASDGRPDGEEPKKIKKPKVEIREPSEEEEVVVTIEKPPAAEPTYTTWKRARIFPMIFKKVRGLADKRGIVDLEGEEWQRRLEEEDKDYLKLTLDQEEATESTVESEEESSSDYTEYSEEESEFSESETTEEESESETPSEEEESSTPESEESESTESEGEKARKNIVLARRRPMVEEVKEVKGRKEEPQEEQKEPKMEEEEHSEEEESGPAPVEESTDPEAQDIPEEGSAESASVEGGVESEEESESGSSSSSSESQSGGPWGYQVPAYDRSKNANQKKSPGANSEGYNTAL

SEQ ID NO: 60380 - protein, 1150 aa, Homo sapiens
MPSYQGYILESAPVGATISDSLNLTSPLRIVALDKDIEDVPPSGVPTKDPELHLFLNDYTSVFTVTQTGITRYLTLLQPVDREEQQTYTFSITAFDGVQESEPVIVNIQVMDANDNTPTFPEISYDVYVYTDMRPGDSVIQLTAVDADEGSNGEITYEILVGAQGDFIINKTTGLITIAPGVEMIVGRTYALTVQAADNAPPAERRNSICTVYIEVLPPNNQSPPRFPQLMYSLEISEAMRVGAVLLNLQATDREGDSITYAIENGDPQRVFNLSETTGILTLGKALDRESTDRYILIITASDGRPDGTSTATVNIVVTDVNDNAPVFDPYLPRNLSVVEEEANAFVGQVKATDPDAGINGQVHYSLGNFNNLFRITSNGSIYTAVKLNREVRDYYELVVVATDGAVHPRHSTLTLAIKVLDIDDNSPVFTNSTYTVLVEENLPAGTTILQIEAKDVDLGANVSYRIRSPEVKHFFALHPFTGELSLLRSLDYEAFPDQEASITFLVEAFDIYGTMPPGIATVTVIVKDMNDYPPVFSKRIYKGMVAPDAVKGTPITTVYAEDADPPGLPASRVRYRVDDVQFPYPASIFEVEEDSGRVITRVNLNEEPTTIFKLVVVAFDDGEPVMSSSATVKILVLHPGEIPRFTQEEYRPPPVSELATKGTMVGVISAAAINQSIVYSIVSGNEEDTFGINNITGVIYVNGPLDYETRTSYVLRVQADSLEVVLANLRVPSKSNTAKVYIEIQDENNHPPVFQKKFYIGGVSEDARMFTSVLRVKATDKDTGNYSVMAYRLIIPPIKEGKEGFVVETYTGLIKTAMLFHNMRRSYFKFQVIATDDYGKGLSGKADVLVSVVNQLDMQVIVSNVPPTLVEKKIEDLTEILDRYVQEQIPGAKVVVESIGARRHGDAFSLEDYTKCDLTVYAIDPQTNRAIDRNELFKFLDGKLLDINKDFQPYYGEGGRILEIRTPEAVTSIKKRGESLGYTEGALLALAFIIILCCIPAILVVLVSYRQFKVRQAECTKTARIQAALPAAKPAVPAPAPVAAPPPPPPPPPGAHLYEELGDSSMHKNYPWSLELILARNMDKIITVMSMGMKCLNMGVAVDCYHQLDRRNMVRWLVKLRKNMRRKRKSQRKLKNQRLKLESLVRRKK

SEQ ID NO: 60381 - protein, 329 aa, Homo sapiens
MFRQFYLWTCLASGIILGSLFEICLGQYDDDCKLARGGPPATIVAIDEESRNGTILVDNMLIKGTAGGPDPTIELSLKDNVDYWVLMDPVKQMLFLNSTGRVLDRDPPMNIHSIVVQVQCINKKVGTIIYHEVRIVVRDRNDNSPTFKHESYYATVNELTPVGTTIFTGFSGDNGATDIDDGPNGQIEYVIQYNPDDPTSNDTFEIPLMLTGNIVLRKRLNYEDKTRYFVIIQANDRAQNLNERRTTTTTLTVDVLDGDDLGPMFLPCVLVPNTRDCRPLTYQAAIPELRTPDLGSLCSGTNSWCQGRSGVHWSSPAWRCLFPRRLHQM

SEQ ID NO: 60382 - protein, 1681 aa, Homo sapiens
MFRQFYLWTCLASGIILGSLFEICLGQYDDGWRYMYCKLARGGPPATIVAIDEESRNGTILVDNMLIKGTAGGPDPTIELSLKDNVDYWVLMDPVKQMLFLNSTGRVLDRDPPMNIHSIVVQVQCINKKVGTIIYHEVRIVVRDRNDNSPTFKHESYYATVNELTPVGTTIFTGFSGDNGATDIDDGPNGQIEYVIQYNPDDPTSNDTFEIPLMLTGNIVLRKRLNYEDKTRYFVIIQANDRAQNLNERRTTTTTLTVDVLDGDDLGPMFLPCVLVPNTRDCRPLTYQAAIPELRTPEELNPIIVTPPIQAIDQDRNIQPPSDRPGILYSILVGTPEDYPRFFHMHPRTAELSLLEPVNRDFHQKFDLVIKAEQDNGHPLPAFAGLHIEILDENNQSPYFTMPSYQGYILESAPVGATISDSLNLTSPLRIVALDKDIEDTKDPELHLFLNDYTSVFTVTQTGITRYLTLLQPVDREEQQTYTFSITAFDGVQESEPVIVNIQVMDANDNTPTFPEISYDVYVYTDMRPGDSVIQLTAVDADEGSNGEITYEILVGAQGDFIINKTTGLITIAPGVEMIVGRTYALTVQAADNAPPAERRNSICTVYIEVLPPNNQSPPRFPQLMYSLEISEAMRVGAVLLNLQATDREGDSITYAIENGDPQRVFNLSETTGILTLGKALDRESTDRYILIITASDGRPDGTSTATVNIVVTDVNDNAPVFDPYLPRNLSVVEEEANAFVGQVKATDPDAGINGQVHYSLGNFNNLFRITSNGSIYTAVKLNREVRDYYELVVVATDGAVHPRHSTLTLAIKVLDIDDNSPVFTNSTYTVLVEENLPAGTTILQIEAKDVDLGANVSYRIRSPEVKHFFALHPFTGELSLLRSLDYEAFPDQEASITFLVEAFDIYGTMPPGIATVTVIVKDMNDYPPVFSKRIYKGMVAPDAVKGTPITTVYAEDADPPGLPASRVRYRVDDVQFPYPASIFEVEEDSGRVITRVNLNEEPTTIFKLVVVAFDDGEPVMSSSATVKILVLHPGEIPRFTQEEYRPPPVSELATKGTMVGVISAAAINQSIVYSIVSGNEEDTFGINNITGVIYVNGPLDYETRTSYVLRVQADSLEVVLANLRVPSKSNTAKVYIEIQDENNHPPVFQKKFYIGGVSEDARMFTSVLRVKATDKDTGNYSVMAYRLIIPPIKEGKEGFVVETYTGLIKTAMLFHNMRRSYFKFQVIATDDYGKGLSGKADVLVSVVNQLDMQVIVSNVPPTLVEKKIEDLTEILDRYVQEQIPGAKVVVESIGARRHGDAFSLEDYTKCDLTVYAIDPQTNRAIDRNELFKFLDGKLLDINKDFQPYYGEGGRILEIRTPEAVTSIKKRGESLGYTEGALLALAFIIILCCIPAILVVLVSYRQRQAECTKTARIQAALPAAKPAVPAPAPVAAPPPPPPPPPGAHLYEELGDSSILYYRYEMPQYGSRRRLLPPAGQEEYGEVVGEAEEEYEEEEWARKRMIKLVVDREYETSSTGEDSAPECQRNRLHHPSIHSNINGNIYIAQNGSVVRTRRACLTDNLKVASPVRLGGPFKKLDKLAVTHEENVPLNTLSKGPFSTEKMNARPTLVTFAPCPVGTDNTAVKPLRNRLKSTVEQESMIDSKNIKEALEFHSDHTQSDDEELWMGPWNNLHIPMTKL

SEQ ID NO: 60383 - protein, 1962 aa, Homo sapiens
MFRQFYLWTCLASGIILGSLFEICLGQYDDAYSYEDCKLARGGPPATIVAIDEESRNGTILVDNMLIKGTAGGPDPTIELSLKDNVDYWVLMDPVKQMLFLNSTGRVLDRDPPMNIHSIVVQVQCINKKVGTIIYHEVRIVVRDRNDNSPTFKHESYYATVNELTPVGTTIFTGFSGDNGATDIDDGPNGQIEYVIQYNPDDPTSNDTFEIPLMLTGNIVLRKRLNYEDKTRYFVIIQANDRAQNLNERRTTTTTLTVDVLDGDDLGPMFLPCVLVPNTRDCRPLTYQAAIPELRTPEELNPIIVTPPIQAIDQDRNIQPPSDRPGILYSILVGTPEDYPRFFHMHPRTAELSLLEPVNRDFHQKFDLVIKAEQDNGHPLPAFAGLHIEILDENNQSPYFTMPSYQGYILESAPVGATISDSLNLTSPLRIVALDKDIEDTKDPELHLFLNDYTSVFTVTQTGITRYLTLLQPVDREEQQTYTFSITAFDGVQESEPVIVNIQVMDANDNTPTFPEISYDVYVYTDMRPGDSVIQLTAVDADEGSNGEITYEILVGAQGDFIINKTTGLITIAPGVEMIVGRTYALTVQAADNAPPAERRNSICTVYIEVLPPNNQSPPRFPQLMYSLEISEAMRVGAVLLNLQATDREGDSITYAIENGDPQRVFNLSETTGILTLGKALDRESTDRYILIITASDGRPDGTSTATVNIVVTDVNDNAPVFDPYLPRNLSVVEEEANAFVGQVKATDPDAGINGQVHYSLGNFNNLFRITSNGSIYTAVKLNREVRDYYELVVVATDGAVHPRHSTLTLAIKVLDIDDNSPVFTNSTYTVLVEENLPAGTTILQIEAKDVDLGANVSYRIRSPEVKHFFALHPFTGELSLLRSLDYEAFPDQEASITFLVEAFDIYGTMPPGIATVTVIVKDMNDYPPVFSKRIYKGMVAPDAVKGTPITTVYAEDADPPGLPASRVRYRVDDVQFPYPASIFEVEEDSGRVITRVNLNEEPTTIFKLVVVAFDDGEPVMSSSATVKILVLHPGEIPRFTQEEYRPPPVSELATKGTMVGVISAAAINQSIVYSIVSGNEEDTFGINNITGVIYVNGPLDYETRTSYVLRVQADSLEVVLANLRVPSKSNTAKVYIEIQDENNHPPVFQKKFYIGGVSEDARMFTSVLRVKATDKDTGNYSVMAYRLIIPPIKEGKEGFVVETYTGLIKTAMLFHNMRRSYFKFQVIATDDYGKGLSGKADVLVSVVNQLDMQVIVSNVPPTLVEKKIEDLTEILDRYVQEQIPGAKVVVESIGARRHGDAFSLEDYTKCDLTVYAIDPQTNRAIDRNELFKFLDGKLLDINKDFQPYYGEGGRILEIRTPEAVTSIKKRGESLGYTEGALLALAFIIILCCIPAILVVLVSYRHFKRRQAECTKTARIQAALPAAKPAVPAPAPVAAPPPPPPPPPGAHLYEELGDSSMKGLFLLYHFQQSRGNNSVSEDRKHQQVVMPFSSNTIEAHKSAHVDGSLKSNKLKSARKFTFLSDEDDLSAHNPLYKENISQVSTNSDISQRTDFVDPFSPKIQAKSKSLRGPREKIQRLWSQSVSLPRRLMRKVPNRPEIIDLQQWQGTRQKAENENTGICTNKRGSSNPLLTTEEANLTEKEEIRQGETLMIEGTEQLKSLSSDSSFCFPRPHFSFSTLPTVSRTVELKSEPNVISSPAECSLELSPSRPCVLHSSLSRRETPICMLPIETERNIFENFAHPPNISPSACPLPPPPPISPPSPPPAPAPLAPPPDISPFSLFCPPPSPPSIPLPLPPPTFFPLSVSTSGPPTPPLLPPFPTPLPPPPPSIPCPPPPSASFLSTECVCITGVKCTTNLMPAEKIKSSMTQLSTTTVCKTDPQREPKGILRHVKNLAELEKSVANMYSQIEKNYLRTNVSELQTMCPSEVTNMEITSEQNKGSLNNIVEGTEKQSHSQSTSL

SEQ ID NO: 60384 - protein, 1886 aa, Homo sapiens
MFRQFYLWTCLASGIILGSLFEICLGQYDDDCKLARGGPPATIVAIDEESRNGTILVDNMLIKGTAGGPDPTIELSLKDNVDYWVLMDPVKQMLFLNSTGRVLDRDPPMNIHSIVVQVQCINKKVGTIIYHEVRIVVRDRNDNSPTFKHESYYATVNELTPVGTTIFTGFSGDNGATDIDDGPNGQIEYVIQYNPDDPTSNDTFEIPLMLTGNIVLRKRLNYEDKTRYFVIIQANDRAQNLNERRTTTTTLTVDVLDGDDLGPMFLPCVLVPNTRDCRPLTYQAAIPELRTPEELNPIIVTPPIQAIDQDRNIQPPSDRPGILYSILVGTPEDYPRFFHMHPRTAELSLLEPVNRDFHQKFDLVIKAEQDNGHPLPAFAGLHIEILDENNQSPYFTMPSYQGYILESAPVGATISDSLNLTSPLRIVALDKDIEDTKDPELHLFLNDYTSVFTVTQTGITRYLTLLQPVDREEQQTYTFSITAFDGVQESEPVIVNIQVMDANDNTPTFPEISYDVYVYTDMRPGDSVIQLTAVDADEGSNGEITYEILVGAQGDFIINKTTGLITIAPGVEMIVGRTYALTVQAADNAPPAERSTGILTLGKALDRESTDRYILIITASDGRPDGTSTATVNIVVTDVNDNAPVFDPYLPRNLSVVEEEANAFVGQVKATDPDAGINGQVHYSLGNFNNLFRITSNGSIYTAVKLNREVRDYYELVVVATDGAVHPRHSTLTLAIKVLDIDDNSPVFTNSTYTVLVEENLPAGTTILQIEAKDVDLGANVSYRIRSPEVKHFFALHPFTGELSLLRSLDYEAFPDQEASITFLVEAFDIYGTMPPGIATVTVIVKDMNDYPPVFSKRIYKGMVAPDAVKGTPITTVYAEDADPPGLPASRVRYRVDDVQFPYPASIFEVEEDSGRVITRVNLNEEPTTIFKLVVVAFDDGEPVMSSSATVKILVLHPGEIPRFTQEEYRPPPVSELATKGTMVGVISAAAINQSIVYSIVSGNEEDTFGINNITGVIYVNGPLDYETRTSYVLRVQADSLEVVLANLRVPSKSNTAKVYIEIQDENNHPPVFQKKFYIGGVSEDARMFTSVLRVKATDKDTGNYSVMAYRLIIPPIKEGKEGFVVETYTGLIKTAMLFHNMRRSYFKFQVIATDDYGKGLSGKADVLVSVVNQLDMQVIVSNVPPTLVEKKIEDLTEILDRYVQEQIPGAKVVVESIGARRHGDAFSLEDYTKCDLTVYAIDPQTNRAIDRNELFKFLDGKLLDINKDFQPYYGEGGRILEIRTPEAVTSIKKRGESLGYTEGALLALAFIIILCCIPAILVVLVSYRHFKRRQAECTKTARIQAALPAAKPAVPAPAPVAAPPPPPPPPPGAHLYEELGDSSMKGLFLLYHFQQSRGNNSVSEDRKHQQVVMPFSSNTIEAHKSAHVDGSLKSNKLKSARKFTFLSDEDDLSAHNPLYKENISQVSTNSDISQRTDFVDPFSPKIQAKSKSLRGPREKIQRLWSQSVSLPRRLMRKVPNRPEIIDLQQWQGTRQKAENENTGICTNKRGSSNPLLTTEEANLTEKEEIRQGETLMIEGTEQLKSLSSDSSFCFPRPHFSFSTLPTVSRTVELKSEPNVISSPAECSLELSPSRPCVLHSSLSRRETPICMLPIETERNIFENFAHPPNISPSACPLPPPPPISPPSPPPAPAPLAPPPDISPFSLFCPPPSPPSIPLPLPPPTFFPLSVSTSGPPTPPLLPPFPTPLPPPPPSIPCPPPPSASFLSTECVCITGVKCTTNLMPAEKIKSSMTQLSTTTVCKTDPQREPKGILRHVKNLAELEKSVANMYSQIEKNYLRTNVSELQTMCPSEVTNMEITSEQNKGSLNNIVEGTEKQSHSQSTSL

SEQ ID NO: 60385 - protein, 654 aa, Homo sapiens
MFRQFYLWTCLASGIILGSLFEICLGQYDDDCKLARGGPPATIVAIDEESRNGTILVDNMLIKGTAGGPDPTIELSLKDNVDYWVLMDPVKQMLFLNSTGRVLDRDPPMNIHSIVVQVQCINKKVGTIIYHEVRIVVRDRNDNSPTFKHESYYATVNELTPVGTTIFTGFSGDNGATDIDDGPNGQIEYVIQYNPDDPTSNDTFEIPLMLTGNIVLRKRLNYEDKTRYFVIIQANDRAQNLNERRTTTTTLTVDVLDGDDLGPMFLPCVLVPNTRDCRPLTYQAAIPELRTPEELNPIIVTPPIQAIDQDRNIQPPSDRPGILYSILVGTPEDYPRFFHMHPRTAELSLLEPVNRDFHQKFDLVIKAEQDNGHPLPAFAGLHIEILDENNQSPYFTMPSYQGYILESAPVGATISDSLNLTSPLRIVALDKDIEDTKDPELHLFLNDYTSVFTVTQTGITRYLTLLQPVDREEQQTYTFSITAFDGVQESEPVIVNIQVMDANDNTPTFPEISYDVYVYTDMRPGDSVIQLTAVDADEGSNGEITYEILVGAQGDFIINKTTGLITIAPGVEMIVGRTYALTVQAADNAPPAERRNSICTVYIEVLPPNNQSPPRFPQLMYSLEISEAMRVGAVLLNLQHGDSNLRESTGQGKH

SEQ ID NO: 60386 - protein, 1677 aa, Homo sapiens
MFRQFYLWTCLASGIILGSLFEICLGQYDDDCKLARGGPPATIVAIDEESRNGTILVDNMLIKGTAGGPDPTIELSLKDNVDYWVLMDPVKQMLFLNSTGRVLDRDPPMNIHSIVVQVQCINKKVGTIIYHEVRIVVRDRNDNSPTFKHESYYATVNELTPVGTTIFTGFSGDNGATDIDDGPNGQIEYVIQYNPDDPTSNDTFEIPLMLTGNIVLRKRLNYEDKTRYFVIIQANDRAQNLNERRTTTTTLTVDVLDGDDLGPMFLPCVLVPNTRDCRPLTYQAAIPELRTPEELNPIIVTPPIQAIDQDRNIQPPSDRPGILYSILVGTPEDYPRFFHMHPRTAELSLLEPVNRDFHQKFDLVIKAEQDNGHPLPAFAGLHIEILDENNQSPYFTMPSYQGYILESAPVGATISDSLNLTSPLRIVALDKDIEDTKDPELHLFLNDYTSVFTVTQTGITRYLTLLQPVDREEQQTYTFSITAFDGVQESEPVIVNIQVMDANDNTPTFPEISYDVYVYTDMRPGDSVIQLTAVDADEGSNGEITYEILVGAQGDFIINKTTGLITIAPGVEMIVGRTYALTVQAADNAPPAERRNSICTVYIEVLPPNNQSPPRFPQLMYSLEISEAMRVGAVLLNLQATDREGDSITYAIENGDPQRVFNLSETTGILTLGKALDRESTDRYILIITASDGRPDGTSTATVNIVVTDVNDNAPVFDPYLPRNLSVVEEEANAFVGQVKATDPDAGINGQVHYSLGNFNNLFRITSNGSIYTAVKLNREVRDYYELVVVATDGAVHPRHSTLTLAIKVLDIDDNSPVFTNSTYTVLVEENLPAGTTILQIEAKDVDLGANVSYRIRSPEVKHFFALHPFTGELSLLRSLDYEAFPDQEASITFLVEAFDIYGTMPPGIATVTVIVKDMNDYPPVFSKRIYKGMVAPDAVKGTPITTVYAEDADPPGLPASRVRYRVDDVQFPYPASIFEVEEDSGRVITRVNLNEEPTTIFKLVVVAFDDGEPVMSSSATVKILVLHPGEIPRFTQEEYRPPPVSELATKGTMVGVISAAAINQSIVYSIVSGNEEDTFGINNITGVIYVNGPLDYETRTSYVLRVQADSLEVVLANLRVPSKSNTAKVYIEIQDENNHPPVFQKKFYIGGVSEDARMFTSVLRVKATDKDTGNYSVMAYRLIIPPIKEGKEGFVVETYTGLIKTAMLFHNMRRSYFKFQVIATDDYGKGLSGKADVLVSVVNQLDMQVIVSNVPPTLVEKKIEDLTEILDRYVQEQIPGAKVVVESIGARRHGDAFSLEDYTKCDLTVYAIDPQTNRAIDRNELFKFLDGKLLDINKDFQPYYGEGGRILEIRTPEAVTSIKKRGESLGYTEGALLALAFIIILCCIPAILVVLVSYRHFKRRQAECTKTARIQAALPAAKPAVPAPAPVAAPPPPPPPPPGAHLYEELGDSSIYRYEMPQYGSRRRLLPPAGQEEYGEVVGEAEEEYEEEEWARKRMIKLVVDREYETSSTGEDSAPECQRNRLHHPSIHSNINGNIYIAQNGSVVRTRRACLTDNLKVASPVRLGGPFKKLDKLAVTHEENVPLNTLSKGPFSTEKMNARPTLVTFAPCPVGTDNTAVKPLRNRLKSTVEQESMIDSKNIKEALEFHSDHTQSDDEELWMGPWNNLHIPMTKL

SEQ ID NO: 60387 - protein, 92 aa, Homo sapiens
MFRQFYLWTCLASGIILGSLFEICLGQYDDDCKLARGGPPATIVAIDEESRNGTILVDNMLIKGTAGGPDPTIELSLKDNVDYWVLMDPVKQ

SEQ ID NO: 60388 - protein, 1150 aa, Homo sapiens
MAPPLRPLARLRPPGMLLRALLLLLLLSPLPGVWCFSELSFVKEPQDVTVTRKDPVVLDCQAHGEVPIKVTWLKNGAKMSENKRIEVLSNGSLYISEVEGRRGEQSDEGFYQCLAMNKYGAILSQKAHLALSTISAFEVQPISTEVHEGGVARFACKISSHPPAVITWEFNRTTLPMTMDRITALPTGVLQIYDVSQRDSGNYRCIAATVAHRRKSMEASLTVIPAKESKSFHTPTIIAGPQNITTSLHQTVVLECMATGNPKPIISWSRLDHKSIDVFNTRVLGNGNLMISDVRLQHAGVYVCRATTPGTRNFTVAMATLTVLAPPSFVEWPESLTRPRAGTARFVCQAEGIPSPKMSWLKNGRKIHSNGRIKMYNSKLVINQIIPEDDAIYQCMAENSQGSILSRARLTVVMSEDRPSAPYNVHAETMSSSAILLAWERPLYNSDKVIAYSVHYMKAEGLNNEEYQVVIGNDTTHYIIDDLEPASNYTFYIVAYMPMGASQMSDHVTQNTLEDVPLRPPEISLTSRSPTDILISWLPIPAKYRRGQVVLYRLSFRLSTENSIQVLELPGTTHEYLLEGLKPDSVYLVRITAATRVGLGESSVWTSHRTPKATSVKAPKSPELHLEPLNCTTISVRWQQDVEDTAAIQGYKLYYKEEGQQENGPIFLDTKDLLYTLSGLDPRRKYHVRLLAYNNIDDGYQADQTVSTPGCVSVRDRMVPPPPPPHHLYAKANTSSSIFLHWRRPAFTAAQIINYTIRCNPVGLQNASLVLYLQTSETHMLVQGLEPNTKYEFAVRLHVDQLSSPWSPVVYHSTLPEAPAGPPVGVKVTLIEDDTALVSWKPPDGPETVVTRYTILYASRKAWIAGEWQVLHREGAITMALLENLVAGNVYIVKISASNEVGEGPFSNSVELAVLPKETSESNQRPKRLDSADAKVYSGYYHLDQKSMTGIAVGVGIALTCILICVLILIYRSKARKSSASKTAQNGTQQLPRTSASLASGNEVGKNLEGAVGNEESLMPMIMPNSFIDAKGGTDLIINSYGPIIKNNSKKKWFFFQDSKKIQVEQPQRRFTPAVCFYQPGTTVLISDEDSPSSPGQTTSFSRPFGVAADTEHSANSEGSHETGDSGRFSHESNDEIHLSSVISTTPPNL

SEQ ID NO: 60389 - protein, 477 aa, Homo sapiens
MGRTVVVLGGGISGLAASYHLSRAPCPPKVVLVESSERLGGWIRSVRGPNGAIFELGPRGIRPAGALGARTLLLVSELGLDSEVLPVRGDHPAAQNRFLYVGGALHALPTGLRGLLRPSPPFSKPLFWAGLRELTKPRGKEPDETVHSFAQRRLGPEVASLAMDSLCRGVFAGNSRELSIRSCFPSLFQAEQTHRSILLGLLLGAGRTPQPDSALIRQALAERWSQWSLRGGLEMLPQALETHLTSRGVSVLRGQPVCGLSLQAEGRWKVSLRDSSLEADHVISAIPASVLSELLPAEAAPLARALSAITAVSVAVVNLQYQGAHLPVQGFGHLVPSSEDPGVLGIVYDSVAFPEQDGSPPGLRVTVMLGGSWLQTLEASGCVLSQELFQQRAQEAAATQLGLKEMPSHCLVHLHKNCIPQYTLGHWQKLESARQFLTAHRLPLTLAGASYEGVAVNDCIESGRQAAVSVLGTEPNS

SEQ ID NO: 60390 - protein, 477 aa, Homo sapiens; identical to SEQ ID NO: 60389

SEQ ID NO: 60391 - protein, 238 aa, Homo sapiens
MGRTVVVLGGGISGLAASYHLSRAPCPPKVVLVESSERLGGWIRSVRGPNGAIFELGPRGIRPAGALGARTLLLGFGHLVPSSEDPGVLGIVYDSVAFPEQDGSPPGLRVTVMLGGSWLQTLEASGCVLSQELFQQRAQEAAATQLGLKEMPSHCLVHLHKTKNQLKWRQSHDRTVEWPKEYPGRSRKQAPSILHVPGCQLLRCRDRDHLGAVSEQPRSSAESRVGVASSTFSTFPLF

SEQ ID NO: 60392 - protein, 444 aa, Homo sapiens
MGRTVVVLGGGISGLAASYHLSRAPCPPKVVLVESSERLGGWIRSVRGPNGAIFELGPRGIRPAGALGARTLLLACGEQVSELGLDSEVLPVRGDHPAAQNRFLYVGGALHALPTGLSPSLTLKVASLAMDSLCRGVFAGNSRELSIRSCFPSLFQAEQTHRSILLGLLLGAGRTPQPDSALIRQALAERWSQWSLRGGLEMLPQALETHLTSRGVSVLRGQPVCGLSLQAEGRWKVSLRDSSLEADHVISAIPASVLSELLPAEAAPLARALSAITAVSVAVVNLQYQGAHLPVQGFGHLVPSSEDPGVLGIVYDSVAFPEQDGSPPGLRVTVMLGGSWLQTLEASGCVLSQELFQQRAQEAAATQLGLKEMPSHCLVHLHKNCIPQYTLGHWQKLESARQFLTAHRLPLTLAGASYEGVAVNDCIESGRQAAVSVLGTEPNS

SEQ ID NO: 60393 - protein, 47 aa, Homo sapiens
MDILKSEILRKRQLVEDRNLLSESMCANDAYLQMAIGNAPWPIGVTM

SEQ ID NO: 60394 - protein, 167 aa, Homo sapiens
MIRTFPGENKKYFKRSELAKKEEEAYFERCGYKIQPKEEDQKPLTSSNPVLELELAEEKLPMTLSRQEVIRRLRERGEPIRLFGETDYDAFQRLRKIEILTPEVNKGLRNDLKAALDKIDQQYLNEIVGGQEPGEEDTQNDLKVHEENTTIEELEALGESLGKGDDH

SEQ ID NO: 60395 - protein, 249 aa, Homo sapiens
MIRTFPGENKKYFKRSELAKKEEEAYFERCGYKPINEKPSGEIQPKEEDQKPLTSSNPVLELELAEEKLPMTLSRQEVIRRLRERGEPIRLFGETDYDAFQRLRKIEILTPEVNKGLRNDLKAALDKIDQQYLNEIVGGQEPGEEDTQNDLKVHEENTTIEELEALGESLGKGDDHKDMDIITKFLKFLLGVWAKELNAREDYVKRSVQGKLNSATQKQTESYLRPLFRKLRKRNLPADIKESITDIIK

SEQ ID NO: 60396 - protein, 342 aa, Homo sapiens
MDILKSEILRKRQLVEDRNLLVENKKYFKRSELAKKEEEAYFERCGYKIQPKEEDQKPLTSSNPVLELELAEEKLPMTLSRQEVIRRLRERGEPIRLFGETDYDAFQRLRKIEILTPEVNKGLRNDLKAALDKIDQQYLNEIVGGQEPGEEDTQNDLKVHEENTTIEELEALGESLGKGDDHKDMDIITKFLKFLLGVWAKELNAREDYVKRSVQGKLNSATQKQTESYLRPLFRKLRKRNLPADIKESITDIIKFMLQREYVKANDAYLQMAIGNAPWPIGVTMVGIHARTGREKIFSKHVAHVLNDETQRKYIQGLKRLMTICQKHFPTDPSKCVEYNAL

SEQ ID NO: 60397 - protein, 249 aa, Homo sapiens; identical to SEQ ID NO: 60395

SEQ ID NO: 60398 - protein, 504 aa, Homo sapiens
MSLICSISNEVPEHPCVSPVSNHVYERRLIEKYIAENGTDPINNQPLSEEQLIDIKVAHPIRPKPPSATSIPAILKALQDEWDAVMLHSFTLRQQLQTTRQELSHALYQHDAACRVIARLTKEVTAAREALATLKPQAGLIVPQAVPSSQPSVVGAGEPMDLGELVGMTPEIIQKLQDKATVLTTERKKRGKTVPEELVKPEELSKYRQVASHVGLHSASIPGILALDLCPSDTNKILTGGADKNVVVFDKSSEQILATLKGHTKKVTSVVFHPSQDLVFSASPDATIRIWSVPNASCVQVVRAHESAVTGLSLHATGDYLLSSSDDQYWAFSDIQTGRVLTKVTDETSGCSLTCAQFHPDGLIFGTGTMDSQIKIWDLKERTNVANFPGHSGPITSIAFSENGYYLATAADDSSVKLWDLRKLKNFKTLQLDNNFEVKSLIFDQSGTYLALGGTDVQIYICKQWTEILHFTEHSGLTTGVAFGHHAKFIASTGMDRSLKFYSL

SEQ ID NO: 60399 - protein, 364 aa, Homo sapiens
MSLADELLADLEEAAEEEEGGSYGEEEEEPAIEDVQEETQLDLSGDSVKTIAKLWDSKMFAEIMMKIEEYISKQAKASEVMGPVEAAPEYRVIVDANNLTVEIENELNIIHKFIRDKYSKRFPELESLVPNALDYIRTVKELGNSLDKCKNNENLQQILTNATIMVVSVTASTTQGQQLSEEELERLEEACDMALELNASKHRIYEYVESRMSFIAPNLSIIIGASTAAKIMGVAGGLTNLSKMPACNIMLLGAQRKTLSGFSSTSVLPHTGYIYHSDIVQSLPPDLRRKAARLVAAKCTLAARVDSFHESTEGKVGYELKDEIERKFDKWQRRRWLRPTRSISPAWLSSSRSRARRVALCPPE

SEQ ID NO: 60400 - protein, 499 aa, Homo sapiens
MSLADELLADLEEAAEEEEGGSYGEEEEEPAIEDVQEETQLDLSGDSVKTIAKLWDSKMFAEIMMKIEEYISKQAKASEVMGPVEAAPEYRVIVDANNLTVEIENELNIIHKFIRDKYSKRFPELESLVPNALDYIRTVKELGNSLDKCKNNENLQQILTNATIMVVSVTASTTQGQQLSEEELERLEEACDMALELNASKHRIYEYVESRMSFIAPNLSIIIGASTAAKIMGVAGGLTNLSKMPACNIMLLGAQRKTLSGFSSTSVLPHTGYIYHSDIVQSLPPDLRRKAARLVAAKCTLAARVDSFHESTEGKVGYELKDEIERKFDKWQEPPPVKQVKPLPAPLDGQRKKRGGRRYRKMKERLGLTEIRKQANRMSFGEIEEDAYQEDLGFSLGHLGKSGSGRVRQTQVNEATKARISKTLQRTLQKQSVVYGGKSTIRDRSSGTASSVAFTPLQGLEIVNPQAAEKKVAEANQKYFSSMAEFLKVKGEKSGLMST

SEQ ID NO: 60401 - protein, 450 aa, Homo sapiens
MSLADELLADLEEAAEEEEGGSYGEEEEEPAIEDVQEETQLDLSGDSVKTIAKLWDSKMFAEIMMKIEEYISKQAKASEVMGPVEAAPEYRVIVDANNLTVEIENELNIIHKFIRDKYSKRFPELESLVPNALDYIRTVKELGNSLDKCKNNENLQQILTNATIMVVSVTASTTQGQQLSEEELERLEEACDMALELNASKHRIYEYVESRMSFIAPNLSIIIGASTAAKIMGVAGGLTNLSKMPACNIMLLGAQRKTLSGFSSTSVLPHTGYIYHSDIVQSLPPDLRRKAARLVAAKCTLAARVDSFHESTEGKVGYELKDEIERKFDKWQEPPPVKQVKPLPAPLDGQRKKRGGRRYRKMKERLGLTEIRKQANRMSFGEIEEDAYQEDLGFSLGHLDAAADPAEAERRIWREVHHPRPLLGHGLQRGLHPTPGPGDCEPTGGREEGG

SEQ ID NO: 60402 - protein, 276 aa, Homo sapiens
MSLADELLADLEEAAEEEEGGSYGEEEEEPAIEDVQEETQLDLSGDSVKTIAKLWDSKMFAEIMMKIEEYISKQAKASEVMGPVEAAPEYRVIVDANNLTVEIENELNIIHKFIRDKYSKRFPELESLVPNALDYIRTVKELGNSLDKCKNNENLQQILTNATIMVVSVTASTTQGQQLSEEELERLEEACDMALELNASKHRIYEYVESRMSFIAPNLSIIIGASTAAKIMGVAGGLTNLSKMPACNIMLLGAQRKTLSGFSSTSVLPHTGYIYH

SEQ ID NO: 60403 - protein, 284 aa, Homo sapiens
MSLADELLADLEEAAEEEEGGSYGEEEEEPAIEDVQEETQLDLSGDSVKTIAKLWDSKMFAEIMMKIEEYISKQAKASEVMGPVEAAPEYRVIVDANNLTVEIENELNIIHKFIRDKYSKRFPELESLVPNALDYIRTVKELGNSLDKCKNNENLQQILTNATIMVVSVTASTTQGQQLSEEELERLEEACDMALELNASKHRIYEYVESRMSFIAPNLSIIIGASTAAKIMGVAGGLTNLSKMPACNIMLLGAQRKTLSGFSSTSVLPHTGYIYHSDIVQSLP

SEQ ID NO: 60404 - protein, 261 aa, Homo sapiens
MSLADELLADLEEAAEEEEGGSYGEEEEEPAIEDVQEETQLDLSGDSVKTIAKLWDSKMFAEIMMKIEEYISKQAKASEVMGPVEAAPEYRVIVDANNLTVEIENELNIIHKFIRDKYSKRFPELESLVPNALDYIRTVKELGNSLDKCKNNENLQQILTNATIMVVSVTASTTQGQQLSEEELERLEEACDMALELNASKHRIYEYVESRMSFIAPNLSIIIGASTAAKIMGVAGGLTNLSKMPACNIMLLGAQRKTLSG

SEQ ID NO: 60405 - protein, 522 aa, Homo sapiens
MASSRASSTQATKTKAPDDLVAPVVKKPHIYYGSLEEKERERLAKGESGILGKDGLKAGIEAGNINITSGEVFEIEEHISERQAEVLAEFERRKRARQINVSTDDSEVKACLRALGEPITLFGEGPAERRERLRNILSVVGTDALKKTKKDDEKSKKSKEEYQQTWYHEGPNSLKVARLWIANYSLPRAMKRLEEARLHKEIPETTRTSQMQELHKSLRSLNNFCSQIGDDRPISYCHFSPNSKMLATACWSGLCKLWSVPDCNLLHTLRGHNTNVGAIVFHPKSTVSLDPKDVNLASCAADGSVKLWSLDSDEPVADIEGHTVRVARVMWHPSGRFLGTTCYDRSWRLWDLEAQEEILHQEGHSMGVYDIAFHQDGSLAGTGGLDAFGRVWDLRTGRCIMFLEGHLKEIYGINFSPNGYHIATGSGDNTCKVWDLRQRRCVYTIPAHQNLVTGVKFEPIHGNFLLTGAYDNTAKIWTHPGWSPLKTLAGHEGKVMGLDISSDGQLIATCSYDRTFKLWMAE

SEQ ID NO: 60406 - protein, 521 aa, Homo sapiens
MASSRASSTATKTKAPDDLVAPVVKKPHIYYGSLEEKERERLAKGESGILGKDGLKAGIEAGNINITSGEVFEIEEHISERQAEVLAEFERRKRARQINVSTDDSEVKACLRALGEPITLFGEGPAERRERLRNILSVVGTDALKKTKKDDEKSKKSKEEYQQTWYHEGPNSLKVARLWIANYSLPRAMKRLEEARLHKEIPETTRTSQMQELHKSLRSLNNFCSQIGDDRPISYCHFSPNSKMLATACWSGLCKLWSVPDCNLLHTLRGHNTNVGAIVFHPKSTVSLDPKDVNLASCAADGSVKLWSLDSDEPVADIEGHTVRVARVMWHPSGRFLGTTCYDRSWRLWDLEAQEEILHQEGHSMGVYDIAFHQDGSLAGTGGLDAFGRVWDLRTGRCIMFLEGHLKEIYGINFSPNGYHIATGSGDNTCKVWDLRQRRCVYTIPAHQNLVTGVKFEPIHGNFLLTGAYDNTAKIWTHPGWSPLKTLAGHEGKVMGLDISSDGQLIATCSYDRTFKLWMAE

SEQ ID NO: 60407 - protein, 1007 aa, Homo sapiens
MAAAETQSLREQPEMEDANSEKSINEENGEVSEDQSQNKHSRHKKKKHKHRSKHKKHKHSSEEDKDKKHKHKHKHKKHKRKEIIDASDKEGMSPAKRTKLDDLALLEDLEKQRALIKAELDNELMEGKVQSGMGLILQGYESGSEEEGEIHEKARNGNRSSTRSSSTKGKLELVDNKITTKKRSKSRSKERTRHRSDKKKSKGGIEIVKEKTTRSKSKERKKSKSPSKRSKSQDQARKSKSPTLRRRSQEKIGKARSPTDDKVKIEDKSKSKDRKKSPIINESRSRDRGKKSRSPVDLRGKSKDRRSRSKERKSKRSETDKEKKPIKSPSKDASSGKENRSPSRRPGRSPKRRSLSPKPRDKSRRSRSPLLNDRRSKQSKSPSRTLSPGRRAKSRSLERKRREPERRRLSSPRTRPRDDILSRRERSKDASPINRWSPTRRRSRSPIRRRSRSPLRRSRSPRRRSRSPRRRDRGRRSRSRLRRRSRSRGGRRRRSRSKVKEDKFKGSLSEGMKVEQESSSDDNLEDFDVEEEDEEALIEQRRIQRQAIVQKYKYLAEDSNMSVPSEPSSPQSSTRTRSPSPDDILERVAADVKEYERENVDTFEASVKAKHNLMTVEQNNGSSQKKLLAPDMFTESDDMFAAYFDSARLRAAGIGKDFKENPNLRDNWTDAEGYYRVNIGEVLDKRYNVYGYTGQGVFSNVVRARDNARANQEVAVKIIRNNELMQKTGLKELEFLKKLNDADPDDKFHCLRLFRHFYHKQHLCLVFEPLSMNLREVLKKYGKDVGLHIKAVRSYSQQLFLALKLLKRCNILHADIKPDNILVNESKTILKLCDFGSASHVADNDITPYLVSRFYRAPEIIIGKSYDYGIDMWSVGCTLYELYTGKILFPGKTNNHMLKLAMDLKGKMPNKMIRKGVFKDQHFDQNLNFMYIEVDKVTEREKVTVMSTINPTKDLLADLIGCQRLPEDQRKKVHQLKDLLDQILMLDPAKRISINQALQHAFIQEKI

SEQ ID NO: 60408 - protein, 1007 aa, Homo sapiens; identical to SEQ ID NO: 60407

SEQ ID NO: 60409 - protein, 993 aa, Homo sapiens [sequence omitted]

SEQ ID NO: 60410 - protein, 939 aa, Homo sapiens
MRPGTGAERGGLMVSEMESHPPSQGPGDGERRLSGSSLCSGSWVSADGFLRRRPSMGHPGMHYAPMGMHPMGQRANMPPVPHGMMPQMMPPMGGPPMGQMPGMMSSVMPGMMMSHMSQASMQPALPPGVNSMDVAAGTYTLYKSMWTEHKSPDGRTYYYNTETKQSTWEKPDDLKTPAEQLLSKCPWKEYKSDSGKPYYYNSQTKESRWAKPKELEDLEGKMGKIKYSKQEECTTTSTAPVPTTEIPTTMSTMAAAEAAAAVVAAAAAAAAAAAAANANASTSASNTVSGTVPVVPEPEVTSIVATVVDNENTVTISTEEQAQLTSTPAIQDQSVEVSSNTGEETSKQETVADFTPKKEEEESQPAKKTYTWNTKEEAKQAFKELLKEKRVPSNASWEQAMKMIINDPRYSALAKLSEKKQAFNAYKVQTEKEEKEEARSKYKEAKESFQRFLENHEKMTSTTRYKKAEQMFGEMEVWNAISERDRLEIYEDVLFFLSKKEKEQAKQLRKRNWEALKNILDNMANVTYSTTWSEAQQYLMDNPTFAEDEELQNMDKEDALICFEEHIRALEKEEEEEKQKSLLRERRRQRKNRESFQIFLDELHEHGQLHSMSSWMELYPTISSDIRFTNMLGQPGSTALDLFKFYVEDLKARYHDEKKIIKDILKDKGFVVEVNTTFEDFVAIISSTKRSTTLDAGNIKLAFNSLLEKAEAREREREKEEARKMKRKESAFKSMLKQAAPPIELDAVWEDIRERFVKEPAFEDITLESERKRIFKDFMHVLEHECQHHHSKNKKHSKKSKKHHRKRSRSRSGSDSDDDDSHSKKKRQRSESRSASEHSSSAESERSYKKSKKHKKKSKKRRHKSDSPESDAEREKDKKEKDRESEKDRTRQRSESKHKSPKKKTGKDSGNWDTSGSELSEGELEKRRRTLLEQLDDDQ

SEQ ID NO: 60411 - protein, 816 aa, Homo sapiens
MCSGSGRRRSSLSPTMRPGTGAERGGLMMGHPGMHYAPMGMHPMGQRANMPPVPHGMMPQMMPPMGGPPMGQMPGMMSSVMPGMMMSHMSQASMQPALPQLLSKCPWKEYKSDSGKPYYYNSQTKESRWAKPKELEDLEGYQNTIVAGSLITKSNLHGMLTELKYSKQEECTTTSTAPVPTTEIPTTMSTMAAAEAAAAVVAAAAAAAAAAAAANANASTSASNTVSGTVPVVPEPEVTSIVATVVDNENTVTISTEEQAQLTSTPAIQDQSVEVSSNTGEETSKQETVADFTPKKEEEESQPAKKTYTWNTKEEAKQAFKELLKEKRVPSNASWEQAMKMIINDPRYSALAKLSEKKQAFNAYKVQTEKEEKEEARSKYKEAKESFQRFLENHEKMTSTTRYKKAEQMFGEMEVWNAISERDRLEIYEDVLFFLSKKEKEQAKQLRKRNWEALKNILDNMANVTYSTTWSEAQQYLMDNPTFAEDEELQNMDKEDALICFEEHIRALEKEEEEEKQKSLLRERRRQRKNRESFQIFLDELHEHGQLHSMSSWMELYPTISSDIRFTNMLGQPVFSLGSTALDLFKFYVEDLKARYHDEKKIIKDILKDKGFVVEVNTTFEDFVAIISSTKRSTTLDAGNIKLAFNSLLEKAEAREREREKEEARKMKRKESAFKSMLKQAAPPIELDAVWEDIRERFVKEPAFEDITLESERKRIFKDFMHVLEHECQHHHSKNKKHSKKSKKHHRKRSRSRSGSDSDDDDSHSKKKRQRSESRSASEHSSSAESERSYKKSKKHKKKSKKRRHKSDSPESDAER

SEQ ID NO: 60412 - protein, 930 aa, Homo sapiens
MCSGSGRRRSSLSPTMRPGTGAERGGLMMGHPGMHYAPMGMHPMGQRANMPPVPHGMMPQMMPPMGGPPMGQMPGMMSSVMPGMMMSHMSQASMQPALPPGVNSMDVAAGTASGAKSMWTEHKSPDGRTYYYNTETKQSTWEKPDDLKTPAEQLLSKCPWKEYKSDSGKPYYYNSQTKESRWAKPKELEDLEGYQNTIVAGSLITKSNLHAMIKAEESSKQEECTTTSTAPVPTTEIPTTMSTMAAAEAAAAVVAAAAAAAAAAAAANANASTSASNTVSGTVPVVPEPEVTSIVATVVDNENTVTISTEEQAQLTSTPAIQDQSVEVSSNTGEETSKQETVADFTPKKEEEESQPAKKTYTWNTKEEAKQAFKELLKEKRVPSNASWEQAMKMIINDPRYSALAKLSEKKQAFNAYKVQTEKEEKEEARSKYKEAKESFQRFLENHEKMTSTTRYKKAEQMFGEMEVWNAISERDRLEIYEDVLFFLSKKEKEQAKQLRKRNWEALKNILDNMANVTYSTTWSEAQQYLMDNPTFAEDEELQNMDKEDALICFEEHIRALEKEEEEEKQKSLLRERRRQRKNRESFQIFLDELHEHGQLHSMSSWMELYPTISSDIRFTNMLGQPGSTALDLFKFYVEDLKARYHDEKKIIKDILKDKGFVVEVNTTFEDFVAIISSTKRSTTLDAGNIKLAFNSLLEKAEAREREREKEEARKMKRKESAFKSMLKQAAPPIELDAVWEDIRERFVKEPAFEDITLESERKRIFKDFMHVLEHECQHHHSKNKKHSKKSKKHHRKRSRSRSGSDSDDDDSHSKKKRQRSESRSASEHSSSAESERSYKKSKKHKKKSKKRRHKSDSPESDAEREKDKKEKDRESEKDRTRQRSESKHKSPKKKTGKDSGNWDTSGSELSEGELEKRRRTLLEQLDDDQ

SEQ ID NO: 60413 - protein, 826 aa, Homo sapiens
MDVAAGTASGAKSMWTEHKSPDGRTYYYNTETKQSTWEKPDDLKTPAEQLLSKCPWKEYKSDSGKPYYYNSQTKESRWAKPKELEDLEGYQNTIVAGSLITKSNLHGMLTELKYSKQEECTTTSTAPVPTTEIPTTMSTMAAAEAAAAVVAAAAAAAAAAAAANANASTSASNTVSGTVPVVPEPEVTSIVATVVDNENTVTISTEEQAQLTSTPAIQDQSVEVSSNTGEETSKQETVADFTPKKEEEESQPAKKTYTWNTKEEAKQAFKELLKEKRVPSNASWEQAMKMIINDPRYSALAKLSEKKQAFNAYKVQTEKEEKEEARSKYKEAKESFQRFLENHEKMTSTTRYKKAEQMFGEMEVWNAISERDRLEIYEDVLFFLSKKEKEQAKQLRKRNWEALKNILDNMANVTYSTTWSEAQQYLMDNPTFAEDEELQNMDKEDALICFEEHIRALEKEEEEEKQKSLLRERRRQRKNRESFQIFLDELHEHGQLHSMSSWMELYPTISSDIRFTNMLGQPGSTALDLFKFYVEDLKARYHDEKKIIKDILKDKGFVVEVNTTFEDFVAIISSTKRSTTLDAGNIKLAFNSLLEKAEAREREREKEEARKMKRKESAFKSMLKQAAPPIELDAVWEDIRERFVKEPAFEDITLESERKRIFKDFMHVLEHECQHHHSKNKKHSKKSKKHHRKRSRSRSGSDSDDDDSHSKKKRQRSESRSASEHSSSAESERSYKKSKKHKKKSKKRRHKSDSPESDAEREKDKKEKDRESEKDRTRQRSESKHKSPKKKTGKDSGNWDTSGSELSEGELEKRRRTLLEQLDDDQ

SEQ ID NO: 60414 - protein, 448 aa, Homo sapiens
MRPGTGAERGGLMVSEMESHPPSQGPGDGERRLSGSSLCSGSWVSADGFLRRRPSMGHPGMHYAPMGMHPMGQRANMPPVPHGMMPQMMPPMGGPPMGQMPGMMSSVMPGMMMSHMSQASMQPALPPGVNSMDVAAGTASGAKSMWTEHKSPDGRTYYYNTETKQSTWEKPDDLKTPAEQLLSKCPWKEYKSDSGKPYYYNSQTKESRWAKPKELEDLEGYQNTIVAGSLITKSNLHAMIKAEESSKQEECTTTSTAPVPTTEIPTTMSTMAAAEAAAAVVAAAAAAAAAAAAANANASTSASNTVSGTVPVVPEPEVTSIVATVVDNENTVTISTEEQAQLTSTPAIQDQSVEVSSNTGEETSKQETVADFTPKKEEEESQPAKKTYTWNTKEEAKQAFKELLKEKRVPSNASWEQAMKMIINDPRYSALAKLSEKKQAFNAYKVQT

SEQ ID NO: 60415 - protein, 941 aa, Homo sapiens
MNKKKKPFLGMPAPLGYVPGLGRGATGFTTRSDIGPARDANDPVDDRHAPPGKRTVGDQMKKNQAADDDDEDLNDTNYDEFNGYAGSLFSSGPYEKDDEEADAIYAALDKRMDERRKERREQREKEEIEKYRMERPKIQQQFSDLKRKLAEVTEEEWLSIPEVGDARNKRQRNPRYEKLTPVPDSFFAKHLQTGENHTSVDPRQTQFGGLNTPYPGGLNTPYPGGMTPGLMTPGTGELDMRKIGQARNTLMDMRLSQVSDSVSGQTVVDPKGYLTDLNSMIPTHGGDINDIKKARLLLKSVRETNPHHPPAWIASARLEEVTGKLQVARNLIMKGTEMCPKSEDVWLEAARLQPGDTAKAVVAQAVRHLPQSVRIYIRAAELETDIRAKKRVLRKALEHVPNSVRLWKAAVELEEPEDARIMLSRAVECCPTSVELWLALARLETYENARKVLNKARENIPTDRHIWITAAKLEEANGNTQMVEKIIDRAITSLRANGVEINREQWIQDAEECDRAGSVATCQAVMRAVIGIGIEEEDRKHTWMEDADSCVAHNALECARAIYAYALQVFPSKKSVWLRAAYFEKNHGTRESLEALLQRAVAHCPKAEVLWLMGAKSKWLAGDVPAARSILALAFQANPNSEEIWLAAVKLESENDEYERARRLLAKARSSAPTARVFMKSVKLEWVQDNIRAAQDLCEEALRHYEDFPKLWMMKGQIEEQKEMMEKAREAYNQGLKKCPHSTPLWLLLSRLEEKIGQLTRARAILEKSRLKNPKNPGLWLESVRLEYRAGLKNIANTLMAKALQECPNSGILWSEAIFLEARPQRRTKSVDALKKCEHDPHVLLAVAKLFWSQRKITKAREWFHRTVKIDSDLGDAWAFFYKFELQHGTEEQQEEVRKRCESAEPRHGELWCAVSKDIANWQKKIGDILRLVAGRIKNTF

SEQ ID NO: 60416 - protein, 901 aa, Homo sapiens
MNKKKKPFLGMPAPLGYVPGLGRGATGFTTRSDIGPARDANDPVDDRHAPPGKRTVGDQMKKNQAADDDDEDLNDTNYDEFNGYAGSLFSSGPYEKDDEEADAIYAALDKRMDERRKERREQREKEEIEKYRMERPKIQQQFSDLKRKLAEVTEEEWLSIPEVGDARNKRQRNPRYEKLTPVPDSFFAKHLQTGENHTSVDPRQTQFGGLNTPYPGGLNTPYPGGMTPGLMTPGTGELDMRKIGQARNTLMDMRLSQVSDSVSGQTVVDPKGYLTDLNSMIPTHGGDINDIKKARLLLKSVRETNPHHPPAWIASARLEEVTGKLQVARNLIMKGTEMCPKSEDVWLEAARLQPGDTAKAVVAQAVRHLPQSVRIYIRAAELETDIRAKKRVLRKALEHVPNSVRLWKAAVELEEPEDARIMLSRAVECCPTSVELWLALARLETYENARKVLNKARENIPTDRHIWITAAKLEEANGNTQMVEKIIDRAITSLRANGVEINREQWIQDAEECDRAGSVATCQAVMRAVIGIGIEEEDRKHTWMEDADSCVAHNALECARAIYAYALQVFPSKKSVWLRAAYFEKNHGTRESLEALLQRAVAHCPKAEVLWLMGAKSKWLAGDVPAARSILALAFQVFMKSVKLEWVQDNIRAAQDLCEEALRHYEDFPKLWMMKGQIEEQKEMMEKAREAYNQGLKKCPHSTPLWLLLSRLEEKIGQLTRARAILEKSRLKNPKNPGLWLESVRLEYRAGLKNIANTLMAKALQECPNSGILWSEAIFLEARPQRRTKSVDALKKCEHDPHVLLAVAKLFWSQRKITKAREWFHRTVKIDSDLGDAWAFFYKFELQHGTEEQQEEVRKRCESAEPRHGELWCAVSKDIANWQKKIGDILRLVAGRIKNTF

SEQ ID NO: 60417 - protein, 2335 aa, Homo sapiens
MAGVFPYRGPGNPVPGPLAPLPDYMSEEKLQEKARKWQQLQAKRYAEKRKFGFVDAQKEDMPPEHVRKIIRDHGDMTNRKFRHDKRVYLGALKYMPHAVLKLLENMPMPWEQIRDVPVLYHITGAISFVNEIPWVIEPVYISQWGSMWIMMRREKRDRRHFKRMRFPPFDDEEPPLDYADNILDVEPLEAIQLELDPEEDAPVLDWFYDHQPLRDSRKYVNGSTYQRWQFTLPMMSTLYRLANQLLTDLVDDNYFYLFDLKAFFTSKALNMAIPGGPKFEPLVRDINLQDEDWNEFNDINKIIIRQPIRTEYKIAFPYLYNNLPHHVHLTWYHTPNVVFIKTEDPDLPAFYFDPLINPISHRHSVKSQEPLPDDDEEFELPEFVEPFLKDTPLYTDNTANGIALLWAPRPFNLRSGRTRRALDIPLVKNWYREHCPAGQPVKVRVSYQKLLKYYVLNALKHRPPKAQKKRYLFRSFKATKFFQSTKLDWVEVGLQVCRQGYNMLNLLIHRKNLNYLHLDYNFNLKPVKTLTTKERKKSRFGNAFHLCREVLRLTKLVVDSHVQYRLGNVDAFQLADGLQYIFAHVGQLTGMYRYKYKLMRQIRMCKDLKHLIYYRFNTGPVGKGPGCGFWAAGWRVWLFFMRGITPLLERWLGNLLARQFEGRHSKGVAKTVTKQRVESHFDLELRAAVMHDILDMMPEGIKQNKARTILQHLSEAWRCWKANIPWKVPGLPTPIENMILRYVKAKADWWTNTAHYNRERIRRGATVDKTVCKKNLGRLTRLYLKAEQERQHNYLKDGPYITAEEAVAVYTTTVHWLESRRFSPIPFPPLSYKHDTKLLILALERLKEAYSVKSRLNQSQREELGLIEQAYDNPHEALSRIKRHLLTQRAFKEVGIEFMDLYSHLVPVYDVEPLEKITDAYLDQYLWYEADKRRLFPPWIKPADTEPPPLLVYKWCQGINNLQDVWETSEGECNVMLESRFEKMYEKIDLTLLNRLLRLIVDHNIADYMTAKNNVVINYKDMNHTNSYGIIRGLQFASFIVQYYGLVMDLLVLGLHRASEMAGPPQMPNDFLSFQDIATEAAHPIRLFCRYIDRIHIFFRFTADEARDLIQRYLTEHPDPNNENIVGYNNKKCWPRDARMRLMKHDVNLGRAVFWDIKNRLPRSVTTVQWENSFVSVYSKDNPNLLFNMCGFECRILPKCRTSYEEFTHKDGVWNLQNEVTKERTAQCFLRVDDESMQRFHNRVRQILMASGSTTFTKIVNKWNTALIGLMTYFREAVVNTQELLDLLVKCENKIQTRIKIGLNSKMPSRFPPVVFYTPKELGGLGMLSMGHVLIPQSDLRWSKQTDVGITHFRSGMSHEEDQLIPNLYRYIQPWESEFIDSQRVWAEYALKRQEAIAQNRRLTLEDLEDSWDRGIPRINTLFQKDRHTLAYDKGWRVRTDFKQYQVLKQNPFWWTHQRHDGKLWNLNNYRTDMIQALGGVEGILEHTLFKGTYFPTWEGLFWEKASGFEESMKWKKLTNAQRSGLNQIPNRRFTLWWSPTINRANVYVGFQVQLDLTGIFMHGKIPTLKISLIQIFRAHLWQKIHESIVMDLCQVFDQELDALEIETVQKETIHPRKSYKMNSSCADILLFASYKWNVSRPSLLADSKDVMDSTTTQKYWIDIQLRWGDYDSHDIERYARAKFLDYTTDNMSIYPSPTGVLIAIDLAYNLHSAYGNWFPGSKPLIQQAMAKIMKANPALYVLRERIRKGLQLYSSEPTEPYLSSQNYGELFSNQIIWFVDDTNVYRVTIHKTFEGNLTTKPINGAIFIFNPRTGQLFLKIIHTSVWAGQKRLGQLAKWKTAEEVAALIRSLPVEEQPKQIIVTRKGMLDPLEVHLLDFPNIVIKGSELQLPFQACLKVEKFGDLILKATEPQMVLFNLYDDWLKTISSYTAFSRLILILRALHVNNDRAKVILKPDKTTITEPHHIWPTLTDEEWIKVEVQLKDLILADYGKKNNVNVASLTQSEIRDIILGMEISAPSQQRQQIAEIEKQTKEQSQLTATQTRTVNKHGDEIITSTTSNYETQTFSSKTEWRVRAISAANLHLRTNHIYVSSDDIKETGYTYILPKNVLKKFICISDLRAQIAGYLYGVSPPDNPQVKEIRCIVMVPQWGTHQTVHLPGQLPQHEYLKEMEPLGWIHTQPNESPQLSPQDVTTHAKIMADNPSWDGEKTIIITCSFTPGSCTLTAYKLTPSGYEWGRQNTDKGNNPKGYLPSHYERVQMLLSDRFLGFFMVPAQSSWNYNFMGVRHDPNMKYELQLANPKEFYHEVHRPSHFLNFALLQEGEVYSADREDLYA

SEQ ID NO: 60418 - protein, 463 aa, Homo sapiens
MIQALGGVEGILEHTLFKGTYFPTWEGLFWEKASGFEESMKWKKLTNAQRSGLNQIPNRRFTLWWSPTINRANVYVGFQVQLDLTGIFMHGKIPTLKISLIQIFRAHLWQKIHESIVMDLCQVFDQELDALEIETVQKETIHPRKSYKMNSSCADILLFASYKWNVSRPSLLADSKDVMDSTTTQKYWIDIQLRWGDYDSHDIERYARAKFLDYTTDNMSIYPSPTGVLIAIDLAYNLHSYSEVGSLQQASHTTGAKIMKANPALYVLRERIRKGLQLYSSEPTEPYLSSQNYGELFSNQIIWFVDDTNVYRVTIHKTFEGNLTTKPINGAIFIFNPRTGQLFLKIIHTSVWAGQKRLGQLAKWKTAEEVAALIRSLPVEEQPKQIIVTRKGMLDPLEVHLLDFPNIVIKGSELQLPFQACLKVEKFGDLILKATEPQMVLFNLYDDWLKTISSYTAFSRLIL

SEQ ID NO: 60419 - protein, 324 aa, Homo sapiens
MLKSCSRASFSPSVRKPPLILRRLLSEDVGMDIPFEEGVLSPSAADMRPEPPNSLDLNDTHPRRIKLTAPNINLSLDQSEGSILSDDNLDSPDEIDINVDELDTPDEADSFEYTGHEDPTANKDSGQESESIPEYTAEEEREDNRLWRTVVIGEQEQRIDMKVIEPYRRVISHGGYYGDGLNAIIVFAACFLPDSSRADYHYVMENLFLYVISTLELMVAEDYMIVYLNGATPRRRMPGLGWMKKCYQMIDRRLRKNLKSFIIVHPSWFIRTILAVTRPFISSKFSSKIKYVNSLSELSGLIPMDCIHIPESIINIDLKLKEKP

SEQ ID NO: 60420 - protein, 353 aa, Homo sapiens
MLKSCSRASFSPSVRKPPLILRRLLSEDVGMDIPFEEGVLSPSAADMRPEPPNSLDLNDTHPRRIKLTAPNINLSLDQSEGSILSDDNLDSPDEIDINVDELDTPDEADSFEYTGHEDPTANKDSGQESESIPEYTAEEEREDNRLWRTVVIGEQEQRIDMKVIEPYRRVISHGGYYGDGLNAIIVFAACFLPDSSRADYHYVMENLFLYVISTLELMVAEDYMIVYLNGATPRRRMPGLGWMKKCYQMIDRRLRKNLKSFIIVHPSWFIRTILAVTRPFISSKFSSKIKYVNSLSELSGLIPMDCIHIPESIIKLDEELREASEAAKTSCLYNDPEMSSMEKDIDLKLKEKP

SEQ ID NO: 60421 - protein, 3088 aa, Homo sapiens
MEEFLQRAKSKLNRSKRLEKVHVVIGPKSCDLDSLISTFTYAYFLDKVSPPGVLCLPVLNIPRTEFNYFTETRFILEELNISESFHIFRDEINLHQLNDEGKLSITLVGSSVLASEDKTLESAVVKVINPVEQSDANVEFRESSSSLVLKEILQEAPELITEQLAHRLRGSILFKWMTMESEKISEKQEEILSILEEKFPNLPPREDIINVLQETQFSAQGLSIEQTMLKDLKELSDGEIKVAISTVSMNLENCLFHSNITSDLKAFTDKFGFDVLILFSSYLSEEQQPRRQIAVYSENMELCSQICCELEECQNPCLELEPFDCGCDEILVYQQEDPSVTCDQVVLVVKEVINRRCPEMVSNSRTSSTEAVAGSAPLSQGSSGIMELYGSDIEPQPSSVNFIENPPDLNDSNQAQVDANVDLVSPDSGLATIRSSRSSKESSVFLSDDSPVGEGAGPHHTLLPGLDSYSPIPEGAVAEEHAWSGEHGEHFDLFNFDPAPMASGQSQQSSHSADYSPADDFFPNSDLSEGQLPAGPEGLDGMGTNMSNYSSSSLLSGAGKDSLVEHDEEFVQRQDSPRDNSERNLSLTDFVGDESPSPERLKNTGKRIPPTPMNSLVESSPSTEEPASLYTEDMTQKATDTGHMGPPQTHARCSSWWGGLEIDSKNIADAWSSSEQESVFQSPESWKEHKPSSIDRRASDSVFQPKSLEFTKSGPWESEFGQPELGSNDIQDKNEESLPFQNLPMEKSPLPNTSPQGTNHLIEDFASLWHSGRSPTAMPEPWGNPTDDGEPAAVAPFPAWSAFGKEDHDEALKNTWNLHPTSSKTPSVRDPNEWAMAKSGFAFSSSELLDNSPSEINNEAAPEIWGKKNNDSRDHIFAPGNPSSDLDHTWTNSKPPKEDQNGLVDPKTRGKVYEKVDSWNLFEENMKKGGSDVLVPWEDSFLSYKCSDYSASNLGEDSVPSPLDTNYSTSDSYTSPTFAGDEKETEHKPFAKEEGFESKDGNSTAEETDIPPQSLQQSSRNRISSGPGNLDMWASPHTDNSSEINTTHNLDENELKTEHTDGKNISMEDDVGESSQSSYDDPSMMQLYNETNRQLTLLHSSTNSRQTAPDSLDLWNRVILEDTQSTATISDMDNDLDWDDCSGGAAIPSDGQTEGYMAEGSEPETRFTVRQLEPWGLEYQEANQVDWELPASDEHTKDSAPSEHHTLNEKSGQLIANSIWDSVMRDKDMSSFMLPGSSHITDSEQRELPPEIPSHSANVKDTHSPDAPAASGTSESEALISHLDKQDTERETLQSDAASLATRLENPGYFPHPDPWKGHGDGQSESEKEAQGATDRGHLDEEEVIASGVENASGISEKGQSDQELSSLVASEHQEICIKSGKISSLAVTFSPQTEEPEEVLEYEEGSYNLDSRDVQTGMSADNLQPKDTHEKHLMSQRNSGETTETSDGMNFTKYVSVPEKDLEKTEECNFLEPENVGGGPPHRVPRSLDFGDVPIDSDVHVSSTCSEITKNLDVKGSENSLPGAGSSGNFDRDTISSEYTHSSASSPELNDSSVALSSWGQQPSSGYQEENQGNWSEQNHQESELITTDGQVEIVTKVKDLEKNRINEFEKSFDRKTPTFLEIWNDSVDGDSFSSLSSPETGKYSEHSGTHQESNLIASYQEKNEHDISATVQPEDARVISTSSGSDDDSVGGEESIEEEIQVANCHVAEDESRAWDSLNESNKFLVTADPKSENIYDYLDSSEPAENENKSNPFCDNQQSSPDPWTFSPLTETEMQITAVEKEKRSSPETGTTGDVAWQISPKASFPKNEDNSQLEMLGFSADSTEWWKASPQEGRLIESPFERELSDSSGVLEINSSVHQNASPWGVPVQGDIEPVETHYTNPFSDNHQSPFLEGNGKNSHEQLWNIQPRQPDPDADKFSQLVKLDQIKEKDSREQTFVSAAGDELTPETPTQEQCQDTMLPVCDHPDTAFTHAEENSCVTSNVSTNEGQETNQWEQEKSYLGEMTNSSIATENFPAVSSPTQLIMKPGSEWDGSTPSEDSRGTFVPDILHGNFQEGGQLASAAPDLWIDAKKPFSLKADGENPDILTHCEHDSNSQASDSPDICHDSEAKQETEKHLSACMGPEVESSELCLTEPEIDEEPIYEPGREFVPSNAELDSENATVLPPIGYQADIKGSSQPASHKGSPEPSEINGDNSTGLQVSEKGASPDMAPILEPVDRRIPRIENVATSIFVTHQEPTPEGDGSWISDSFSPESQPGARALFDGDPHLSTENPALVPDALLASDTCLDISEAAFDHSFSDASGLNTSTGTIDDMSKLTLSEGHPETPVDGDLGKQDICSSEASWGDFEYDVMGQNIDEDLLREPEHFLYGGDPPLEEDSLKQSLAPYTPPFDLSYLTEPAQSAETIEEAGSPEDESLGCRAAEIVLSALPDRRSEGNQAETKNRLPGSQLAVLHIREDPESVYLPVGAGSNILSPSNVDWEVETDNSDLPAGGDIGPPNGASKEISELEEEKTIPTKEPEQIKSEYKEERCTEKNEDRHALHMDYILVNREENSHSKPETCEERESIAELELYVGSKETGLQGTQLASFPDTCQPASLNERKGLSAEKMSSKSDTRSSFESPAQDQSWMFLGHSEVGDPSLDARDSGPGWSGKTVEPFSELGLGEGPQLQILEEMKPLESLALEEASGPVSQSQKSKSRGRAGPDAVTLQAVTHDNEWEMLSPQPVQKNMIPDTEMEEETEFLELGTRISRPNGLLSEDVGMDIPFEEGVLSPSAADMRPEPPNSLDLNDTHPRRIKLTAPNINLSLDQSEGSILSDDNLDSPDEIDINVDELDTPDEADSFEYTGHDPTANKDSGQESESIPEYTAEEEREDNRLWRTVVIGEQEQRIDMKVIEPYRRVISHGGYYGDGLNAIIVFAACFLPDSSRADYHYVMENLFLYVISTLELMVAEDYMIVYLNGATPRRRMPGLGWMKKCYQMIDRRLRKNLKSFIIVHPSWFIRTILAVTRPFISSKFSSKIKYVNSLSELSGLIPMDCIHIPESIIKLDEELREASEAAKTSCLYNDPEMSSMEKDIDLKLKEKP

SEQ ID NO: 60422 - protein, 3054 aa, Homo sapiens
RNLMHRMKESENRSKRLEKVHVVIGPKSCDLDSLISTFTYAYFLDKVSPPGVLCLPVLNIPRTEFNYFTETRFILEELNISESFHIFRDEINLHQLNDEGKLSITLVGSSVLASEDKTLESAVVKVINPVEQSDANVEFRESSSSLVLKEILQEAPELITEQLAHRLRGSILFKWMTMESEKISEKQEEILSILEEKFPNLPPREDIINVLQETQFSAQGLSIEQTMLKDLKELSDGEIKVAISTVSMNLENCLFHSNITSDLKAFTDKFGFDVLILFSSYLSEEQQPRRQIAVYSENMELCSQICCELEECQNPCLELEPFDCGCDEILVYQQEDPSVTCDQVVLVVKEVINRRCPEMVSNSRTSSTEAVAGSAPLSQGSSGIMELYGSDIEPQPSSVNFIENPPDLNDSNQAQVDANVDLVSPDSGLATIRSSRSSKESSVFLSDDSPVGEGAGPHHTLLPGLDSYSPIPEGAVAEEHAWSGEHGEHFDLFNFDPAPMASGQSQQSSHSADYSPADDFFPNSDLSEGQLPAGPEGLDGMGTNMSNYSSSSLLSGAGKDSLVEHDEEFVQRQDSPRDNSERNLSLTDFVGDESPSPERLKNTGKRIPPTPMNSLVESSPSTEEPASLYTEDMTQKATDTGHMGPPQTHARCSSWWGGLEIDSKNIADAWSSSEQESVFQSPESWKEHKPSSIDRRASDSVFQPKSLEFTKSGPWESEFGQPELGSNDIQDKNEESLPFQNLPMEKSPLPNTSPQGTNHLIEDFASLWHSGRSPTAMPEPWGNPTDDGEPAAVAPFPAWSAFGKEDHDEALKNTWNLHPTSSKTPSVRDPNEWAMAKSGFAFSSSELLDNSPSEINNEAAPEIWGKKNNDSRDHIFAPGNPSSDLDHTWTNSKPPKEDQNGLVDPKTRGKVYEKVDSWNLFEENMKKGGSDVLVPWEDSFLSYKCSDYSASNLGEDSVPSPLDTNYSTSDSYTSPTFAGDEKETEHKPFAKEEGFESKDGNSTAEETDIPPQSLQQSSRNRISSGPGNLDMWASPHTDNSSEINTTHNLDENELKTEHTDGKNISMEDDVGESSQSSYDDPSMMQLYNETNRQLTLLHSSTNSRQTAPDSLDLWNRVILEDTQSTATISDMDNDLDWDDCSGGAAIPSDGQTEGYMAEGSEPETRFTVRQLEPWGLEYQEANQVDWELPASDEHTKDSAPSEHHTLNEKSGQLIANSIWDSVMRDKDMSSFMLPGSSHITDSEQRELPPEIPSHSANVKDTHSPDAPAASGTSESEALISHLDKQDTERETLQSDAASLATRLENPGYFPHPDPWKGHGDGQSESEKEAQGATDRGHLDEEEVIASGVENASGISEKGQSDQELSSLVASEHQEICIKSGKISSLAVTFSPQTEEPEEVLEYEEGSYNLDSRDVQTGMSADNLQPKDTHEKHLMSQRNSGETTETSDGMNFTKYVSVPEKDLEKTEECNFLEPENVGGGPPHRVPRSLDFGDVPIDSDVHVSSTCSEITKNLDVKGSENSLPGAGSSGNFDRDTISSEYTHSSASSPELNDSSVALSSWGQQPSSGYQEENQGNWSEQNHQESELITTDGQVEIVTKVKDLEKNRINEFEKSFDRKTPTFLEIWNDSVDGDSFSSLSSPETGKYSEHSGTHQESNLIASYQEKNEHDISATVQPEDARVISTSSGSDDDSVGGEESIEEEIQVANCHVAEDESRAWDSLNESNKFLVTADPKSENIYDYLDSSEPAENENKSNPFCDNQQSSPDPWTFSPLTETEMQITAVEKEKRSSPETGTTGDVAWQISPKASFPKNEDNSQLEMLGFSADSTEWWKASPQEGRLIESPFERELSDSSGVLEINSSVHQNASPWGVPVQGDIEPVETHYTNPFSDNHQSPFLEGNGKNSHEQLWNIQPRQPDPDADKFSQLVKLDQIKEKDSREQTFVSAAGDELTPETPTQEQCQDTMLPVCDHPDTAFTHAEENSCVTSNVSTNEGQETNQWEQEKSYLGEMTNSSIATENFPAVSSPTQLIMKPGSEWDGSTPSEDSRGTFVPDILHGNFQEGGQLASAAPDLWIDAKKPFSLKADGENPDILTHCEHDSNSQASDSPDICHDSEAKQETEKHLSACMGPEVESSELCLTEPEIDEEPIYEPGREFVPSNAELDSENATVLPPIGYQADIKGSSQPASHKGSPEPSEINGDNSTGLQVSEKGASPDMAPILEPVDRRIPRIENVATSIFVTHQEPTPEGDGSWISDSFSPESQPGARALFDGDPHLSTENPALVPDALLASDTCLDISEAAFDHSFSDASGLNTSTGTIDDMSKLTLSEGHPETPVDGDLGKQDICSSEASWGDFEYDVMGQNIDEDLLREPEHFLYGGDPPLEEDSLKQSLAPYTPPFDLSYLTEPAQSAETIEEAGSPEDESLGCRAAEIVLSALPDRRSEGNQAETKNRLPGSQLAVLHIREDPESVYLPVGAGSNILSPSNVDWEVETDNSDLPAGGDIGPPNGASKEISELEEEKTIPTKEPEQIKSEYKEERCTEKNEDRHALHMDYILVNREENSHSKPETCEERESIAELELYVGSKETGLQGTQLASFPDTCQPASLNERKGLSAEKMSSKSDTRSSFESPAQDQSWMFLGHSEVGDPSLDARDSGPGWSGKTVEPFSELGLGEGPQLQILEEMKPLESLALEEASGPVSQSQKSKSRGRAGPDAVTLQAVTHDNEWEMLSPQPVQKNMIPDTEMEEETEFLELGTRISRPNGLLSEDVGMDIPFEEGVLSPSAADMRPEPPNSLDLNDTHPRRIKLTAPNINLSLDQSEGSILSDDNLDSPDEIDINVDELDTPDEADSFEYTGHEDPTANKDSGQESESIPEYTAEEEREDNRLWRTVVIGEQEQRIDMKVIEPYRRVISHGGSRGYYGDGLNAIIVFAACFLPDSSRADYHYVMENLFLYVISTLELMVAEDYMIVYLNGATPRRRMPGLGWMKKCYQMIDRRLRKNLKSFIIVHPSWFIRTILAVTRPFISSKFSSKIKYVNSLSELSGLIPMDCIHIPESIINY

SEQ ID NO: 60423 - protein, 260 aa, Homo sapiens
IDINVDELDTPDEADSFEYTGHDPTANKDSGQESESIPEYTAEEEREDNRLWRTVVIGEQEQRIDMKVIEPYRRVISHGGDSGYYGDGLNAIIVFAACFLPDSSRADYHYVMENLFLYVISTLELMVAEDYMIVYLNGATPRRRMPGLGWMKKCYQMIDRRLRKNLKSFIIVHPSWFIRTILAVTRPFISSKFSSKIKYVNSLSELSGLIPMDCIHIPESIIKYDEERSYKRSVRTSCLYNDPEMSSMEKDIDLKLKEKP

SEQ ID NO: 60424 - protein, 2384 aa, Homo sapiens
  VARIANT 1: note = MOD_RES - Any amino acid
XFQSPESWKEHKPSSIDRRASDSVFQPKSLEFTKSGPWESEFGQPELGSNDIQDKNEESLPFQNLPMEKSPLPNTSPQGTNHLIEDFASLWHSGRSPTAMPEPWGNPTDDGEPAAVAPFPAWSAFGKEDHDEALKNTWNLHPTSSKTPSVRDPNEWAMAKSGFAFSSSELLDNSPSEINNEAAPEIWGKKNNDSRDHIFAPGNPSSDLDHTWTNSKPPKEDQNGLVDPKTRGKVYEKVDSWNLFEENMKKGGSDVLVPWEDSFLSYKCSDYSASNLGEDSVPSPLDTNYSTSDSYTSPTFAGDEKETEHKPFAKEEGFESKDGNSTAEETDIPPQSLQQSSRNRISSGPGNLDMWASPHTDNSSEINTTHNLDENELKTEHTDGKNISMEDDVGESSQSSYDDPSMMQLYNETNRQLTLLHSSTNSRQTAPDSLDLWNRVILEDTQSTATISDMDNDLDWDDCSGGAAIPSDGQTEGYMAEGSEPETRFTVRQLEPWGLEYQEANQVDWELPASDEHTKDSAPSEHHTLNEKSGQLIANSIWDSVMRDKDMSSFMLPGSSHITDSEQRELPPEIPSHSANVKDTHSPDAPAASGTSESEALISHLDKQDTERETLQSDAASLATRLENPGYFPHPDPWKGHGDGQSESEKEAQGATDRGHLDEEEVIASGVENASGISEKGQSDQELSSLVASEHQEICIKSGKISSLAVTFSPQTEEPEEVLEYEEGSYNLDSRDVQTGMSADNLQPKDTHEKHLMSQRNSGETTETSDGMNFTKYVSVPEKDLEKTEECNFLEPENVGGGPPHRVPRSLDFGDVPIDSDVHVSSTCSEITKNLDVKGSENSLPGAGSSGNFDRDTISSEYTHSSASSPELNDSSVALSSWGQQPSSGYQEENQGNWSEQNHQESELITTDGQVEIVTKVKDLEKNRINEFEKSFDRKTPTFLEIWNDSVDGDSFSSLSSPETGKYSEHSGTHQESNLIASYQEKNEHDISATVQPEDARVISTSSGSDDDSVGGEESIEEEIQVANCHVAEDESRAWDSLNESNKFLVTADPKSENIYDYLDSSEPAENENKSNPFCDNQQSSPDPWTFSPLTETEMQITAVEKEKRSSPETGTTGDVAWQISPKASFPKNEDNSQLEMLGFSADSTEWWKASPQEGRLIESPFERELSDSSGVLEINSSVHQNASPWGVPVQGDIEPVETHYTNPFSDNHQSPFLEGNGKNSHEQLWNIQPRQPDPDADKFSQLVKLDQIKEKDSREQTFVSAAGDELTPETPTQEQCQDTMLPVCDHPDTAFTHAEENSCVTSNVSTNEGQETNQWEQEKSYLGEMTNSSIATENFPAVSSPTQLIMKPGSEWDGSTPSEDSRGTFVPDILHGNFQEGGQLASAAPDLWIDAKKPFSLKADGENPDILTHCEHDSNSQASDSPDICHDSEAKQETEKHLSACMGPEVESSELCLTEPEIDEEPIYEPGREFVPSNAELDSENATVLPPIGYQADIKGSSQPASHKGSPEPSEINGDNSTGLQVSEKGASPDMAPILEPVDRRIPRIENVATSIFVTHQEPTPEGDGSWISDSFSPESQPGARALFDGDPHLSTENPALVPDALLASDTCLDISEAAFDHSFSDASGLNTSTGTIDDMSKLTLSEGHPETPVDGDLGKQDICSSEASWGDFEYDVMGQNIDEDLLREPEHFLYGGDPPLEEDSLKQSLAPYTPPFDLSYLTEPAQSAETIEEAGSPEDESLGCRAAEIVLSALPDRRSEGNQAETKNRLPGSQLAVLHIREDPESVYLPVGAGSNILSPSNVDWEVETDNSDLPAGGDIGPPNGASKEISELEEEKTIPTKEPEQIKSEYKEERCTEKNEDRHALHMDYILVNREENSHSKPETCEERESIAELELYVGSKETGLQGTQLASFPDTCQPASLNERKGLSAEKMSSKSDTRSSFESPAQDQSWMFLGHSEVGDPSLDARDSGPGWSGKTVEPFSELGLGEGPQLQILEEMKPLESLALEEASGPVSQSQKSKSRGRAGPDAVTLQAVTHDNEWEMLSPQPVQKNMIPDTEMEEETEFLELGTRISRPNGLLSEDVGMDIPFEEGVLSPSAADMRPEPPNSLDLNDTHPRRIKLTAPNINLSLDQSEGSILSDDNLDSPDEIDINVDELDTPDEADSFEYTGHDPTANKDSGQESESIPEYTAEEEREDNRLWRTVVIGEQEQRIDMKVIEPYRRVISHGGDSGYYGDGLNAIIVFAACFLPDSSRADYHYVMENLFLYVISTLELMVAEDYMIVYLNGATPRRRMPGLGWMKKCYQMIDRRLRKNLKSFIIVHPSWFIRTILAVTRPFISSKFSSKIKYVNSLSELSGLIPMDCIHIPESIINIDLKLKEKP

SEQ ID NO: 60425 - protein, 2730 aa, Homo sapiens
MVSNSRTSSTEAVAGSAPLSQGSSGIMELYGSDIEPQPSSVNFIENPPDLNDSNQAQVDANVDLVSPDSGLATIRSSRSSKESSVFLSDDSPVGEGAGPHHTLLPGLDSYSPIPEGAVAEEHAWSGEHGEHFDLFNFDPAPMASGQSQQSSHSADYSPADDFFPNSDLSEGQLPAGPEGLDGMGTNMSNYSSSSLLSGAGKDSLVEHDEEFVQRQDSPRDNSERNLSLTDFVGDESPSPERLKNTGKRIPPTPMNSLVESSPSTEEPASLYTEDMTQKATDTGHMGPPQTHARCSSWWGGLEIDSKNIADAWSSSEQESVFQSPESWKEHKPSSIDRRASDSVFQPKSLEFTKSGPWESEFGQPELGSNDIQDKNEESLPFQNLPMEKSPLPNTSPQGTNHLIEDFASLWHSGRSPTAMPEPWGNPTDDGEPAAVAPFPAWSAFGKEDHDEALKNTWNLHPTSSKTPSVRDPNEWAMAKSGFAFSSSELLDNSPSEINNEAAPEIWGKKNNDSRDHIFAPGNPSSDLDHTWTNSKPPKEDQNGLVDPKTRGKVYEKVDSWNLFEENMKKGGSDVLVPWEDSFLSYKCSDYSASNLGEDSVPSPLDTNYSTSDSYTSPTFAGDEKETEHKPFAKEEGFESKDGNSTAEETDIPPQSLQQSSRNRISSGPGNLDMWASPHTDNSSEINTTHNLDENELKTEHTDGKNISMEDDVGESSQSSYDDPSMMQLYNETNRQLTLLHSSTNSRQTAPDSLDLWNRVILEDTQSTATISDMDNDLDWDDCSGGAAIPSDGQTEGYMAEGSEPETRFTVRQLEPWGLEYQEANQVDWELPASDEHTKDSAPSEHHTLNEKSGQLIANSIWDSVMRDKDMSSFMLPGSSHITDSEQRELPPEIPSHSANVKDTHSPDAPAASGTSESEALISHLDKQDTERETLQSDAASLATRLENPGYFPHPDPWKGHGDGQSESEKEAQGATDRGHLDEEEVIASGVENASGISEKGQSDQELSSLVASEHQEICIKSGKISSLAVTFSPQTEEPEEVLEYEEGSYNLDSRDVQTGMSADNLQPKDTHEKHLMSQRNSGETTETSDGMNFTKYVSVPEKDLEKTEECNFLEPENVGGGPPHRVPRSLDFGDVPIDSDVHVSSTCSEITKNLDVKGSENSLPGAGSSGNFDRDTISSEYTHSSASSPELNDSSVALSSWGQQPSSGYQEENQGNWSEQNHQESELITTDGQVEIVTKVKDLEKNRINEFEKSFDRKTPTFLEIWNDSVDGDSFSSLSSPETGKYSEHSGTHQESNLIASYQEKNEHDISATVQPEDARVISTSSGSDDDSVGGEESIEEEIQVANCHVAEDESRAWDSLNESNKFLVTADPKSENIYDYLDSSEPAENENKSNPFCDNQQSSPDPWTFSPLTETEMQITAVEKEKRSSPETGTTGDVAWQISPKASFPKNEDNSQLEMLGFSADSTEWWKASPQEGRLIESPFERELSDSSGVLEINSSVHQNASPWGVPVQGDIEPVETHYTNPFSDNHQSPFLEGNGKNSHEQLWNIQPRQPDPDADKFSQLVKLDQIKEKDSREQTFVSAAGDELTPETPTQEQCQDTMLPVCDHPDTAFTHAEENSCVTSNVSTNEGQETNQWEQEKSYLGEMTNSSIATENFPAVSSPTQLIMKPGSEWDGSTPSEDSRGTFVPDILHGNFQEGGQLASAAPDLWIDAKKPFSLKADGENPDILTHCEHDSNSQASDSPDICHDSEAKQETEKHLSACMGPEVESSELCLTEPEIDEEPIYEPGREFVPSNAELDSENATVLPPIGYQADIKGSSQPASHKGSPEPSEINGDNSTGLQVSEKGASPDMAPILEPVDRRIPRIENVATSIFVTHQEPTPEGDGSWISDSFSPESQPGARALFDGDPHLSTENPALVPDALLASDTCLDISEAAFDHSFSDASGLNTSTGTIDDMSKLTLSEGHPETPVDGDLGKQDICSSEASWGDFEYDVMGQNIDEDLLREPEHFLYGGDPPLEEDSLKQSLAPYTPPFDLSYLTEPAQSAETIEEAGSPEDESLGCRAAEIVLSALPDRRSEGNQAETKNRLPGSQLAVLHIREDPESVYLPVGAGSNILSPSNVDWEVETDNSDLPAGGDIGPPNGASKEISELEEEKTIPTKEPEQIKSEYKEERCTEKNEDRHALHMDYILVNREENSHSKPETCEERESIAELELYVGSKETGLQGTQLASFPDTCQPASLNERKGLSAEKMSSKSDTRSSFESPAQDQSWMFLGHSEVGDPSLDARDSGPGWSGKTVEPFSELGLGEGPQLQILEEMKPLESLALEEASGPVSQSQKSKSRGRAGPDAVTLQAVTHDNEWEMLSPQPVQKNMIPDTEMEEETEFLELGTRISRPNGLLSEDVGMDIPFEEGVLSPSAADMRPEPPNSLDLNDTHPRRIKLTAPNINLSLDQSEGSILSDDNLDSPDEIDINVDELDTPDEADSFEYTGHEDPTANKDSGQESESIPEYTAEEEREDNRLWRTVVIGEQEQRIDMKVIEPYRRVISHGGYYGDGLNAIIVFAACFLPDSSRADYHYVMENLFLYVISTLELMVAEDYMIVYLNGATPRRRMPGLGWMKKCYQMIDRRLRKNLKSFIIVHPSWFIRTILAVTRPFISSKFSSKIKYVNSLSELSGLIPMDCIHIPESIIKLDEELREASEAAKTSCLYNDPEMSSMEKDIDLKLKEKP

SEQ ID NO: 60426 - protein, 308 aa, Homo sapiens
MRPEPPNSLDLNDTHPRRIKLTAPNINLSLDQSEGSILSDDNLDSPDEIDINVDELDTPDEADSFEYTGHDPTANKDSGQESESIPEYTAEEEREDNRLWRTVVIGEQEQRIDMKVIEPYRRVISHGGKLRYYGDGLNAIIVFAACFLPDSSRADYHYVMENLFLYVISTLELMVAEDYMIVYLNGATPRRRMPGLGWMKKCYQMIDRRLRKNLKSFIIVHPSWFIRTILAVTRPFISSKFSSKIKYVNSLSELSGLIPMDCIHIPESIIKYDEERSYKRSVRTSCLYNDPEMSSMEKDIDLKLKEKP

SEQ ID NO: 60427 - protein, 337 aa, Homo sapiens
MNGLRNKQLLSEDVGMDIPFEEGVLSPSAADMRPEPPNSLDLNDTHPRRIKLTAPNINLSLDQSEGSILSDDNLDSPDEIDINVDELDTPDEADSFEYTGHDPTANKDSGQESESIPEYTAEEEREDNRLWRTVVIGEQEQRIDMKVIEPYRRVISHGGYYGDGLNAIIVFAACFLPDSSRADYHYVMENLFLYVISTLELMVAEDYMIVYLNGATPRRRMPGLGWMKKCYQMIDRRLRKNLKSFIIVHPSWFIRTILAVTRPFISSKFSSKIKYVNSLSELSGLIPMDCIHIPESIIKLDEELREASEAAKTSCLYNDPEMSSMEKDIDLKLKEKP

SEQ ID NO: 60428 - protein, 384 aa, Homo sapiens
MAGNAEPPPAGAACPQDRRSCSGRAGGDRVWEDGEHPAKKLKSGGDEERREKPPKRKIVLLMAYSGKGYHGMQRNVGSSQFKTIEDDLVSALVRSGCIPENHGEDMRKMSFQRCARTDKGVSAAGQVVSLKVWLIDDILEKINSHLPSHIRILGLKRVTGGFNSKNRCDARTYCYLLPTFAFAHKDRDVQDETYRLSAETLQQVNRLLACYKGTHNFHNFTSQKGPQDPSACRYILEMYCEEPFVREGLEFAVIRVKGQSFMMHQIRKMVGLVVAIVKGYAPESVLERSWGTEKVDVPKAPGLGLVLERVHFEKYNQRFGNDGLHEPLDWAQEEGKVAAFKEEHIYPTIIGTERDERSMAQWLSTLPIHNFSATALTAGGTGAK

SEQ ID NO: 60429 - protein, 427 aa, Homo sapiens
MGLQLRALLGAFGRWTLRLGPRPSCSPRMAGNAEPPPAGAACPQDRRSCSGRAGGDRVWEDGEHPAKKLKSGGDEERREKPPKRKIVLLMAYSGKGYHGMQRNVGSSQFKTIEDDLVSALVRSGCIPENHGEDMRKMSFQRCARTDKGVSAAGQVVSLKVWLIDDILEKINSHLPSHIRILGLKRVTGGFNSKNRCDARTYCYLLPTFAFAHKDRDVQDETYRLSAETLQQVNRLLACYKGTHNFHNFTSQKGPQDPSACRYILEMYCEEPFVREGLEFAVIRVKGQSFMMHQIRKMVGLVVAIVKGYAPESVLERSWGTEKVDVPKAPGLGLVLERVHFEKYNQRFGNDGLHEPLDWAQEEGKVAAFKEEHIYPTIIGTERDERSMAQWLSTLPIHNFSATALTAGGTGAKVPSPLEGSEGDGDTD

SEQ ID NO: 60430 - protein, 399 aa, Homo sapiens
MAGNAEPPPAGAACPQDRRSCSGRAGGDRVWEDGEHPAKKLKSGGDEERREKPPKRKIVLLMAYSGKGYHGMQRNVGSSQFKTIEDDLVSALVRSGCIPENHGEDMRKMSFQRCARTDKGVSAAGQVVSLKVWLIDDILEKINSHLPSHIRILGLKRVTGGFNSKNRCDARTYCYLLPTFAFAHKDRDVQDETYRLSAETLQQVNRLLACYKGTHNFHNFTSQKGPQDPSACRYILEMYCEEPFVREGLEFAVIRVKGQSFMMHQIRKMVGLVVAIVKGYAPESVLERSWGTEKVDVPKAPGLGLVLERVHFEKYNQRFGNDGLHEPLDWAQEEGKVAAFKEEHIYPTIIGTERDERSMAQWLSTLPIHNFSATALTAGGTGAKVPSPLEGSEGDGDTD

SEQ ID NO: 60431 - protein, 399 aa, Homo sapiens; identical to SEQ ID NO: 60430

SEQ ID NO: 60432 - protein, 154 aa, Homo sapiens
MAGNAEPPPAGAACPQDRRSCSGRAGGDRVWEDGEHPAKKLKSGGDEERREKPPKRKIVLLMAYSGKGYHGMQRNVGSSQFKTIEDDLVSALVRSGCIPENHGEDMRKMSFQRCARTDKGVSAAGQVVSLKVWLIDDILEKINSHLPSHIRILG

SEQ ID NO: 60433 - protein, 205 aa, Homo sapiens
MSKGRAEAAAGAAGILLRYLQEQNRPYSSQDVFGNLQREHGLGKAVVVKTLEQLAQQGKIKEKMYGKQKIYFADQDQFDMVSDADLQVLDGKIVALTAKVQSLQQSCRYMEAEMQKEIQELKKECAGYRERLKNIKAATNHVTPEEKEQVYRERQKYCKEWRKRKRMATELSDAILEGYPKSKKQFFEEVGIETDEDYNVTLPDP

SEQ ID NO: 60434 - protein, 217 aa, Homo sapiens
MSKGRAEAAAGAAGILLRYLQEQNRPYSSQDVFGNLQREHGLGKAVVVKTLEQLAQQGKIKEKMYGKQKIYFADQDQFDMVSDADLQVLDGKIVALTAKVQSLQQSCRYMEAELKELSSALTTPEMQKEIQELKKECAGYRERLKNIKAATNHVTPEEKEQVYRERQKYCKEWRKRKRMATELSDAILEGYPKSKKQFFEEVGIETDEDYNVTLPDP

SEQ ID NO: 60435 - protein, 154 aa, Homo sapiens
MYGKQKIYFADQDQFDMVSDADLQVLDGKIVALTAKVQSLQQSCRYMEAELKELSSALTTPEMQKEIQELKKECAGYRERLKNIKAATNHVTPEEKEQVYRERQKYCKEWRKRKRMATELSDAILEGYPKSKKQFFEEVGIETDEDYNVTLPDP

SEQ ID NO: 60436 - protein, 304 aa, Homo sapiens
MFSVLSYGRLVARAVLGGLSQTDPRAGGGGGGDYGLVTAGCGFGKDFRKGLLKKGACYGDDACFVARHRSADVLGVADGVGGWRDYGVDPSQFSGTLMRTCERLVKEGRFVPSNPIGILTTSYCELLQNKVPLLGSSTACIVVLDRTSHRLHTANLGDSGFLVVRGGEVVHRSDEQQHYFNTPFQLSIAPPEAEGVVLSDSPDAADSTSFDVQLGDIILTATDGLFDNMPDYMILQELKKLKNSNYESIQQTARSIAEQAHELAYDPNYMSPFAQFACDNGLNVRGGKPDDITVLLSIVAEYTD

SEQ ID NO: 60437 - protein, 581 aa, Homo sapiens
MAVRQALGRGLQLGRALLLRFTGKPGRAYGLGRPGPAAGCVRGERPGWAAGPGAEPRRVGLGLPNRLRFFRQSVAGLAARLQRQFVVRAWGCAGPCGRAVFLAFGLGLGLIEEKQAESRRAVSACQEIQAIFTQKSKPGPDPLDTRRLQGFRLEEYLIGQSIGKGCSAAVYEATMPTLPQNLEVTKSTGLLPGRGPGTSAPGEGQERAPGAPAFPLAIKMMWNISAGSSSEAILNTMSQELVPASRVALAGEYGAVTYRKSKRGPKQLAPHPNIIRVLRAFTSSVPLLPGALVDYPDVLPSRLHPEGLGHGRTLFLVMKNYPCTLRQYLCVNTPSPRLAAMMLLQLLEGVDHLVQQGIAHRDLKSDNILVELDPDGCPWLVIADFGCCLADESIGLQLPFSSWYVDRGGNGCLMAPEVSTARPGPRAVIDYSKADAWAVGAIAYEIFGLVNPFYGQGKAHLESRSYQEAQLPALPESVPPDVRQLVRALLQREASKRPSARVAANVLHLSLWGEHILALKNLKLDKMVGWLLQQSAATLLANRLTEKCCVETKMKMLFLANLECETLCQAALLLCSWRAAL

SEQ ID NO: 60438 - protein, 130 aa, Homo sapiens
MAAVLGALGATRRLLAALRGQSLGLAAMSSGTHRLTAEERNQAILDLKAAGWSELSERDAIYKEFSFHNFNQAFGFMSRVALQAEKMNHHPEWFNVYNKVQITLTSHDCGELTKKDVKLAKFIEKAAASV

SEQ ID NO: 60439 - protein, 130 aa, Homo sapiens; identical to SEQ ID NO: 60438

SEQ ID NO: 60440 - protein, 1070 aa, Homo sapiens
MGAARGSPARPRRLPLLSVLLLPLLGGTQTAIVFIKQPSSQDALQGRRALLRCEVEAPGPVHVYWLLDGAPVQDTERRFAQGSSLSFAAVDRLQDSGTFQCVARDDVTGEEARSANASFNIKWIEAGPVVLKHPASEAEIQPQTQVTLRCHIDGHPRPTYQWFRDGTPLSDGQSNHTVSSKERNLTLRPAGPEHSGLYSCCAHSAFGQACSSQNFTLSIADESFARVVLAPQDVVVARYEEAMFHCQFSAQPPPSLQWLFEDETPITNRSRPPHLRRATVFANGSLLLTQVRPRNAGIYRCIGQGQRGPPIILEATLHLAEIEDMPLFEPRVFTAGSEERVTCLPPKGLPEPSVWWEHAGVRLPTHGRVYQKGHELVLANIAESDAGVYTCHAANLAGQRRQDVNITVATVPSWLKKPQDSQLEEGKPGYLDCLTQATPKPTVVWYRNQMLISEDSRFEVFKNGTLRINSVEVYDGTWYRCMSSTPAGSIEAQARVQVLEKLKFTPPPQPQQCMEFDKEATVPCSATGREKPTIKWERADGSSLPEWVTDNAGTLHFARVTRDDAGNYTCIASNGPQGQIRAHVQLTVAVFITFKVEPERTTVYQGHTALLQCEAQGDPKPLIQWKGKDRILDPTKLGPRMHIFQNGSLVIHDVAPEDSGRYTCIAGNSCNIKHTEAPLYVVDKPVPEESEGPGSPPPYKMIQTIGLSVGAAVAYIIAVLGLMFYCKKRCKAKRLQKQPEGEEPEMECLNGGPLQNGQPSAEIQEEVALTSLGSGPAATNKRHSTSDKMHFPRSSLQPITTLGKSEFGEVFLAKAQGLEEGVAETLVLVKSLQSKDEQQQLDFRRELEMFGKLNHANVVRLLGLCREAEPHYMVLEYVDLGDLKQFLRISKSKDEKLKSQPLSTKQKVALCTQVALGMEHLSNNRFVHKDLAARNCLVSAQRQVKVSALGLSKDVYNSEYYHFRQAWVPLRWMSPEAILEGDFSTKSDVWAFGVLMWEVFTHGEMPHGGQADDEVLADLQAGKARLPQPEGCPSKLYRLMQRCWALSPKDRPSFSEIASALGDSTVDSKP

SEQ ID NO: 60441 - protein, 396 aa, Homo sapiens
MPLFEPRVFTAGSEERVTCLPPKGLPEPSVWWEHAGVRLPTHGRVYQKGHELVLANIAESDAGVYTCHAANLAGQRRQDVNITVATVPSWLKKPQDSQLEEGKPGYLDCLTQATPKPTVVWYRNQMLISEDSRFEVFLAKAQGLEEGVAETLVLVKSLQSKDEQQQLDFRRELEMFGKLNHANVVRLLGLCREAEPHYMVLEYVDLGDLKQFLRISKSKDEKLKSQPLSTKQKVALCTQVALGMEHLSNNRFVHKDLAARNCLVSAQRQVKVSALGLSKDVYNSEYYHFRQAWVPLRWMSPEAILEGDFSTKSDVWAFGVLMWEVFTHGEMPHGGQADDEVLADLQAGKARLPQPEGCPSKLYRLMQRCWALSPKDRPSFSEIASALGDSTVDSKP

SEQ ID NO: 60442 - protein, 1030 aa, Homo sapiens
MGAARGSPARPRRLPLLSVLLLPLLGGTQTAIVFIKQPSSQDALQGRRALLRCEVEAPGPVHVYWLLDGAPVQDTERRFAQGSSLSFAAVDRLQDSGTFQCVARDDVTGEEARSANASFNIKWIEAGPVVLKHPASEAEIQPQTQVTLRCHIDGHPRPTYQWFRDGTPLSDGQSNHTVSSKERNLTLRPAGPEHSGLYSCCAHSAFGQACSSQNFTLSIADESFARVVLAPQDVVVARYEEAMFHCQFSAQPPPSLQWLFEDETPITNRSRPPHLRRATVFANGSLLLTQVRPRNAGIYRCIGQGQRGPPIILEATLHLAEIEDMPLFEPRVFTAGSEERVTCLPPKGLPEPSVWWEHAGVRLPTHGRVYQKGHELVLANIAESDAGVYTCHAANLAGQRRQDVNITVATVPSWLKKPQDSQLEEGKPGYLDCLTQATPKPTVVWYRNQMLISEDSRFEVFKNGTLRINSVEVYDGTWYRCMSSTPAGSIEAQARVQVLDGSSLPEWVTDNAGTLHFARVTRDDAGNYTCIASNGPQGQIRAHVQLTVAVFITFKVEPERTTVYQGHTALLQCEAQGDPKPLIQWKGKDRILDPTKLGPRMHIFQNGSLVIHDVAPEDSGRYTCIAGNSCNIKHTEAPLYVVDKPVPEESEGPGSPPPYKMIQTIGLSVGAAVAYIIAVLGLMFYCKKRCKAKRLQKQPEGEEPEMECLNGGPLQNGQPSAEIQEEVALTSLGSGPAATNKRHSTSDKMHFPRSSLQPITTLGKSEFGEVFLAKAQGLEEGVAETLVLVKSLQSKDEQQQLDFRRELEMFGKLNHANVVRLLGLCREAEPHYMVLEYVDLGDLKQFLRISKSKDEKLKSQPLSTKQKVALCTQVALGMEHLSNNRFVHKDLAARNCLVSAQRQVKVSALGLSKDVYNSEYYHFRQAWVPLRWMSPEAILEGDFSTKSDVWAFGVLMWEVFTHGEMPHGGQADDEVLADLQAGKARLPQPEGCPSKLYRLMQRCWALSPKDRPSFSEIASALGDSTVDSKP

SEQ ID NO: 60443 - protein, 940 aa, Homo sapiens
MGAARGSPARPRRLPLLSVLLLPLLGGTQTAIVFIKQPSSQDALQGRRALLRCEVEAPGPVHVYWLLDGAPVQDTERRFAQGSSLSFAAVDRLQDSGTFQCVARDDVTGEEARSANASFNIKWIEAGPVVLKHPASEAEIQPQTQVTLRCHIDGHPRPTYQWFRDGTPLSDGQSNHTVSSKERNLTLRPAGPEHSGLYSCCAHSAFGQACSSQNFTLSIADESFARVVLAPQDVVVARYEEAMFHCQFSAQPPPSLQWLFEDETPITNRSRPPHLRRATVFANGSLLLTQVRPRNAGIYRCIGQGQRGPPIILEATLHLAEIEDMPLFEPRVFTAGSEERVTCLPPKGLPEPSVWWEHAGVRLPTHGRVYQKGHELVLANIAESDAGVYTCHAANLAGQRRQDVNITVANGSSLPEWVTDNAGTLHFARVTRDDAGNYTCIASNGPQGQIRAHVQLTVAVFITFKVEPERTTVYQGHTALLQCEAQGDPKPLIQWKGKDRILDPTKLGPRMHIFQNGSLVIHDVAPEDSGRYTCIAGNSCNIKHTEAPLYVVDKPVPEESEGPGSPPPYKMIQTIGLSVGAAVAYIIAVLGLMFYCKKRCKAKRLQKQPEGEEPEMECLNGGPLQNGQPSAEIQEEVALTSLGSGPAATNKRHSTSDKMHFPRSSLQPITTLGKSEFGEVFLAKAQGLEEGVAETLVLVKSLQSKDEQQQLDFRRELEMFGKLNHANVVRLLGLCREAEPHYMVLEYVDLGDLKQFLRISKSKDEKLKSQPLSTKQKVALCTQVALGMEHLSNNRFVHKDLAARNCLVSAQRQVKVSALGLSKDVYNSEYYHFRQAWVPLRWMSPEAILEGDFSTKSDVWAFGVLMWEVFTHGEMPHGGQADDEVLADLQAGKARLPQPEGCPSKLYRLMQRCWALSPKDRPSFSEIASALGDSTVDSKP

SEQ ID NO: 60444 - protein, 1014 aa, Homo sapiens
MGAARGSPARPRRLPLLSVLLLPLLGGTQTAIVFIKQPSSQDALQGRRALLRCEVEAPGPVHVYWLLDGAPVQDTERRFAQGSSLSFAAVDRLQDSGTFQCVARDDVTGEEARSANASFNIKWIEAGPVVLKHPASEAEIQPQTQVTLRCHIDGHPRPTYQWFRDGTPLSDGQSNHTVSSKERNLTLRPAGPEHSGLYSCCAHSAFGQACSSQNFTLSIADESFARVVLAPQDVVVARYEEAMFHCQFSAQPPPSLQWLFEDETPITNRSRPPHLRRATVFANGSLLLTQVRPRNAGIYRCIGQGQRGPPIILEATLHLAEIEDMPLFEPRVFTAGSEERVTCLPPKGLPEPSVWWEHAGVRLPTHGRVYQKGHELVLANIAESDAGVYTCHAANLAGQRRQDVNITVATVPSWLKKPQDSQLEEGKPGYLDCLTQATPKPTVVWYRNQMLISEDSRFEVFKNGTLRINSVEVYDGTWYRCMSSTPAGSIEAQARVQVLEKLKFTPPPQPQQCMEFDKEATVPCSATGREKPTIKWERADGSSLPEWVTDNAGTLHFARVTRDDAGNYTCIASNGPQGQIRAHVQLTVAVFITFKVEPERTTVYQGHTALLQCEAQGDPKPLIQWKDKPVPEESEGPGSPPPYKMIQTIGLSVGAAVAYIIAVLGLMFYCKKRCKAKRLQKQPEGEEPEMECLNGGPLQNGQPSAEIQEEVALTSLGSGPAATNKRHSTSDKMHFPRSSLQPITTLGKSEFGEVFLAKAQGLEEGVAETLVLVKSLQSKDEQQQLDFRRELEMFGKLNHANVVRLLGLCREAEPHYMVLEYVDLGDLKQFLRISKSKDEKLKSQPLSTKQKVALCTQVALGMEHLSNNRFVHKDLAARNCLVSAQRQVKVSALGLSKDVYNSEYYHFRQAWVPLRWMSPEAILEGDFSTKSDVWAFGVLMWEVFTHGEMPHGGQADDEVLADLQAGKARLPQPEGCPSKLYRLMQRCWALSPKDRPSFSEIASALGDSTVDSKP

SEQ ID NO: 60445 - protein, 403 aa, Homo sapiens
MGSFLSGEKRPSAPTVGSAMEKKEFPTPPGRVGPGTQTAIVFIKQPSSQDALQGRRALLRCEVEAPGPVHVYWLLDGAPVQDTERRFAQGSSLSFAAVDRLQDSGTFQCVARDDVTGEEARSANASFNIKWIEAGPVVLKHPASEAEIQPQTQVTLRCHIDGHPRPTYQWFRDGTPLSDGQSNHTVSSKERNLTLRPAGPEHSGLYSCCAHSAFGQACSSQNFTLSIADESFARVVLAPQDVVVARYEEAMFHCQFSAQPPPSLQWLFEDETPITNRSRPPHLRRATVFANGSLLLTQVRPRNAGIYRCIGQGQRGPPIILEATLHLAEIEDMPLFEPRVFTAGSEERVTCLPPMAGSTRRATSWCWPILLKVMLVSTPATRPTWLVSGDRMSTSLWPLCPPG

SEQ ID NO: 60446 - protein, 269 aa, Homo sapiens
FSAQPPPSLQWLFEDETPITNRSRPPHLRRATVFANGSLLLTQVRPRNAGIYRCIGQGQRGPPIILEATLHLAEIEDMPLFEPRVFTAGSEERVTCLPPKGLPEPSVWWEHAGVRLPTHGRVYQKGHELVLANIAESDAGVYTCHAANLAGQRRQDVNITVASEHLCPEGQGEVEGNTGLGVMDRGFPAVPSWLKKPQDSQLEEGKPGYLDCLTQATPKPTVVWYRNQMLISEDSRFEVFKNGTLRINSVEVYDGTWYRCMSSTPAGSI

SEQ ID NO: 60447 - protein, 147 aa, Homo sapiens
MGATGLGFLLSWRQDNLNGTDCQGCNILYFSETTGSMCSELSLNRGLEARRKKDLKDSFLWRYGKVGCISLPLREMTAWINPPQISEIFQGYHQRVHGADALSLQTNSLRSRLSSQCLGQSFLLRTLERGRGFRALGDICGHVHEED

SEQ ID NO: 60448 - protein, 71 aa, Homo sapiens
MGATGLGFLLSWRQDNLNGTDCQGCNILYFSETTGSMCSELSLNRGLEARRKKDLKDSFLWRDGVSPCLPC

SEQ ID NO: 60449 - protein, 147 aa, Homo sapiens; identical to SEQ ID NO: 60447

SEQ ID NO: 60450 - protein, 71 aa, Homo sapiens; identical to SEQ ID NO: 60448

SEQ ID NO: 60451 - protein, 1186 aa, Homo sapiens
MSVACVLKRKAVLWQDSFSPHLKHHPQEPANPNMPVVLTSGTGSQAQPQPAANQALAAGTHSSPVPGSIGVAGRSQDDAMVDYFFQRQHGEQLGGGGSGGGGYNNSKHRWPTGDNIHAEHQVRSMDELNHDFQALALEGRAMGEQLLPGKKFWETDESSKDGPKGIFLGDQWRDSAWGTSDHSVSQPIMVQRRPGQSFHVNSEVNSVLSPRSESGGLGVSMVEYVLSSSPGDSCLRKGGFGPRDADSDENDKGEKKNKGTFDGDKLGDLKEEGDVMDKTNGLPVQNGIDADVKDFSRTPGNCQNSANEVDLLGPNQNGSEGLAQLTSTNGAKPVEDFSNMESQSVPLDPMEHVGMEPLQFDYSGTQVPVDSAAATVGLFDYNSQQQLFQRPNALAVQQLTAAQQQQYALAAAHQPHIGLAPAAFVPNPYIISAAPPGTDPYTAGLAAAATLGPAVVPHQYYGVTPWGVYPASLFQQQAAAAAAATNSANQQTTPQAQQGQQQVLRGGASQRPLTPNQNQQGQQTDPLVAAAAVNSALAFGQGLAAGMPGYPVLAPAAYYDQTGALVVNAGARNGLGAPVRLVAPAPVIISSSAAQAAVAAAAASANGAAGGLAGTTNGPFRPLGTQQPQPQPQQQPNNNLASSSFYGNNSLNSNSQSSSLFSQGSAQPANTSLGFGSSSSLGATLGSALGGFGTAVANSNTGSGSRRDSLTGSSDLYKRTSSSLTPIGHSFYNGLSFSSSPGPVGMPLPSQGPGHSQTPPPSLSSHGSSSSLNLGGLTNGSGRYISAAPGAEAKYRSASSASSLFSPSSTLFSSSRLRYGMSDVMPSGRSRLLEDFRNNRYPNLQLREIAGHIMEFSQDQHGSRFIQLKLERATPAERQLVFNEILQAAYQLMVDVFGNYVIQKFFEFGSLEQKLALAERIRGHVLSLALQMYGCRVIQKALEFIPSDQQNEMVRELDGHVLKCVKDQNGNHVVQKCIECVQPQSLQFIIDAFKGQVFALSTHPYGCRVIQRILEHCLPDQTLPILEELHQHTEQLVQDQYGNYVIQHVLEHGRPEDKSKIVAEIRGNVLVLSQHKFASNVVEKCVTHASRTERAVLIDEVCTMNDGPHSALYTMMKDQYANYVVQKMIDVAEPGQRKIVMHKIRPHIATLRKYTYGKHILAKLEKYYMKNGVDLGPICGPPNGII

SEQ ID NO: 60452 - protein, 926 aa, Homo sapiens
MSVACVLKRKAVLWQDSFSPHLKHHPQEPANPNMPVVLTSGTGSQAQPQPAANQALAAGTHSSPVPGSIGVAGRSQDDAMVDYFFQRQHGEQLGGGGSGGGGYNNSKHRWPTTVGLFDYNSQQQLFQRPNALAVQQLTAAQQQQYALAAAHQPHIGLAPAAFVPNPYIISAAPPGTDPYTAGLAAAATLGPAVVPHQYYGVTPWGVYPASLFQQQAAAAAAATNSANQQTTPQAQQGQQQVLRGGASQRPLTPNQNQQGQQTDPLVAAAAVNSALAFGQGLAAGMPGYPVLAPAAYYDQTGALVVNAGARNGLGAPVRLVAPAPVIISSSAAQAAVAAAAASANGAAGGLAGTTNGPFRPLGTQQPQPQPQQQPNNNLASSSFYGNNSLNSNSQSSSLFSQGSAQPANTSLGFGSSSSLGATLGSALGGFGTAVANSNTGSGSRRDSLTGSSDLYKRTSSSLTPIGHSFYNGLSFSSSPGPVGMPLPSQGPGHSQTPPPSLSSHGSSSSLNLGGLTNGSGRYISAAPGAEAKYRSASSASSLFSPSSTLFSSSRLRYGMSDVMPSGRSRLLEDFRNNRYPNLQLREIAGHIMEFSQDQHGSRFIQLKLERATPAERQLVFNEILQAAYQLMVDVFGNYVIQKFFEFGSLEQKLALAERIRGHVLSLALQMYGCRVIQKALEFIPSDQQVINEMVRELDGHVLKCVKDQNGNHVVQKCIECVQPQSLQFIIDAFKGQVFALSTHPYGCRVIQRILEHCLPDQTLPILEELHQHTEQLVQDQYGNYVIQHVLEHGRPEDKSKIVAEIRGNVLVLSQHKFASNVVEKCVTHASRTERAVLIDEVCTMNDGPHSALYTMMKDQYANYVVQKMIDVAEPGQRKIVMHKIRPHIATLRKYTYGKHILAKLEKYYMKNGVDLGPICGPPNGII

SEQ ID NO: 60453 - protein, 1044 aa, Homo sapiens
MSVACVLKRKAVLWQDSFSPHLKHHPQEPANPNMPVVLTSGTGSQAQPQPAANQALAAGTHSSPVPGSIGVAGRSQDDAMVDYFFQRQHGEQLGGGGSGGGGYNNSKHRWPTGDNIHAEHQVRSMDELNHDFQALALEGRAMGEGPRDADSDENDKGEKKNKGTFDGDKLGDLKEEGDVMDKTNGLPVQNGIDADVKDFSRTPGNCQNSANEVDLLGPNQNGSEGLAQLTSTNGAKPVEDFSNMESQSVPLDPMEHVGMEPLQFDYSGTQVPVDSAAATVGLFDYNSQQQLFQRPNALAVQQLTAAQQQQYALAAAHQPHIGLAPAAFVPNPYIISAAPPGTDPYTAGLAAAATLGPAVVPHQYYGVTPWGVYPASLFQQQAAAAAAATNSANQQTTPQAQQGQQQVLRGGASQRPLTPNQNQQGQQTDPLVAAAAVNSALAFGQGLAAGMPAVAAAAASANGAAGGLAGTTNGPFRPLGTQQPQPQPQQQPNNNLASSSFYGNNSLNSNSQSSSLFSQGSAQPANTSLGFGSSSSLGATLGSALGGFGTAVANSNTGSGSRRDSLTGSSDLYKRTSSSLTPIGHSFYNGLSFSSSPGPVGMPLPSQGPGHSQTPPPSLSSHGSSSSLNLGGLTNGSGRYISAAPGAEAKYRSASSASSLFSPSSTLFSSSRLRYGMSDVMPSGRSRLLEDFRNNRYPNLQLREIAGHIMEFSQDQHGSRFIQLKLERATPAERQLVFNEILQAAYQLMVDVFGNYVIQKFFEFGSLEQKLALAERIRGHVLSLALQMYGCRVIQKALEFIPSDQQVINEMVRELDGHVLKCVKDQNGNHVVQKCIECVQPQSLQFIIDAFKGQVFALSTHPYGCRVIQRILEHCLPDQTLPILEELHQHTEQLVQDQYGNYVIQHVLEHGRPEDKSKIVAEIRGNVLVLSQHKFASNVVEKCVTHASRTERAVLIDEVCTMNDGPHSALYTMMKDQYANYVVQKMIDVAEPGQRKIVMHKIRPHIATLRKYTYGKHILAKLEKYYMKNGVDLGPICGPPNGII

SEQ ID NO: 60454 - protein, 1188 aa, Homo sapiens
MSVACVLKRKAVLWQDSFSPHLKHHPQEPANPNMPVVLTSGTGSQAQPQPAANQALAAGTHSSPVPGSIGVAGRSQDDAMVDYFFQRQHGEQLGGGGSGGGGYNNSKHRWPTGDNIHAEHQVRSMDELNHDFQALALEGRAMGEQLLPGKKFWETDESSKDGPKGIFLGDQWRDSAWGTSDHSVSQPIMVQRRPGQSFHVNSEVNSVLSPRSESGGLGVSMVEYVLSSSPGDSCLRKGGFGPRDADSDENDKGEKKNKGTFDGDKLGDLKEEGDVMDKTNGLPVQNGIDADVKDFSRTPGNCQNSANEVDLLGPNQNGSEGLAQLTSTNGAKPVEDFSNMESQSVPLDPMEHVGMEPLQFDYSGTQVPVDSAAATVGLFDYNSQQQLFQRPNALAVQQLTAAQQQQYALAAAHQPHIGLAPAAFVPNPYIISAAPPGTDPYTAGLAAAATLGPAVVPHQYYGVTPWGVYPASLFQQQAAAAAAATNSANQQTTPQAQQGQQQVLRGGASQRPLTPNQNQQGQQTDPLVAAAAVNSALAFGQGLAAGMPGYPVLAPAAYYDQTGALVVNAGARNGLGAPVRLVAPAPVIISSSAAQAAVAAAAASANGAAGGLAGTTNGPFRPLGTQQPQPQPQQQPNNNLASSSFYGNNSLNSNSQSSSLFSQGSAQPANTSLGFGSSSSLGATLGSALGGFGTAVANSNTGSGSRRDSLTGSSDLYKRTSSSLTPIGHSFYNGLSFSSSPGPVGMPLPSQGPGHSQTPPPSLSSHGSSSSLNLGGLTNGSGRYISAAPGAEAKYRSASSASSLFSPSSTLFSSSRLRYGMSDVMPSGRSRLLEDFRNNRYPNLQLREIAGHIMEFSQDQHGSRFIQLKLERATPAERQLVFNEILQAAYQLMVDVFGNYVIQKFFEFGSLEQKLALAERIRGHVLSLALQMYGCRVIQKALEFIPSDQQVINEMVRELDGHVLKCVKDQNGNHVVQKCIECVQPQSLQFIIDAFKGQVFALSTHPYGCRVIQRILEHCLPDQTLPILEELHQHTEQLVQDQYGNYVIQHVLEHGRPEDKSKIVAEIRGNVLVLSQHKFASNVVEKCVTHASRTERAVLIDEVCTMNDGPHSALYTMMKDQYANYVVQKMIDVAEPGQRKIVMHKIRPHIATLRKYTYGKHILAKLEKYYMKNGVDLGPICGPPNGII

SEQ ID NO: 60455 - protein, 1162 aa, Homo sapiens
MSVACVLKRKAVLWQDSFSPHLKHHPQEPANPNMPVVLTSGTGSQAQPQPAANQALAAGTHSSPVPGSIGVAGRSQDDAMVDYFFQRQHGEQLGGGGSGGGGYNNSKHRWPTGDNIHAEHQVRSMDELNHDFQALALEGRAMGEQLLPGKKFWETDESSKDGPKGIFLGDQWRDSAWGTSDHSVSQPIMVQRRPGQSFHVNSEVNSVLSPRSESGGLGVSMVEYVLSSSPGDSCLRKGGFGPRDADSDENDKGEKKNKGTFDGDKLGDLKEEGDVMDKTNGLPVQNGIDADVKDFSRTPGNCQNSANEVDLLGPNQNGSEGLAQLTSTNGAKPVEDFSNMESQSVPLDPMEHVGMEPLQFDYSGTQVPVDSAAATVGLFDYNSQQQLFQRPNALAVQQLTAAQQQQYALAAAHQPHIAGLAPAAFVPNPYIISAAPPGTDPYTAGLAAAATLGPAVVPHQYYGVTPWGVYPASLFQQQAAAAAAATNSANQQTTPQAQQGQQQVLRGGASQRPLTPNQNQQGQQTDPLVAAAAVNSALAFGQGLAAGMPGYPVLAPAAYYDQTGALVVNAGARNGLGAPVRLVAPAPVIISSSAAQAGTQQPQPQPQQQPNNNLASSSFYGNNSLNSNSQSSSLFSQGSAQPANTSLGFGSSSSLGATLGSALGGFGTAVANSNTGSGSRRDSLTGSSDLYKRTSSSLTPIGHSFYNGLSFSSSPGPVGMPLPSQGPGHSQTPPPSLSSHGSSSSLNLGGLTNGSGRYISAAPGAEAKYRSASSASSLFSPSSTLFSSSRLRYGMSDVMPSGRSRLLEDFRNNRYPNLQLREIAGHIMEFSQDQHGSRFIQLKLERATPAERQLVFNEILQAAYQLMVDVFGNYVIQKFFEFGSLEQKLALAERIRGHVLSLALQMYGCRVIQKALEFIPSDQQVINEMVRELDGHVLKCVKDQNGNHVVQKCIECVQPQSLQFIIDAFKGQVFALSTHPYGCRVIQRILEHCLPDQTLPILEELHQHTEQLVQDQYGNYVIQHVLEHGRPEDKSKIVAEIRGNVLVLSQHKFASNVVEKCVTHASRTERAVLIDEVCTMNDGPHSALYTMMKDQYANYVVQKMIDVAEPGQRKIVMHKIRPHIATLRKYTYGKHILAKLEKYYMKNGVDLGPICGPPNGII

SEQ ID NO: 60456 - protein, 96 aa, Homo sapiens
MSVACVLKRKAVLWQDSFSPHLKHHPQEPANPNMPVVLTSGTGSQAQPQPAANQALAAGTHSSPVPGSIGVAGRSQDDAMVDYFFQRQHGEQLGGG

SEQ ID NO: 60457 - protein, 516 aa, Homo sapiens
MSVACVLKRKAVLWQDSFSPHLKHHPQEPANPNMPVVLTSGTGSQAQPQPAANQALAAGTHSSPVPGSIGVAGRSQDDAMVDYFFQRQHGEQLGGGGSGGGGYNNSKHRWPTGDNIHAEHQVRSMDELNHDFQALALEGRAMGEQLLPGKKFWETDESSKDGPKGIFLGDQWRDSAWGTSDHSVSQPIMVQRRPGQSFHVNSEVNSVLSPRSESGGLGVSMVEYVLSSSPGDSCLRKGGFGPRDADSDENDKGEKKNKGTFDGDKLGDLKEEGDVMDKTNGLPVQNGIDADVKDFSRTPGNCQNSANEVDLLGPNQNGSEGLAQLTSTNGAKPVEDFSNMESQSVPLDPMEHVGMEPLQFDYSGTQVPVDSAAATVGLFDYNSQQQLFQRPNALAVQQLTAAQQQQYALAAAHQPHIGLAPAAFVPNPYIISAAPPGTDPYTAGLAAAATLGPAVVPHQYYGVTPWGVYPASLFQQQAAAAAAATNSANQQTTPQAQQGQQQTEFCFCCPGWSAMV

SEQ ID NO: 60458 - protein, 987 aa, Homo sapiens
MNHDFQALALESRGMGELLPTKKFWEPDDSTKDGQKGIFLGDDEWRETAWGASHHSMSQPIMVQRRSGQGFHGNSEVNAILSPRSESGGLGVSMVEYVLSSSPADKLDSRFRKGNFGTRDAETDGPEKGDQKGKASPFEEDQNRDLKQGDDDDSKINGRGLPNGMDADCKDFNRTPGSRQASPTEVVERLGPNTNPSEGLGPLPNPTANKPLVEEFSNPETQNLDAMEQVGLESLQFDYPGNQVPMDSSGATVGLFDYNSQQQLFQRTNALTVQQLTAAQQQQYALAAAQQPHIAGVFSAGLAPAAFVPNPYIISAAPPGTDPYTAAGLAAAATLAGPAVVPPQYYGVPWGVYPANLFQQQAAAAANNTASQQAASQAQPGQQQVLRAGAGQRPLTPNQGQQGQQAESLAAAAAANPTLAFGQGLATGMPGYQVLAPTAYYDQTGALVVGPGARTGLGAPVRLMAPTPVLISSAAAQAAAAAAAGGTASSLTGSTNGLFRPIGTQPPQQQQQQPSTNLQSNSFYGSSSLTNSSQSSSLFSHGPGQPGSTSLGFGSGNSLGAAIGSALSGFGSSGGLTNGSGRYISAAPGAEAKYRSASSTSSLFSSSSQLFPPSRLRYNRSDIMPSGRSRLLEDFRNNRFPNLQLRDLIGHIVEFSQDQHGSRFIQQKLERATPAERQMVFNEILQAAYQLMTDVFGNYVIQKFFEFGSLDQKLALATRIRGHVLPLALQMYGCRVIQKALESISSDQQVISEMVKELDGHVLKCVKDQNGNHVVQKCIECVQPQSLQFIIDAFKGQVFVLSTHPYGCRVIQRILEHCTAEQTLPILEELHQHTEQLVQDQYGNYVIQHVLEHGRPEDKSKIVSEIRGKVLALSQHKFASNVVEKCVTHASRAERALLIDEVCCQNDGPHSALYTMMKDQYANYVVQKMIDMAEPAQRKIIMHKIRPHITTLRKYTYGKHILAKLEKYYLKNSPDLGPIGGPPNGML

SEQ ID NO: 60459 - protein, 1064 aa, Homo sapiens
MNHDFQALALESRGMGELLPTKKFWEPDDSTKDGQKGIFLGDDEWRETAWGASHHSMSQPIMVQRRSGQGFHGNSEVNAILSPRSESGGLGVSMVEYVLSSSPADKLDSRFRKGNFGTRDAETDGPEKGDQKGKASPFEEDQNRDLKQGDDDDSKINGRGLPNGMDADCKDFNRTPGSRQASPTEVVERLGPNTNPSEGLGPLPNPTANKPLVEEFSNPETQNLDAMEQVGLESLQFDYPGNQVPMDSSGATVGLFDYNSQQQLFQRTNALTVQQLTAAQQQQYALAAAQQPHIAGVFSAGLAPAAFVPNPYIISAAPPGTDPYTAAGLAAAATLAGPAVVPPQYYGVPWGVYPANLFQQQAAAAANNTASQQAASQAQPGQQQVLRAGAGQRPLTPNQGQQGQQAESLAAAAAANPTLAFGQGLATGMPGYQVLAPTAYYDQTGALVVGPGARTGLGAPVRLMAPTPVLISSAAAQAAAAAAAGGTASSLTGSTNGLFRPIGTQPPQQQQQQPSTNLQSNSFYGSSSLTNSSQSSSLFSHGPGQPGSTSLGFGSGNSLGAAIGSALSGFGSSVGSSASSSATRRESLSTSSDLYKRSSSSLAPIGQPFYNSLGFSSSPSPIGMPLPSQTPGHSLTPPPSLSSHGSSSSLHLGGLTNGSGRYISAAPGAEAKYRSASSTSSLFSSSSQLFPPSRLRYNRSDIMPSGRSRLLEDFRNNRFPNLQLRDLIGHIVEFSQDQHGSRFIQQKLERATPAERQMVFNEILQAAYQLMTDVFGNYVIQKFFEFGSLDQKLALATRIRGHVLPLALQMYGCRVIQKALESISSDQQSEMVKELDGHVLKCVKDQNGNHVVQKCIECVQPQSLQFIIDAFKGQVFVLSTHPYGCRVIQRILEHCTAEQTLPILEELHQHTEQLVQDQYGNYVIQHVLEHGRPEDKSKIVSEIRGKVLALSQHKFASNVVEKCVTHASRAERALLIDEVCCQNDGPHSALYTMMKDQYANYVVQKMIDMAEPAQRKIIMHKIRPHITTLRKYTYGKHILAKLEKYYLKNSPDLGPIGGPPNGML

SEQ ID NO: 60460 - protein, 1066 aa, Homo sapiens
MNHDFQALALESRGMGELLPTKKFWEPDDSTKDGQKGIFLGDDEWRETAWGASHHSMSQPIMVQRRSGQGFHGNSEVNAILSPRSESGGLGVSMVEYVLSSSPADKLDSRFRKGNFGTRDAETDGPEKGDQKGKASPFEEDQNRDLKQGDDDDSKINGRGLPNGMDADCKDFNRTPGSRQASPTEVVERLGPNTNPSEGLGPLPNPTANKPLVEEFSNPETQNLDAMEQVGLESLQFDYPGNQVPMDSSGATVGLFDYNSQQQLFQRTNALTVQQLTAAQQQQYALAAAQQPHIAGVFSAGLAPAAFVPNPYIISAAPPGTDPYTAAGLAAAATLAGPAVVPPQYYGVPWGVYPANLFQQQAAAAANNTASQQAASQAQPGQQQVLRAGAGQRPLTPNQGQQGQQAESLAAAAAANPTLAFGQGLATGMPGYQVLAPTAYYDQTGALVVGPGARTGLGAPVRLMAPTPVLISSAAAQAAAAAAAGGTASSLTGSTNGLFRPIGTQPPQQQQQQPSTNLQSNSFYGSSSLTNSSQSSSLFSHGPGQPGSTSLGFGSGNSLGAAIGSALSGFGSSVGSSASSSATRRESLSTSSDLYKRSSSSLAPIGQPFYNSLGFSSSPSPIGMPLPSQTPGHSLTPPPSLSSHGSSSSLHLGGLTNGSGRYISAAPGAEAKYRSASSTSSLFSSSSQLFPPSRLRYNRSDIMPSGRSRLLEDFRNNRFPNLQLRDLIGHIVEFSQDQHGSRFIQQKLERATPAERQMVFNEILQAAYQLMTDVFGNYVIQKFFEFGSLDQKLALATRIRGHVLPLALQMYGCRVIQKALESISSDQQVISEMVKELDGHVLKCVKDQNGNHVVQKCIECVQPQSLQFIIDAFKGQVFVLSTHPYGCRVIQRILEHCTAEQTLPILEELHQHTEQLVQDQYGNYVIQHVLEHGRPEDKSKIVSEIRGKVLALSQHKFASNVVEKCVTHASRAERALLIDEVCCQNDGPHSALYTMMKDQYANYVVQKMIDMAEPAQRKIIMHKIRPHITTLRKYTYGKHILAKLEKYYLKNSPDLGPIGGPPNGML

SEQ ID NO: 60461 - protein, 1064 aa, Homo sapiens; identical to SEQ ID NO: 60459

SEQ ID NO: 60462 - protein, 34 aa, Homo sapiens
MNHDFQALALESRGMGELLPTKKFWEPDDSTKDG

SEQ ID NO: 60463 - protein, 293 aa, Homo sapiens
MNHDFQALALESRGMGELLPTKKFWEPDDSTKDGQKGIFLGDDEWRETAWGASHHSMSQPIMVQRRSGQGFHGNSEVNAILSPRSESGGLGVSMVEYVLSSSPADKLDSRFRKGNFGTRDAETDGPEKGDQKGKASPFEEDQNRDLKQGDDDDSKINGRGLPNGMDADCKDFNRTPGSRQASPTEVVERLGPNTNPSEGLGPLPNPTANKPLVEEFSNPETQNLDAMEQVGLESLQFDYPGNQVPMDSSGATVGLFDYNSQQQLFQRTNALTVQQLTAAQQQQYALAAAQQPH

SEQ ID NO: 60464 - protein, 1008 aa, Homo sapiens
MSQPIMVQRRSGQGFHGNSEVNAILSPRSESGGLGVSMVEYVLSSSPADKLDSRFRKGNFGTRDAETDGPEKGDQKGKASPFEEDQNRDLKQGDDDDSKINGRGLPNGMDADCKDFNRTPGSRQASPTEVVERLGPNTNPSEGLGPLPNPTANKPLVEEFSNPETQNLDAMEQVGLESLQFDYPGNQVPMDSSGATVGLFDYNSQQQLFQRTNALTVQQLTAAQQQQYALAAAQQPHIAGVFSAGLAPAAFVPNPYIISAAPPGTDPYTAAGLAAAATLAGPAVVPPQYYGVPWGVYPANLFQQQAAAAANNTASQQAASQAQPGQQQVLRAGAGQRPLTPNQGQQGQQAESLAAAAAANPTLAFGQGLATGMPGYQVLAPTAYYDQTGALVVGPGARTGLGAPVRLMAPTPVLISSAAAQAAAAAAAGGTASSLTGSTNGLFRPIGTQPPQQQQQQPSTNLQSNSFYGSSSLTNSSQSSSLFSHGPGQPGSTSLGFGSGNSLGAAIGSALSGFGSSVGSSASSSATRRESLSTSSDLYKRSSSSLAPIGQPFYNSLGFSSSPSPIGMPLPSQTPGHSLTPPPSLSSHGSSSSLHLGGLTNGSGRYISAAPGAEAKYRSASSTSSLFSSSSQLFPPSRLRYNRSDIMPSGRSRLLEDFRNNRFPNLQLRDLIGHIVEFSQDQHGSRFIQQKLERATPAERQMVFNEILQAAYQLMTDVFGNYVIQKFFEFGSLDQKLALATRIRGHVLPLALQMYGCRVIQKALESISSDQQSEMVKELDGHVLKCVKDQNGNHVVQKCIECVQPQSLQFIIDAFKGQVFVLSTHPYGCRVIQRILEHCTAEQTLPILEELHQHTEQLVQDQYGNYVIQHVLEHGRPEDKSKIVSEIRGKVLALSQHKFASNVVEKCVTHASRAERALLIDEVCCQNDGPHSALYTMMKDQYANYVVQKMIDMAEPAQRKIIMHKIRPHITTLRKYTYGKHILAKLEKYYLKNSPDLGPIGGPPNGML

SEQ ID NO: 60465 - protein, 289 aa, Homo sapiens
MENGYTYEDYKNTAEWLLSHTKHRPQVAIICGSGLGGLTDKLTQAQIFDYGEIPNFPRSTVPGHAGRLVFGFLNGRACVMMQGRFHMYEGYPLWKVTFPVRVFHLLGVDTLVVTNAAGGLNPKFEVGDIMLIRDHINLPGFSGQNPLRGPNDERFGDRFPAMSDAYDRTMRQRALSTWKQMGEQRELQEGTYVMVAGPSFETVAECRVLQKLGADAVGMSTVPEVIVARHCGLRVFGFSLITNKVIMDYESLEKANHEEVLAAGKQAAQKLEQFVSILMASIPLPDKAS

SEQ ID NO: 60466 - protein, 93 aa, Homo sapiens
MENGYTYEDYKNTAEWLLSHTKHRPQVAIICGSGLGGLTDKLTQAQIFDYGEIPNFPRSTVPGHAGRLVFGFLNGRACVMMQGRFHMYEGYPL

SEQ ID NO: 60467 - protein, 399 aa, Homo sapiens
MARRFQEELAAFLFEYDTPRMVLVRNKKVGVIFRLIQLVVLVYVIGWVFLYEKGYQTSSGLISSVSVKLKGLAVTQLPGLGPQVWDVADYVFPAQGDNSFVVMTNFIVTPKQTQGYCAEHPEGGICKEDSGCTPGKAKRKAQGIRTGKCVAFNDTVKTCEIFGWCPVEVDDDIPRPALLREAENFTLFIKNSISFPRFKVNRRNLVEEVNAAHMKTCLFHKTLHPLCPVFQLGYVVQESGQNFSTLAEKGGVVGITIDWHCDLDWHVRHCRPIYEFHGLYEEKNLSPGFNFRFARHFVENGTNYRHLFKVFGIRFDILVDGKAGKFDIIPTMTTIGSGIGIFGVATVLCDLLLLHILPKRHYYKQKKFKYAEDMGPGAAERDLAATSSTLGLQENMRTS

SEQ ID NO: 60468 - protein, 397 aa, Homo sapiens
MNCISDFFTYETTKSVVVKSWTIGIINRVVQLLIISYFVGWVFLHEKAYQVRDTAIESSVVTKVKGSGLYANRVMDVSDYVTPPQGTSVFVIITKMIVTENQMQGFCPESEEKYRCVSDSQCGPERLPGGGILTGRCVNYSSVLRTCEIQGWCPTEVDTVETPIMMEAENFTIFIKNSIRFPLFNFEKGNLLPNLTARDMKTCRFHPDKDPFCPILRVGDVVKFAGQDFAKLARTGGVLGIKIGWVCDLDKAWDQCIPKYSFTRLDSVSEKSSVSPGYNFRFAKYYKMENGSEYRTLLKAFGIRFDVLVYGNAGKFNIIPTIISSVAAFTSVGVGTVLCDIILLNFLKGADQYKAKKFEEVNETTLKIAALTNPVYPSDQTTAEKQSTDSGAFSIGH

SEQ ID NO: 60469 - protein, 396 aa, Homo sapiens [sequence omitted]

SEQ ID NO: 60470 - protein, 388 aa, Homo sapiens
MAGCCAALAAFLFEYDTPRIVLIRSRKVGLMNRAVQLLILAYVIGWVFVWEKGYQETDSVVSSVTTKVKGVAVTNTSKLGFRIWDVADYVIPAQEENSLFVMTNVILTMNQTQGLCPEIPDATTVCKSDASCTAGSAGTHSNGVSTGRCVAFNGSVKTCEVAAWCPVEDDTHVPQPAFLKAAENFTLLVKNNIWYPKFNFSKRNILPNITTTYLKSCIYDAKTDPFCPIFRLGKIVENAGHSFQDMAVEGGIMGIQVNWDCNLDRAASLCLPRYSFRRLDTRDVEHNVSPGYNFRFAKYYRDLAGNEQRTLIKAYGIRFDIIVFGKAGKFDIIPTMINIGSGLALLGMATVLCDIIVLYCMKKRLYYREKKYKYVEDYEQGLASELDQ

SEQ ID NO: 60471 - protein, 404 aa, Homo sapiens
MAGCCAALAAFLFEYDTPRIVLIRSRKVGLMNRAVQLLILAYVIGCYHPHLAEVEMESPRRWVFVWEKGYQETDSVVSSVTTKVKGVAVTNTSKLGFRIWDVADYVIPAQEENSLFVMTNVILTMNQTQGLCPEIPDATTVCKSDASCTAGSAGTHSNGVSTGRCVAFNGSVKTCEVAAWCPVEDDTHVPQPAFLKAAENFTLLVKNNIWYPKFNFSKRNILPNITTTYLKSCIYDAKTDPFCPIFRLGKIVENAGHSFQDMAVEGGIMGIQVNWDCNLDRAASLCLPRYSFRRLDTRDVEHNVSPGYNFRFAKYYRDLAGNEQRTLIKAYGIRFDIIVFGKAGKFDIIPTMINIGSGLALLGMATVLCDIIVLYCMKKRLYYREKKYKYVEDYEQGLASELDQ

SEQ ID NO: 60472 - protein, 146 aa, Homo sapiens
MAGCCAALAAFLFEYDTPRIVLIRSRKVGLMNRAVQLLILAYVIGWVFVWEKGYQETDSVVSSVTTKVKGVAVTNTSKLGFRIWDVADYVIPAQEENSLFVMTNVILTMNQTQGLCPEIPDATTVCKSDASCTAGSAGTHSNDLLF

SEQ ID NO: 60473 - protein, 361 aa, Homo sapiens
MAGCCAALAAFLFEYDTPRIVLIRSRKVGLMNRAVQLLILAYVIGWVFVWEKGYQETDSVVSSVTTKVKGVAVTNTSKLGFRIWDVADYVIPAQEENSLFVMTNVILTMNQTQGLCPEIPDATTVCKSDASCTAGSAGTHSNGVSTGRPAFLKAAENFTLLVKNNIWYPKFNFSKRNILPNITTTYLKSCIYDAKTDPFCPIFRLGKIVENAGHSFQDMAVEGGIMGIQVNWDCNLDRAASLCLPRYSFRRLDTRDVEHNVSPGYNFRFAKYYRDLAGNEQRTLIKAYGIRFDIIVFGKAGKFDIIPTMINIGSGLALLGMATVLCDIIVLYCMKKRLYYREKKYKYVEDYEQGLASELDQ

SEQ ID NO: 60474 - protein, 287 aa, Homo sapiens
MTNVILTMNQTQGLCPEIPDATTVCKSDASCTAGSAGTHSNGVSTGRCVAFNGSVKTCEVAAWCPVEDDTHVPQPAFLKAAENFTLLVKNNIWYPKFNFSKRNILPNITTTYLKSCIYDAKTDPFCPIFRLGKIVENAGHSFQDMAVEGGIMGIQVNWDCNLDRAASLCLPRYSFRRLDTRDVEHNVSPGYNFRFAKYYRDLAGNEQRTLIKAYGIRFDIIVFGKAGKFDIIPTMINIGSGLALLGMATVLCDIIVLYCMKKRLYYREKKYKYVEDYEQGLASELDQ

SEQ ID NO: 60475 - protein, 425 aa, Homo sapiens
MDGPAEQRPALLNSAENFTVLIKNNIDFPGHNYTTRNILPGLNITCTFHKTQNPQCPIFRLGDIFRETGDNFSDVAIQGGIMGIEIYWDCNLDRWFHHCRPKYSFRRLDDKTTNVSLYPGYNFRYAKYYKENNVEKRTLIKVFGIRFDILVFGTGGKFDIIQLVVYIGSTLSYFGLAAVFIDFLIDTYSSNCCRSHIYPWCKCCQPCVVNEYYYRKKCESIVEPKPTLKYVSFVDESHIRMVNQQLLGRSLQDVKGQEVPRPAMDFTDLSRLPLALHDTPPIPGQPEEIQLLRKEATPRSRDSPVWCQCGSCLPSQLPESHRCLEELCCRKKPGACITTSELFRKLVLSRHVLQFLLLYQEPLLALDVDSTNSRLRHCAYRCYATWRFGSQDMADFANLPSCCRWRIRKEFPKSEGQYSGFKSPY

SEQ ID NO: 60476 - protein, 275 aa, Homo sapiens
MPACCSCSDVFQYETNKVTRIQSMNYGTIKWFFHVIIFSYVCFALVSDKLYQRKEPVISSVHTKVKGIAEVKEEIVENGVKKLVHSVFDTADYTFPLQGNSFFVMTNFLKTEGQEQRLCPEYPTRRTLCSSDRGCKKGWMDPQSKGIQTGRCVVYEGNQKTCEVSAWCPIEAVEEAPRPALLNSAENFTVLIKNNIDFPGHNYTTYAKYYKENNVEKRTLIKVFGIRFDILVFGTGGKFDIIQLVVYIGSTLSYFGLVRDSLFHALGKWFGEGSD

SEQ ID NO: 60477 - protein, 505 aa, Homo sapiens
MTPGDHSWGNSFFVMTNFLKTEGQEQRLCPEYPTRRTLCSSDRGCKKGWMDPQSKGIQTGRCVVYEGNQKTCEVSAWCPIEAVEEAPRPALLNSAENFTVLIKNNIDFPGHNYTTRNILPGLNITCTFHKTQNPQCPIFRLGDIFRETGDNFSDVAIQGGIMGIEIYWDCNLDRWFHHCRPKYSFRRLDDKTTNVSLYPGYNFRYAKYYKENNVEKRTLIKVFGIRFDILVFGTGGKFDIIQLVVYIGSTLSYFGLAAVFIDFLIDTYSSNCCRSHIYPWCKCCQPCVVNEYYYRKKCESIVEPKPTLKYVSFVDESHIRMVNQQLLGRSLQDVKGQEVPRPAMDFTDLSRLPLALHDTPPIPGQPEEIQLLRKEATPRSRDSPVWCQCGSCLPSQLPESHRCLEELCCRKKPGACITTSELFRKLVLSRHVLQFLLLYQEPLLALDVDSTNSRLRHCAYRCYATWRFGSQDMADFANLPSCCRWRIRKEFPKSEGQYSGFKSPY

SEQ ID NO: 60478 - protein, 128 aa, Homo sapiens
MPACCSCSDVFQYETNKVTRIQSMNYGTIKWFFHVIIFSYVCFALVSDKLYQRKEPVISSVHTKVKGIAEVKEEIVENGVKKLVHSVFDTADYTFPLQGNSFFVMTNFLKTEGQEQRLCPEEFRPEGV

SEQ ID NO: 60479 - protein, 306 aa, Homo sapiens
MWQFRYAKYYKENNVEKRTLIKVFGIRFDILVFGTGGKFDIIQLVVYIGSTLSYFGLAAVFIDFLIDTYSSNCCRSHIYPWCKCCQPCVVNEYYYRKKCESIVEPKPTLKYVSFVDESHIRMVNQQLLGRSLQDVKGQEVPRPAMDFTDLSRLPLALHDTPPIPGQPEEIQLLRKEATPRSRDSPVWCQCGSCLPSQLPESHRCLEELCCRKKPGACITTSELFRKLVLSRHVLQFLLLYQEPLLALDVDSTNSRLRHCAYRCYATWRFGSQDMADFANLPSCCRWRIRKEFPKSEGQYSGFKSPY

SEQ ID NO: 60480 - protein, 128 aa, Homo sapiens; identical to SEQ ID NO: 60478

SEQ ID NO: 60481 - protein, 595 aa, Homo sapiens
MPACCSCSDVFQYETNKVTRIQSMNYGTIKWFFHVIIFSYVCFALVSDKLYQRKEPVISSVHTKVKGIAEVKEEIVENGVKKLVHSVFDTADYTFPLQGNSFFVMTNFLKTEGQEQRLCPEYPTRRTLCSSDRGCKKGWMDPQSKGIQTGRCVVYEGNQKTCEVSAWCPIEAVEEAPRPALLNSAENFTVLIKNNIDFPGHNYTTRNILPGLNITCTFHKTQNPQCPIFRLGDIFRETGDNFSDVAIQGGIMGIEIYWDCNLDRWFHHCRPKYSFRRLDDKTTNVSLYPGYNFRYAKYYKENNVEKRTLIKVFGIRFDILVFGTGGKFDIIQLVVYIGSTLSYFGLAAVFIDFLIDTYSSNCCRSHIYPWCKCCQPCVVNEYYYRKKCESIVEPKPTLKYVSFVDESHIRMVNQQLLGRSLQDVKGQEVPRPAMDFTDLSRLPLALHDTPPIPGQPEEIQLLRKEATPRSRDSPVWCQCGSCLPSQLPESHRCLEELCCRKKPGACITTSELFRKLVLSRHVLQFLLLYQEPLLALDVDSTNSRLRHCAYRCYATWRFGSQDMADFANLPSCCRWRIRKEFPKSEGQYSGFKSPY

SEQ ID NO: 60482 - protein, 373 aa, Homo sapiens
MTEVLWPAVPNGTDAAFLAGPGSSWGNSTVASTAAVSSSFKCALTKTGFQFYYLPAVYILVFIIGFLGNSVAIWMFVFHMKPWSGISVYMFNLALADFLYVLTLPALIFYYFNKTDWIFGDAMCKLQRFIFHVNLYGSILFLTCISAHRYSGVVYPLKSLGRLKKKNAICISVLVWLIVVVAISPILFYSGTGVRKNKTITCYDTTSDEYLRSYFIYSMCTTVAMFCVPLVLILGCYGLIVRALIYKDLDNSPLRRKSIYLVIIVLTVFAVSYIPFHVMKTMNLRARLDFQTPAMCAFNDRVYATYQVTRGLASLNSCVDPILYFLAGDTFRRRLSRATRKASRRSEANLQSKSEDMTLNILPEFKQNGDTSL

SEQ ID NO: 60483 - protein, 374 aa, Homo sapiens
MAANVSGAKSCPANFLAAADDKLSGFQGDFLWPILVVEFLVAVASNGLALYRFSIRKQRPWHPAVVFSVQLAVSDLLCALTLPPLAAYLYPPKHWRYGEAACRLERFLFTCNLLGSVIFITCISLNRYLGIVHPFFARSHLRPKHAWAVSAAGWVLAALLAMPTLSFSHLKRPQQGAGNCSVARPEACIKCLGTADHGLAAYRAYSLVLAGLGCGLPLLLTLAAYGALGRAVLRSPGMTVAEKLRVAALVASGVALYASSYVPYHIMRVLNVDARRRWSTRCPSFADIAQATAALELGPYVGYQVMRGLMPLAFCVHPLLYMAAVPSLGCCCRHCPGYRDSWNPEDAKSTGQALPLNATAAPKPSEPQSRELSQ

SEQ ID NO: 60484 - protein, 342 aa, Homo sapiens
MQAVDNLTSAPGNTSLCTRDYKITQVLFPLLYTVLFFVGLITNGLAMRIFFQIRSKSNFIIFLKNTVISDLLMILTFPFKILSDAKLGTGPLRTFVCQVTSVIFYFTMYISISFLGLITIDRYQKTTRPFKTSNPKNLLGAKILSVVIWAFMFLLSLPNMILTNRQPRDKNVKKCSFLKSEFGLVWHEIVNYICQVIFWINFLIVIVCYTLITKELYRSYVRTRGVGKVPRKKVNVKVFIIIAVFFICFVPFHFARIPYTLSQTRDVFDCTAENTLFYVKESTLWLTSLNACLDPFIYFFLCKSFRNSLISMLKCPNSATSLSQDNRKKEQDGGDPNEETPM

SEQ ID NO: 60485 - protein, 245 aa, Homo sapiens
MQAVDNLTSAPGNTSLCTRDYKITQVLFPLLYTVLFFVGLITNGLAMRIFFQIRSKSNFIIFLKNTVISDLLMILTFPFKILSDAKLGTGPLRTFVCQVIFWINFLIVIVCYTLITKELYRSYVRTRGVGKVPRKKVNVKVFIIIAVFFICFVPFHFARIPYTLSQTRDVFDCTAENTLFYVKESTLWLTSLNACLDPFIYFFLCKSFRNSLISMLKCPNSATSLSQDNRKKEQDGGDPNEETPM

SEQ ID NO: 60486 - protein, 377 aa, Homo sapiens
MAADLGPWNDTINGTWDGDELGYRCRFNEDFKYVLLPVSYGVVCVPGLCLNAVALYIFLCRLKTWNASTTYMFHLAVSDALYAASLPLLVYYYARGDHWPFSTVLCKLVRFLFYTNLYCSILFLTCISVHRCLGVLRPLRSLRWGRARYARRVAGAVWVLVLACQAPVLYFVTTSARGGRVTCHDTSAPELFSRFVAYSSVMLGLLFAVPFAVILVCYVLMARRLLKPAYGTSGGLPRAKRKSVRTIAVVLAVFALCFLPFHVTRTLYYSFRSLDLSCHTLNAINMAYKVTRPLASANSCLDPVLYFLAGQRLVRFARDAKPPTGPSPATPARRRLGLRRSDRTDMQRIEDVLGSSEDSRRTESTPAGSENTKDIRL

SEQ ID NO: 60487 - protein, 377 aa, Homo sapiens; identical to SEQ ID NO: 60486

SEQ ID NO: 60488 - protein, 377 aa, Homo sapiens; identical to SEQ ID NO: 60486

SEQ ID NO: 60489 - protein, 359 aa, Homo sapiens
MQVPNSTGPDNATLQMLRNPAIAVALPVVYSLVAAVSIPGNLFSLWVLCRRMGPRSPSVIFMINLSVTDLMLASVLPFQIYYHCNRHHWVFGVLLCNVVTVAFYANMYSSILTMTCISVERFLGVLYPLSSKRWRRRRYAVAACAGTWLLLLTALSPLARTDLTYPVHALGIITCFDVLKWTMLPSVAMWAVFLFTIFILLFLIPFVITVACYTATILKLLRTEEAHGREQRRRAVGLAAVVLLAFVTCFAPNNFVLLAHIVSRLFYGKSYYHVYKLTLCLSCLNNCLDPFVYYFASREFQLRLREYLGCRRVPRDTLDTRRESLFSARTTSVRSEAGAHPEGMEGATRPGLQRQESVF

SEQ ID NO: 60490 - protein, 62 aa, Homo sapiens
MSERQGAGATNGKDKTSGENDGQKKVQEEFDIDMDAPETERAAVAIQSQFRKFQKKKAGSQS

SEQ ID NO: 60491 - protein, 637 aa, Homo sapiens
MASNERDAISWYQKKIGAYDQQIWEKSIEQTQIKGLKNKPKKMGHIKPDLIDVDLIRGSTFAKAKPEIPWTSLTRKGLVRVVFFPLFSNWWIQVTSLRIFVWLLLLYFMQVIAIVLYLMMPIVNISEVLGPLCLMLLMGTVHCQIVSTQITRPSGNNGNRRRRKLRKTVNGDGSRENGNNSSDKVRGIETLESVPIIGGFWETIFGNRIKRVKLISNKGTETDNDPSCVHPIIKRRQCRPEIRMWQTREKAKFSDGEKCRREAFRRLGNGVSDDLSSEEDGEARTQMILLRRSVEGASSDNGCEVKNRKSILSRHLNSQVKKTTTRWCHIVRDSDSLAESEFESAAFSQGSRSGVSGGSRSLNMSRRDSESTRHDSETEDMLWDDLLHGPECRSSVTSDSEGAHVNTLHSGTKRDPKEDVFQQNHLFWLQNSSPSSDRVSAIIWEGNECKKMDMSVLEISGIIMSRVNAYQQGVGYQMLGNVVTIGLAFFPFLHRLFREKSLDQLKSISAEEILTLFCGAPPVTPIIVLSIINFFERLCLTWMFFFMMCVAERTYKQRFLFAKLFSHITSARKARKYEIPHFRLKKVENIKIWLSLRSYLKRRGPQRSVDVVVSSVFLLTLSIAFICCAQVKVSHLL

SEQ ID NO: 60492 - protein, 709 aa, Homo sapiens
MASNERDAISWYQKKIGAYDQQIWEKSIEQTQIKGLKNKPKKMGHIKPDLIDVDLIRVIAIVLYLMMPIVNISEVLGPLCLMLLMGTVHCQIVSTQITRPSGNNGNRRRRKLRKTVNGDGSRENGNNSSDKVRGIETLESVPIIGGFWETIFGNRIKRVKLISNKGTETDNDPSCVHPIIKRRQCRPEIRMWQTREKAKFSDGEKCRREAFRRLGNGVSDDLSSEEDGEARTQMILLRRSVEGASSDNGCEVKNRKSILSRHLNSQVKKTTTRWCHIVRDSDSLAESEFESAAFSQGSRSGVSGGSRSLNMSRRDSESTRHDSETEDMLWDDLLHGPECRSSVTSDSEGAHVNTLHSGTKRDPKEDVFQQNHLFWLQNSSPSSDRVSAIIWEGNECKKMDMSVLEISGIIMSRVNAYQQGVGYQMLGNVVTIGLAFFPFLHRLFREKSLDQLKSISAEEILTLFCGAPPVTPIIVLSIINFFERLCLTWMFFFMMCVAERTYKQRFLFAKLFSHITSARKARKYEIPHFRLKKVENIKIWLSLRSYLKRRGPQRSVDVVVSSVFLLTLSIAFICCAQVLQGHKTFLNDAYNWEFLIWETALLLFLLRLASLGSETNKKYSNVSILLTEQINLYLKMEKKPNKKEQLTLVNNVLKLSTKLLKELDTPFRLYGLTMNPLIYNITRVVILSAVSGVISDLLGFNIRLWKIKS

SEQ ID NO: 60493 - protein, 717 aa, Homo sapiens
MASNERDAISWYQKKIGAYDQQIWEKSIEQTQIKGLKNKPKKMGHIKPDLIDVDLIRGSTFAKAKPEIPWTSLTRKGLVRVVFFPLFSNWWIQVTSLRIFVWLLLLYFMQVIAIVLYLMMPIVNISEVLGPLCLMLLMGTVHCQIVSTQITRPSGNNGNRRRRIKRVKLISNKGTETDNDPSCVHPIIKRRQCRPEIRMWQTREKAKFSDGEKCRREAFRRLGNGVSDDLSSEEDGEARTQMILLRRSVEGASSDNGCEVKNRKSILSRHLNSQVKKTTTRWCHIVRDSDSLAESEFESAAFSQGSRSGVSGGSRSLNMSRRDSESTRHDSETEDMLWDDLLHGPECRSSVTSDSEGAHVNTLHSGTKRDPKEDVFQQNHLFWLQNSSPSSDRVSAIIWEGNECKKMDMSVLEISGIIMSRVNAYQQGVGYQMLGNVVTIGLAFFPFLHRLFREKSLDQLKSISAEEILTLFCGAPPVTPIIVLSIINFFERLCLTWMFFFMMCVAERTYKQRFLFAKLFSHITSARKARKYEIPHFRLKKVENIKIWLSLRSYLKRRGPQRSVDVVVSSVFLLTLSIAFICCAQVLQGHKTFLNDAYNWEFLIWETALLLFLLRLASLGSETNKKYSNVSILLTEQINLYLKMEKKPNKKEQLTLVNNVLKLSTKLLKELDTPFRLYGLTMNPLIYNITRVVILSAVSGVISDLLGFNIRIWKHSS

SEQ ID NO: 60494 - protein, 717 aa, Homo sapiens
MASNERDAISWYQKKIGAYDQQIWEKSIEQTQIKGLKNKPKKMGHIKPDLIDVDLIRGSTFAKAKPEIPWTSLTRKGLVRVVFFPLFSNWWIQVTSLRIFVWLLLLYFMQVIAIVLYLMMPIVNISEVLGPLCLMLLMGTVHCQIVSTQITRPSGNNGNRRRRIKRVKLISNKGTETDNDPSCVHPIIKRRQCRPEIRMWQTREKAKFSDGEKCRREAFRRLGNGVSDDLSSEEDGEARTQMILLRRSVEGASSDNGCEVKNRKSILSRHLNSQVKKTTTRWCHIVRDSDSLAESEFESAAFSQGSRSGVSGGSRSLNMSRRDSESTRHDSETEDMLWDDLLHGPECRSSVTSDSEGAHVNTLHSGTKRDPKEDVFQQNHLFWLQNSSPSSDRVSAIIWEGNECKKMDMSVLEISGIIMSRVNAYQQGVGYQMLGNVVTIGLAFFPFLHRLFREKSLDQLKSISAEEILTLFCGAPPVTPIIVLSIINFFERLCLTWMFFFMMCVAERTYKQRFLFAKLFSHITSARKARKYEIPHFRLKKVENIKIWLSLRSYLKRRGPQRSVDVVVSSVFLLTLSIAFICCAQVLQGHKTFLNDAYNWEFLIWETALLLFLLRLASLGSETNKKYSNVSILLTEQINLYLKMEKKPNKKEQLTLVNNVLKLSTKLLKELDTPFRLYGLTMNPLIYNITRVVILSAVSGVISDLLGFNIRLWKIKS

SEQ ID NO: 60495 - protein, 709 aa, Homo sapiens; identical to SEQ ID NO: 60492

SEQ ID NO: 60496 - protein, 762 aa, Homo sapiens
MASNERDAISWYQKKIGAYDQQIWEKSIEQTQIKGLKNKPKKMGHIKPDLIDVDLIRGSTFAKAKPEIPWTSLTRKGLVRVVFFPLFSNWWIQVTSLRIFVWLLLLYFMQVIAIVLYLMMPIVNISEVLGPLCLMLLMGTVHCQIVSTQITRPSGNNGNRRRRKLRKTVNGDGSRENGNNSSDKVRGIETLESVPIIGGFWETIFGNRIKRVKLISNKGTETDNDPSCVHPIIKRRQCRPEIRMWQTREKAKFSDGEKCRREAFRRLGNGVSDDLSSEEDGEARTQMILLRRSVEGASSDNGCEVKNRKSILSRHLNSQVKKTTTRWCHIVRDSDSLAESEFESAAFSQGSRSGVSGGSRSLNMSRRDSESTRHDSETEDMLWDDLLHGPECRSSVTSDSEGAHVNTLHSGTKRDPKEDVFQQNHLFWLQNSSPSSDRVSAIIWEGNECKKMDMSVLEISGIIMSRVNAYQQGVGYQMLGNVVTIGLAFFPFLHRLFREKSLDQLKSISAEEILTLFCGAPPVTPIIVLSIINFFERLCLTWMFFFMMCVAERTYKQRFLFAKLFSHITSARKARKYEIPHFRLKKVENIKIWLSLRSYLKRRGPQRSVDVVVSSVFLLTLSIAFICCAQVLQGHKTFLNDAYNWEFLIWETALLLFLLRLASLGSETNKKYSNVSILLTEQINLYLKMEKKPNKKEQLTLVNNVLKLSTKLLKELDTPFRLYGLTMNPLIYNITRVVILSAVSGVISDLLGFNIRLWKIKS

SEQ ID NO: 60497 - protein, 762 aa, Homo sapiens; identical to SEQ ID NO: 60496

SEQ ID NO: 60498 - protein, 331 aa, Homo sapiens
  VARIANT 1: note = MOD_RES - Any amino acid
XQTREKAKFSDGEKCRREAFRRLGNGVSDDLSSEEDGEARTQMILLRRSVEGASSDNGCEVKNRKSILSRHLNSQVKKTTTRWCHIVRDSDSLAESEFESAAFSQGSRSGVSGGSRSLNMSRRDSESTRHDSETEDMLWDDLLHGPECRSSVTSDSEGAHVNTLHSGTKRDPKEDVFQQNHLFWLQNSSPSSDRVSAIIWEGNECKKMDMSVLEISGIIMSRVNAYQQGVGYQMLGNVVTIGLAFFPFLHRLFREKSLDQLKSISAEEILTLFCGAPPVTPIIVLSIINFFERLCLTWMFFFMMCVAERTYKQVSGEIRKIFYLFLYMIFH

SEQ ID NO: 60499 - protein, 105 aa, Homo sapiens
MASNERDAISWYQKKIGAYDQQIWEKSIEQTQIKGLKNKPKKMGHIKPDLIDVDLIRGSTFAKAKPEIPWTSLTRKGLVRVVFFPLFSNWWIQVTSLRIFVWLLL

SEQ ID NO: 60500 - protein, 233 aa, Homo sapiens
MASNERDAISWYQKKIGAYDQQIWEKSIEQTQIKGLKNKPKKMGHIKPDLIDVDLIRGSTFAKAKPEIPWTSLTRKGLVRVVFFPLFSNWWIQVTSLRIFVWLLLLYFMQVIAIVLYLMMPIVNISEVLGPLCLMLLMGTVHCQIVSTQITRPSGNNGNRRRRKLRKTVNGDGSRENGNNSSDKVRGIETLESVPIIGGFWETIFGNRRLLGVWVMGCLMTCQVKKMVKHGHR

SEQ ID NO: 60501 - protein, 919 aa, Homo sapiens [sequence omitted]

SEQ ID NO: 60502 - protein, 561 aa, Homo sapiens
MAFMEKPPAGKVLLDDTVPLTAAIEASQSLQSHTIVRRYSDFDLLNNSLQIAGLSLPLPPKKLIGNMDREFIAERQKGLQNYLNVITTNHILSNCELVKKFLDPNNYSANYTEIALQQVSMFFRSEPKWEVVEPLKDIGWRIRKKYFLMKIKNQPKERLVLSWADLGPDKYLSDKDFQCLIKLLPSCLHPYIYRVTFATANESSALLIRMFNEKGTLKDLIYKAKPKDPFLKKYCNPKKIQGLELQQIKTYGRQILEVLKFLHDKGFPYGHLHASNVMLDGDTCRLLDLENSLLGLPSFYRSYFSQFRKINTLESVDVHCFGHLLYEMTYGRPPDSVPVDSFPPAPSMAVVAVLESTLSCEACKNGMPTISRLLQMPLFSDVLLTTSEKPQFKIPTKLKEALRIAKECIEKRLIEEQKQIHQHRRLTRAQSHHGSEEERKKRKILARKKSKRSALENSEEHSAKYSNSNNSAGSGASSPLTSPSSPTPPSTSGISALPPPPPPPPPPAAPLPPASTEAPAQLSSQAVNGMSRGALLSSIQNFQKGTLRKAKTCDHSAPKIG

SEQ ID NO: 60503 - protein, 578 aa, Homo sapiens
MAFMEKPPAGKVLLDDTVPLTAAIEASQSLQSHTEYIIRVQRGISVENSWQIVRRYSDFDLLNNSLQIAGLSLPLPPKKLIGNMDREFIAERQKGLQNYLNVITTNHILSNCELVKKFLDPNNYSANYTEIALQQVSMFFRSEPKWEVVEPLKDIGWRIRKKYFLMKIKNQPKERLVLSWADLGPDKYLSDKDFQCLIKLLPSCLHPYIYRVTFATANESSALLIRMFNEKGTLKDLIYKAKPKDPFLKKYCNPKKIQGLELQQIKTYGRQILEVLKFLHDKGFPYGHLHASNVMLDGDTCRLLDLENSLLGLPSFYRSYFSQFRKINTLESVDVHCFGHLLYEMTYGRPPDSVPVDSFPPAPSMAVVAVLESTLSCEACKNGMPTISRLLQMPLFSDVLLTTSEKPQFKIPTKLKEALRIAKECIEKRLIEEQKQIHQHRRLTRAQSHHGSEEERKKRKILARKKSKRSALENSEEHSAKYSNSNNSAGSGASSPLTSPSSPTPPSTSGISALPPPPPPPPPPAAPLPPASTEAPAQLSSQAVNGMSRGALLSSIQNFQKGTLRKAKTCDHSAPKIG

SEQ ID NO: 60504 - protein, 545 aa, Homo sapiens
MAFMEKPPAGKVLLDDTVPLTAAIEASQSLQSHTIAGLSLPLPPKKLIGNMDREFIAERQKGLQNYLNVITTNHILSNCELVKKFLDPNNYSANYTEIALQQVSMFFRSEPKWEVVEPLKDIGWRIRKKYFLMKIKNQPKERLVLSWADLGPDKYLSDKDFQCLIKLLPSCLHPYIYRVTFATANESSALLIRMFNEKGTLKDLIYKAKPKDPFLKKYCNPKKIQGLELQQIKTYGRQILEVLKFLHDKGFPYGHLHASNVMLDGDTCRLLDLENSLLGLPSFYRSYFSQFRKINTLESVDVHCFGHLLYEMTYGRPPDSVPVDSFPPAPSMAVVAVLESTLSCEACKNGMPTISRLLQMPLFSDVLLTTSEKPQFKIPTKLKEALRIAKECIEKRLIEEQKQIHQHRRLTRAQSHHGSEEERKKRKILARKKSKRSALENSEEHSAKYSNSNNSAGSGASSPLTSPSSPTPPSTSGISALPPPPPPPPPPAAPLPPASTEAPAQLSSQAVNGMSRGALLSSIQNFQKGTLRKAKTCDHSAPKIG

SEQ ID NO: 60505 - protein, 515 aa, Homo sapiens
MAFMEKPPAGKVLLDDTVPLTAAIEASQSLQSHTEYIIRVQRGISVENSWQIVRRYSDFDLLNNSLQIAGLSLPLPPKKLIGNMDREFIAERQKGLQNYLNVITTNHILSNCELVKKFLDPNNYSANYTEIALQQVSMFFRSEPKWEVVEPLKDIGWRIRKKYFLMKIKNQPKERLVLSWADLGPDKYLSDKDFQCLIKLLPSCLHPYIYRVTFATANESSALLIRMFNEKGTLKDLIYKAKPKDPFLKKYCNPKKIQGLELQQIKTYGRQILEVLKFLHDKGFPYGHLHASNVMLDGDTCRLLDLENSLLGLPSFYRSYFSQFRKINTLESVDVHCFGHLLYEMTYGRPPDSVPVDSFPPAPSMAVVAVLESTLSCEACKNGMPTISRLLQMPLFSDVLLTTSEKPQFKIPTKLKEALRIAKECIEKRLIEEQKQIHQHRRLTRAQSHHGSEEERKKRKILARKKSKRSALENSEEHSAKYSNSNNSAGSGASSPLTSPSSPTPPSTSVEHAPF

SEQ ID NO: 60506 - protein, 441 aa, Homo sapiens
MFFRSEPKWEVVEPLKDIGWRIRKKYFLMKIKNQPKERLVLSWADLGPDKYLSDKDFQCLIKLLPSCLHPYIYRVTFATANESSALLIRMFNEKGTLKDLIYKAKPKDPFLKKYCNPKKIQGLELQQIKTYGRQILEVLKFLHDKGFPYGHLHASNVMLDGDTCRLLDLENSLLGLPSFYRSYFSQFRKINTLESVDVHCFGHLLYEMTYGRPPDSVPVDSFPPAPSMAVVAVLESTLSCEACKNGMPTISRLLQMPLFSDVLLTTSEKPQFKIPTKLKEALRIAKECIEKRLIEEQKQIHQHRRLTRAQSHHGSEEERKKRKILARKKSKRSALENSEEHSAKYSNSNNSAGSGASSPLTSPSSPTPPSTSGISALPPPPPPPPPPAAPLPPASTEAPAQLSSQAVNGMSRGALLSSIQNFQKGTLRKAKTCDHSAPKIG

SEQ ID NO: 60507 - protein, 334 aa, Homo sapiens
MFFRSEPKWEVVEPLKDIGWRIRKKYFLMKIKNQPKERLVLSWADLGPDKYLSDKDFQCLIKLLPSCLHPYIYRVTFATANESSALLIRMFNEKGTLKDLIYKAKPKDPFLKKYCNPKKIQGLELQQIKTYGRQILEVLKFLHDKGFPYGHLHASNVMLDGDTCRLLDLENSLLGLPSFYRSYFSQFRKINTLESVDVHCFGHLLYEMTYGRPPDSVPVDSFPPAPSMAVVAVLESTLSCEACKNGMPTISRLLQMPLFSDVLLTTSEKPQFKIPTKLKEALRIAKECIEKRLIEEQKQIHQHRRLTRAQSHHGSEEERKKKDFSSKEVKTICS

SEQ ID NO: 60508 - protein, 369 aa, Homo sapiens
MKSPEKKRRKSNTQGPAYSHLTEFAPPPTPMVDHLVASNPFEDDFGAPKVGVAAPPFLGSPVPFGGFRVQGGMAGQVPPGYSTGGGGGPQPLRRQPPPFPPNPMGPAFNMPPQGPGYPPPGNMNFPSQPFNQPLGQNFSPPSGQMMPGPVGGFGPMISPTMGQPPRAELGPPSLSQRFAQPGAPFGPSPLQRPGQGLPSLPPNTSPFPGPDPGFPGPGGEDGGKPLNPPASTAFPQEPHSGSPAAAVNGNQPSFPPNSSGRGGGTPDANSLAPPGKAGGGSGPQPPPGLVYPCGACRSEVNDDQDAILCEASCQKWFHRECTGMTESAYGLLTTEASAVWACDLCLKTKEIQSVYIREGMGQLVAANDG

SEQ ID NO: 60509 - protein, 406 aa, Homo sapiens
MAASAPPPPDKLEGGGGPAPPPAPPSTGRKQGKAGLQMKSPEKKRRKSNTQGPAYSHLTEFAPPPTPMVDHLVASNPFEDDFGAPKVGVAAPPFLGSPVPFGGFRVQGGMAGQVPPGYSTGGGGGPQPLRRQPPPFPPNPMGPAFNMPPQGPGYPPPGNMNFPSQPFNQPLGQNFSPPSGQMMPGPVGGFGPMISPTMGQPPRAELGPPSLSQRFAQPGAPFGPSPLQRPGQGLPSLPPNTSPFPGPDPGFPGPGGEDGGKPLNPPASTAFPQEPHSGSPAAAVNGNQPSFPPNSSGRGGGTPDANSLAPPGKAGGGSGPQPPPGLVYPCGACRSEVNDDQDAILCEASCQKWFHRECTGMTESAYGLLTTEASAVWACDLCLKTKEIQSVYIREGMGQLVAANDG

SEQ ID NO: 60510 - protein, 312 aa, Homo sapiens
MEEECRVLSIQSHVIRGYVGNRAATFPLQVLGFEIDAVNSVQFSNHTGYAHWKGQVLNSDELQELYEGLRLNNMNKYDYVLTGYTRDKSFLAMVVDIVQELKQQNPRLVYVCDPVLGDKWDGEGSMYVPEDLLPVYKEKVVPLADIITPNQFEAELLSGRKIHSQEEALRVMDMLHSMGPDTVVITSSDLPSPQGSNYLIVLGSQRRRNPAGSVVMERIRMDIRKVDAVFVGTGDLFAAMLLAWTHKHPNNLKVACEKTVSTLHHVLQRTIQCAKAQAGEGVRPSPMQLELRMVQSKRDIEDPEIVVQATVL

SEQ ID NO: 60511 - protein, 284 aa, Homo sapiens
MEEECRVLSIQSHVIRGYVGNRAATFPLQVLGFEIDAVNSVQFSNHTGYAHWKGQVLNSDELQELYEGLRLNNMNKYDYVLTVCDPVLGDKWDGEGSMYVPEDLLPVYKEKVVPLADIITPNQFEAELLSGRKIHSQEEALRVMDMLHSMGPDTVVITSSDLPSPQGSNYLIVLGSQRRRNPAGSVVMERIRMDIRKVDAVFVGTGDLFAAMLLAWTHKHPNNLKVACEKTVSTLHHVLQRTIQCAKAQAGEGVRPSPMQLELRMVQSKRDIEDPEIVVQATVL

SEQ ID NO: 60512 - protein, 773 aa, Homo sapiens
MGKNLKEAVKMLEDSQRRTEEENGKKLISGDIPGPLQGSGQDMVSILQLVQNLMHGDEDEEPQSPRIQNIGEQGHMALLGHSLGAYISTLDKEKLRKLTTRILSDTTLWLCRIFRYENGCAYFHEEEREGLAKICRLAIHSRYEDFVVDGFNVLYNKKPVIYLSAAARPGLGQYLCNQLGLPFPCLCRVPCNTVFGSQHQMDVAFLEKLIKDDIERGRLPLLLVANAGTAAVGHTDKIGRLKELCEQYGIWLHVEGVNLATLALGYVSSSVLAAAKCDSMTMTPGPWLGLPAVPAVTLYKHDDPALTLVAGLTSNKPTDKLRALPLWLSLQYLGLDGFVERIKHACQLSQRLQESLKKVNYIKILVEDELSSPVVVFRFFQELPGSDPVFKAVPVPNMTPSGVGRERHSCDALNRWLGEQLKQLVPASGLTVMDLEAEGTCLRFSPLMTAAVLGTRGEDVDQLVACIESKLPVLCCTLQLREEFKQEVEATAGLLYVDDPNWSGIGVVRYEHANDDKSSLKSDPEGENIHAGLLKKLNELESDLTFKIGPEYKSMKSCLYVGMASDNVDAAELVETIAATAREIEENSRLLENMTEVVRKGIQEAQVELQKASEERLLEEGVLRQIPVVGSVLNWFSPVQALQKGRTFNLTAGSLESTEPIYVYKAQGAGVTLPPTPSGSRTKQRLPGQKPFKRSLRGSDALSETSSVSHIEDLEKVERLSSGPEQITLEASSTEGHPGAPSPQHTDQTEAFQKGVPHPEDDHSQVEGPESLR

SEQ ID NO: 60513 - protein, 788 aa, Homo sapiens
MDASLEKIADPTLAEMGKNLKEAVKMLEDSQRRTEEENGKKLISGDIPGPLQGSGQDMVSILQLVQNLMHGDEDEEPQSPRIQNIGEQGHMALLGHSLGAYISTLDKEKLRKLTTRILSDTTLWLCRIFRYENGCAYFHEEEREGLAKICRLAIHSRYEDFVVDGFNVLYNKKPVIYLSAAARPGLGQYLCNQLGLPFPCLCRVPCNTVFGSQHQMDVAFLEKLIKDDIERGRLPLLLVANAGTAAVGHTDKIGRLKELCEQYGIWLHVEGVNLATLALGYVSSSVLAAAKCDSMTMTPGPWLGLPAVPAVTLYKHDDPALTLVAGLTSNKPTDKLRALPLWLSLQYLGLDGFVERIKHACQLSQRLQESLKKVNYIKILVEDELSSPVVVFRFFQELPGSDPVFKAVPVPNMTPSGVGRERHSCDALNRWLGEQLKQLVPASGLTVMDLEAEGTCLRFSPLMTAAVLGTRGEDVDQLVACIESKLPVLCCTLQLREEFKQEVEATAGLLYVDDPNWSGIGVVRYEHANDDKSSLKSDPEGENIHAGLLKKLNELESDLTFKIGPEYKSMKSCLYVGMASDNVDAAELVETIAATAREIEENSRLLENMTEVVRKGIQEAQVELQKASEERLLEEGVLRQIPVVGSVLNWFSPVQALQKGRTFNLTAGSLESTEPIYVYKAQGAGVTLPPTPSGSRTKQRLPGQKPFKRSLRGSDALSETSSVSHIEDLEKVERLSSGPEQITLEASSTEGHPGAPSPQHTDQTEAFQKGVPHPEDDHSQVEGPESLR

SEQ ID NO: 60514 - protein, 697 aa, Homo sapiens
MGKNLKEAVKMLEDSQRRTEEENGKKLISGDIPGPLQGRYENGCAYFHEEEREGLAKICRLAIHSRYEDFVVDGFNVLYNKKPVIYLSAAARPGLGQYLCNQLGLPFPCLCRVPCNTVFGSQHQMDVAFLEKLIKDDIERGRLPLLLVANAGTAAVGHTDKIGRLKELCEQYGIWLHVEGVNLATLALGYVSSSVLAAAKCDSMTMTPGPWLGLPAVPAVTLYKHDDPALTLVAGLTSNKPTDKLRALPLWLSLQYLGLDGFVERIKHACQLSQRLQESLKKVNYIKILVEDELSSPVVVFRFFQELPGSDPVFKAVPVPNMTPSGVGRERHSCDALNRWLGEQLKQLVPASGLTVMDLEAEGTCLRFSPLMTAAVLGTRGEDVDQLVACIESKLPVLCCTLQLREEFKQEVEATAGLLYVDDPNWSGIGVVRYEHANDDKSSLKSDPEGENIHAGLLKKLNELESDLTFKIGPEYKSMKSCLYVGMASDNVDAAELVETIAATAREIEENSRLLENMTEVVRKGIQEAQVELQKASEERLLEEGVLRQIPVVGSVLNWFSPVQALQKGRTFNLTAGSLESTEPIYVYKAQGAGVTLPPTPSGSRTKQRLPGQKPFKRSLRGSDALSETSSVSHIEDLEKVERLSSGPEQITLEASSTEGHPGAPSPQHTDQTEAFQKGVPHPEDDHSQVEGPESLR

SEQ ID NO: 60515 - protein, 760 aa, Homo sapiens
MDASLEKIADPTLAEMGKNLKEAVKMLEDSQRTEEENGKKLISGDIPGPLQGRIQNIGEQGHMALLGHSLGAYISTLDKEKLRKLTTRILSDTTLWLCRIFRYENGCAYFHEEEREGLAKICRLAIHSRYEDFVVDGFNVLYNKKPVIYLSAAARPGLGQYLCNQLGLPFPCLCRVPCNTVFGSQHQMDVAFLEKLIKDDIERGRLPLLLVANAGTAAVGHTDKIGRLKELCEQYGIWLHVEGVNLATLALGYVSSSVLAAAKCDSMTMTPGPWLGLPAVPAVTLYKHDDPALTLVAGLTSNKPTDKLRALPLWLSLQYLGLDGFVERIKHACQLSQRLQESLKKVNYIKILVEDELSSPVVVFRFFQELPGSDPVFKAVPVPNMTPSGVGRERHSCDALNRWLGEQLKQLVPASGLTVMDLEAEGTCLRFSPLMTAAVLGTRGEDVDQLVACIESKLPVLCCTLQLREEFKQEVEATAGLLYVDDPNWSGIGVVRYEHANDDKSSLKSDPEGENIHAGLLKKLNELESDLTFKIGPEYKSMKSCLYVGMASDNVDAAELVETIAATAREIEENSRLLENMTEVVRKGIQEAQVELQKASEERLLEEGVLRQIPVVGSVLNWFSPVQALQKGRTFNLTAGSLESTEPIYVYKAQGAGVTLPPTPSGSRTKQRLPGQKPFKRSLRGSDALSETSSVSHIEDLEKVERLSSGPEQITLEASSTEGHPGAPSPQHTDQTEAFQKGVPHPEDDHSQVEGPESLR

SEQ ID NO: 60516 - protein, 429 aa, Homo sapiens
LSSTLRRIADPTLAEMGKNLKEAVKMLEDSQRRTEEENGKKLISGDIPGPLQGSGQDMVSILQLVQNLMHGDEDEEPQSPRIQNIGEQGHMALLGHSLGAYISTLDKEKLRKLTTRILSDTTLWLCRIFRYENGCAYFHEEEREGLAKICRLAIHSRYEDFVVDGFNVLYNKKPVIYLSAAARPGLGQYLCNQDVAFLEKLIKDDIERGRLPLLLVANAGTAAVGHTDKIGRLKELCEQYGIWLHVEGVNLATLALGYVSSSVLAAAKCDSMTMTPGPWLGLPAVPAVTLYKHDDPALTLVAGLTSNKPTDKLRALPLWLSLQYLGLDGFVERIKHACQLSQRLQESLKKVNYIKILVEDELSSPVVVFRFFQELPGSDPVFKAVPVPNMTPSGVGRERHSCDALNRWVRMAVTPLSFQVPVHHHPTCW

SEQ ID NO: 60517 - protein, 498 aa, Homo sapiens
MDASLEKIADPTLAEMGKNLKEAVKMLEDSQRRTEEENGKKLISGDIPGPLQGSGQDMVSILQLVQNLMHGDEDEEPQSPRIQNIGEQGHMALLGHSLGAYISTLDKEKLRKLTTRILSDTTLWLCRIFRYENGCAYFHEEEREGLAKICRLAIHSRYEDFVVDGFNVLYNKKPVIYLSAAARPGLGQYLCNQLGLPFPCLCRVPCNTVFGSQHQMDVAFLEKLIKDDIERGRLPLLLVANAGTAAVGHTDKIGRLKELCEQYGIWLHVEGVNLATLALGYVSSSVLAAAKCDSMTMTPGPWLGLPAVPAVTLYKHDDPALTLVAGLTSNKPTDKLRALPLWLSLQYLGLDGFVERIKHACQLSQRLQESLKKVNYIKILVEDELSSPVVVFRFFQELPGSDPVFKAVPVPNMTPSGVGRERHSCDALNRWLGEQLKQLVPASGLTVMDLEAEGTCLRFSPLMTAAGWSHCGTTTRYDCVRSRLTTRLPGSTGEQAPP

SEQ ID NO: 60518 - protein, 204 aa, Homo sapiens
MTMTPGPWLGLPAVPAVTLYKHDDPALTLVAGLTSNKPTDKLRALPLWLSLQYLGLDGFVERIKHACQLSQRLQESLKKVNYIKILVEDELSSPVVVFRFFQELPGSDPVFKAVPVPNMTPSGVGRERHSCDALNRWLGEQLKQLVPASGLTVMDLEAEGTCLRFSPLMTAAGWSHCGTTTRYDCVRSRLTTRLPGSTGEQAPP

SEQ ID NO: 60519 - protein, 261 aa, Homo sapiens
MTCWLRGVTATFGRPAEWPGYLSHLCGRSAAMDLGPMRKSYRGDREAFEETHLTSLDPVKQFAAWFEEAVQCPDIGEANAMCLATCTRDGKPSARMLLLKGFGKDGFRFFTNFESRKGKELDSNPFASLVFYWEPLNRQVRVEGPVKKLPEEEAECYFHSRPKSSQIGAVVSHQSSVIPDREYLRKKNEELEQLYQDQEVPKPKSWGGYVLYPQVMEFWQGQTNRLHDRIVFRRGLPTGDSPLGPMTHRGEEDWLYERLAP

SEQ ID NO: 60520 - protein, 218 aa, Homo sapiens
MTCWLRGVTATFGRPAEWPGYLSHLCGRSAAMDLGPMRKSYRGDREAFEETHLTSLDPVKQFAAWFEEAVQCPDIGEANAMCLATCTRDGKPSARMLLLKGFGKDGFRFFTNFESRKGKELDSNPFASLVFYWEPLNRQYLRKKNEELEQLYQDQEVPKPKSWGGYVLYPQVMEFWQGQTNRLHDRIVFRRGLPTGDSPLGPMTHRGEEDWLYERLAP

SEQ ID NO: 60521 - protein, 166 aa, Homo sapiens
MLLLKGFGKDGFRFFTNFESRKGKELDSNPFASLVFYWEPLNRQVRVEGPVKKLPEEEAECYFHSRPKSSQIGAVVSHQSSVIPDREYLRKKNEELEQLYQDQEVPKPKSWGGYVLYPQVMEFWQGQTNRLHDRIVFRRGLPTGDSPLGPMTHRGEEDWLYERLAP

SEQ ID NO: 60522 - protein, 243 aa, Homo sapiens
MTCWLRGVTATFGRPAEWPGYLSHLCGRSAAMDLGPMRKSYRGDREAFEETHLTSLDPVKQFAAWFEEAVQCPDIGEANAMCLATCTRDGKPSARMLLLKGFGKDGFRFFTNFESRKGKELVRVEGPVKKLPEEEAECYFHSRPKSSQIGAVVSHQSSVIPDREYLRKKNEELEQLYQDQEVPKPKSWGGYVLYPQVMEFWQGQTNRLHDRIVFRRGLPTGDSPLGPMTHRGEEDWLYERLAP

SEQ ID NO: 60523 - protein, 365 aa, Homo sapiens
MASTESSLLRSLGLSPGPGSSEVELDCWFDEDFKFILLPVSYAVVFVLGLGLNAPTLWLFIFRLRPWDATATYMFHLALSDTLYVLSLPTLIYYYAAHNHWPFGTEICKFVRFLFYWNLYCSVLFLTCISVHRYLGICHPLRALRWGRPRLAGLLCLAVWLVVAGCLVPNLFFVTTSNKGTTVLCHDTTRPEEFDHYVHFSSAVMGLLFGVPCLVTLVCYGLMARRLYQPLPGSAQSSSRLRSLRTIAVVLTVFAVCFVPFHITRTIYYLARLLEADCRVLNIVNVVYKVTRPLASANSCLDPVLYLLTGDKYRRQLRQLCGGGKPQPRTAASSLALVSLPEDSSCRWAATPQDSSCSTPRADRL

SEQ ID NO: 60524 - protein, 328 aa, Homo sapiens
MEWDNGTGQALGLPPTTCVYRENFKQLLLPPVYSAVLAAGLPLNICVITQICTSRRALTRTAVYTLNLALADLLYACSLPLLIYNYAQGDHWPFGDFACRLVRFLFYANLHGSILFLTCISFQRYLGICHPLAPWHKRGGRRAAWLVCVAVWLAVTTQCLPTAIFAATGIQRNRTVCYDLSPPALATHYMPYGMALTVIGFLLPFAALLACYCLLACRLCRQDGPAEPVAQERRGKAARMAVVVAAAFAISFLPFHITKTAYLAVRSTPGVPCTVLEAFAAAYKGTRPFASANSVLDPILFYFTQKKFRRRPHELLQKLTAKWQRQGR

SEQ ID NO: 60525 - protein, 328 aa, Homo sapiens; identical to SEQ ID NO: 60524

SEQ ID NO: 60526 - protein, 328 aa, Homo sapiens; identical to SEQ ID NO: 60524

SEQ ID NO: 60527 - protein, 328 aa, Homo sapiens; identical to SEQ ID NO: 60524

SEQ ID NO: 60528 - protein, 245 aa, Homo sapiens
MEWDNGTGQALGLPPTTCVYRENFKQLLLPPVYSAVLAAGLPLNICVITQICTSRRALTRTAVYTLNLALADLLYACSLPLLIYNYAQGDHWPFGDFACRLVRFLFYANLHGSILFLTCISFQRYLGICHPLAPWHKRGGRRAAWLVCVAVWLAVTTQCLPTAIFAATGIQRNRTVCYDLSPPALATHYMPYGMALTVIGFLLPFAALLACYCLLACRLCRQDGPAEPVAQERRGKAARMAVVVA

SEQ ID NO: 60529 - protein, 328 aa, Homo sapiens; identical to SEQ ID NO: 60524

SEQ ID NO: 60530 - protein, 328 aa, Homo sapiens; identical to SEQ ID NO: 60524

SEQ ID NO: 60531 - protein, 328 aa, Homo sapiens; identical to SEQ ID NO: 60524

SEQ ID NO: 60532 - protein, 328 aa, Homo sapiens; identical to SEQ ID NO: 60524

SEQ ID NO: 60533 - protein, 128 aa, Homo sapiens
MEWDNGTGQALGLPPTTCVYRENFKQLLLPPVYSAVLAAGLPLNICVITQICTSRRALTRTAVYTLNLALADLLYACSLPLLIYNYAQGDHWPFGDFACRLVRFLFYANLHGSILFLTCISFQRYLGI

SEQ ID NO: 60534 - protein, 245 aa, Homo sapiens
MANNYKKIVLLKGLEVINDYHFRIVKSLLSNDLKLNPKMKEEYDKIQIADLMEEKFPGDAGLGKLIEFFKEIPTLGDLAETLKREKLKVANKIESIPVKGIIPSKKTKQKEVYPATPACTPSNRLTAKGAEETLGPQKRKKPSEEETGTKRSKMSKEQTRPSCSAGASTSTAMGRSPPPQTSSSAPPNTSSTEAYLMNLTLSLTAGSFLSCAVWGRDRELRNLELSATDSLSTAPIYYTPIPFAH

SEQ ID NO: 60535 - protein, 483 aa, Homo sapiens
MANNYKKIVLLKGLEVINDYHFRIVKSLLSNDLKLNPKMKEEYDKIQIADLMEEKFPGDAGLGKLIEFFKEIPTLGDLAETLKREKLKVKGIIPSKKTKQKEVYPATPACTPSNRLTAKGAEETLGPQKRKKPSEEETGTKRSKMSKEQTRPSCSAGASTSTAMGRSPPPQTSSSAPPNTSSTESLKPLANRHATASKNIFREDPIIAMVLNATKVFKYESSENEQRRMFHATVATQTQFFHVKVLNINLKRKFIKKRIIIISNYSKRNSLLEVNEASSVSEAGPDQTFEVPKDIIRRAKKIPKINILHKQTSGYIVYGLFMLHTKIVNRKTTIYEIQDKTGSMAVVGKGECHNIPCEKGDKLRLFCFRLRKRENMSKLMSEMHSFIQIQKNTNQRSHDSRSMALPQEQSQHPKPSEASTTLPESHLKTPQMPPTTPSSSSFTKKDETHPGAQSSPANFRITSPTVAPPLSSDTSTNRHPAVP

SEQ ID NO: 60536 - protein, 492 aa, Homo sapiens
MANNYKKIVLLKGLEVINDYHFRIVKSLLSNDLKLNPKMKEEYDKIQIADLMEEKFPGDAGLGKLIEFFKEIPTLGDLAETLKREKLKVANKIESIPVKGIIPSKKTKQKEVYPATPACTPSNRLTAKGAEETLGPQKRKKPSEEETGTKRSKMSKEQTRPSCSAGASTSTAMGRSPPPQTSSSAPPNTSSTESLKPLANRHATASKNIFREDPIIAMVLNATKVFKYESSENEQRRMFHATVATQTQFFHVKVLNINLKRKFIKKRIIIISNYSKRNSLLEVNEASSVSEAGPDQTFEVPKDIIRRAKKIPKINILHKQTSGYIVYGLFMLHTKIVNRKTTIYEIQDKTGSMAVVGKGECHNIPCEKGDKLRLFCFRLRKRENMSKLMSEMHSFIQIQKNTNQRSHDSRSMALPQEQSQHPKPSEASTTLPESHLKTPQMPPTTPSSSSFTKKDETHPGAQSSPANFRITSPTVAPPLSSDTSTNRHPAVP

SEQ ID NO: 60537 - protein, 452 aa, Homo sapiens
MANNYKKIVLLKGLEVINDYHFRIVKSLLSNDLKLNPKMKEEYDKIQIADLMEEKFPGDAGLGKLIEFFKEIPTLGDLAETLKREKLKVKGIIPSKKTKQKEVYPATPACTPSNRLTAKGAEETLGPQKRKKPSEEETGTKRSKMSKEQTRPSCSAGASTSTAMGRSPPPQTSSSAPPNTSSTESLKPLANRHATASKNIFREDPIIAMVLNATKVFKYESSENEQRRMFHATVATQTQFFHVKVLNINLKRKFIKKRIIIISNYSKRNSLLEVNEASSVSEAGPDQTFEVPKDIIRRAKKIPKINILHKQTSGYIVYGLFMLHTKIVNRKTTIYEIQDKTGSMAVVGKGECHNIPCEKGDKLRLFCFRLRKRENMSKLMSEMHSFIQIQKNTNQRSHDSRSMALPQEQSQHPKPSEASTTLPESHLKTPQMPPTTPSSSSFTKVTKDKDIK

SEQ ID NO: 60538 - protein, 461 aa, Homo sapiens
MANNYKKIVLLKGLEVINDYHFRIVKSLLSNDLKLNPKMKEEYDKIQIADLMEEKFPGDAGLGKLIEFFKEIPTLGDLAETLKREKLKVANKIESIPVKGIIPSKKTKQKEVYPATPACTPSNRLTAKGAEETLGPQKRKKPSEEETGTKRSKMSKEQTRPSCSAGASTSTAMGRSPPPQTSSSAPPNTSSTESLKPLANRHATASKNIFREDPIIAMVLNATKVFKYESSENEQRRMFHATVATQTQFFHVKVLNINLKRKFIKKRIIIISNYSKRNSLLEVNEASSVSEAGPDQTFEVPKDIIRRAKKIPKINILHKQTSGYIVYGLFMLHTKIVNRKTTIYEIQDKTGSMAVVGKGECHNIPCEKGDKLRLFCFRLRKRENMSKLMSEMHSFIQIQKNTNQRSHDSRSMALPQEQSQHPKPSEASTTLPESHLKTPQMPPTTPSSSSFTKVTKDKDIK

SEQ ID NO: 60539 - protein, 150 aa, Homo sapiens
MANNYKKIVLLKGLEVINDYHFRIVKSLLSNDLKLNPKMKEEYDKIQIADLMEEKFPGDAGLGKLIEFFKEIPTLGDLAETLKREKLKVANKIESIPVKGIIPSKKTKQKEVYPATPACTPSNRLTAKGAEETLGPQKRKKPSEEETGTK

SEQ ID NO: 60540 - protein, 132 aa, Homo sapiens
MATTVTLEKCGHNKGYKGLDNCRFCPGSQCCVEDGPESIDSIIDMDAVCKRVTTLGLDVSVTISQDAGRYLCDFTYYTSLYQSHGRSAFVHVPPLGKPYNADQLGRALRAIIEEMLDLLEQSEGKINYCHKH

SEQ ID NO: 60541 - protein, 209 aa, Homo sapiens
MEQPRKAVVVTGFGPFGEHTVNASWIAVQELEKLGLGDSVDLHVYEIPVEYQTVQRLIPALWEKHSPQLVVHVGVSGMATTVTLEKCGHNKGYKGLDNCRFCPGSQCCVEDGPESIDSIIDMDAVCKRVTTLGLDVSVTISQDAGRYLCDFTYYTSLYQSHGRSAFVHVPPLGKPYNADQLGRALRAIIEEMLDLLEQSEGKINYCHKH

SEQ ID NO: 60542 - protein, 202 aa, Homo sapiens
MKKARNDEYENLFNMIVEIPRWTNAKMEIATKEPMNPIKQYVKDGKLRYVANIFPYKGYIWNYGTLPQTWEDPHEKDKSTNCFGDNDPIDVCEIGSKILSCGEVIHVKILGILALIDEGETDWKLIAINANDPEASKFHGLRNIPVYTINRIVILPSLDRSQTSSLSYLPAHQDSCVPLDAALHVVLYFCSLLGLQSYLSCF

SEQ ID NO: 60543 - protein, 334 aa, Homo sapiens
MSALLRLLRTGAPAAACLRLGTSAGTGSRRAMALYHTEERGQPCSQNYRLFFKNVTGHYISPFHDIPLKVNSKEENGIPMKKARNDEYENLFNMIVEIPRWTNAKMEIATKEPMNPIKQYVKDGKLRYVANIFPYKGYIWNYGTLPQTWEDPHEKDKSTNCFGDNDPIDVCEIGSKILSCGEVIHVKILGILALIDEGETDWKLIAINANDPEASKFHDIDDVKKFKPGYLEATLNWFRLYKVPDGKPENQFAFNGEFKNKAFALEVIKSTHQCWKALLMKKCNGGAINCTNVQISDSPFRCTQEEARSLVESVSSSPNKESNEEEQVWHFLGK

SEQ ID NO: 60544 - protein, 305 aa, Homo sapiens
MSALLRLLRTGAPAAACLRLGTSAGTGSRRAMALYHTEERGQPCSQNYRLFFKNVTGHYISPFHDIPLKVNSKEENGIPMKKARNDEYENLFNMIVEIPRWTNAKMEIATKEPMNPIKQYVKDGKLRYVANIFPYKGYIWNYGTLPQILSCGEVIHVKILGILALIDEGETDWKLIAINANDPEASKFHDIDDVKKFKPGYLEATLNWFRLYKVPDGKPENQFAFNGEFKNKAFALEVIKSTHQCWKALLMKKCNGGAINCTNVQISDSPFRCTQEEARSLVESVSSSPNKESNEEEQVWHFLGK

SEQ ID NO: 60545 - protein, 168 aa, Homo sapiens
MSALLRLLRTGAPAAACLRLGTSAGTGSRRAMALYHTEERGQPCSQNYRLFFNIDDVKKFKPGYLEATLNWFRLYKVPDGKPENQFAFNGEFKNKAFALEVIKSTHQCWKALLMKKCNGGAINCTNVQISDSPFRCTQEEARSLVESVSSSPNKESNEEEQVWHFLGK

SEQ ID NO: 60546 - protein, 349 aa, Homo sapiens
MSALLRLLRTGAPAAACLRLGTSAGTGSRRAMALYHTEERGQPCSQNYRLFFKNVTGHYISPFHDIPLKVNSKEDTEAQGIFIDLSKIWENGIPMKKARNDEYENLFNMIVEIPRWTNAKMEIATKEPMNPIKQYVKDGKLRYVANIFPYKGYIWNYGTLPQTWEDPHEKDKSTNCFGDNDPIDVCEIGSKILSCGEVIHVKILGILALIDEGETDWKLIAINANDPEASKFHDIDDVKKFKPGYLEATLNWFRLYKVPDGKPENQFAFNGEFKNKAFALEVIKSTHQCWKALLMKKCNGGAINCTNVQISDSPFRCTQEEARSLVESVSSSPNKESNEEEQVWHFLGK

SEQ ID NO: 60547 - protein, 316 aa, Homo sapiens
MSALLRLLRTGAPAAACLRLGTSAGTGSRRAMALYHTEERGQPCSQNYRLFFKNVTGHYISPFHDIPLKVNSKEENGIPMKKARNDEYEIATKEPMNPIKQYVKDGKLRYVANIFPYKGYIWNYGTLPQTWEDPHEKDKSTNCFGDNDPIDVCEIGSKILSCGEVIHVKILGILALIDEGETDWKLIAINANDPEASKFHDIDDVKKFKPGYLEATLNWFRLYKVPDGKPENQFAFNGEFKNKAFALEVIKSTHQCWKALLMKKCNGGAINCTNVQISDSPFRCTQEEARSLVESVSSSPNKESNEEEQVWHFLGK

SEQ ID NO: 60548 - protein, 232 aa, Homo sapiens
MSALLRLLRTGAPAAACLRLGTSAGTGSRRAMALYHTEERGQPCSQNYRLFFKNVTGHYISPFHDIPLKVNSKEILSCGEVIHVKILGILALIDEGETDWKLIAINANDPEASKFHDIDDVKKFKPGYLEATLNWFRLYKVPDGKPENQFAFNGEFKNKAFALEVIKSTHQCWKALLMKKCNGGAINCTNVQISDSPFRCTQEEARSLVESVSSSPNKESNEEEQVWHFLGK

SEQ ID NO: 60549 - protein, 319 aa, Homo sapiens
MSVGFIGAGQLAFALAKGFTAAGVLAAHKIMASSPDMDLATVSALRKMGVKLTPHNKETVQHSDVLFLAVKPHIIPFILDEIGADIEDRHIVVSCAAGVTISSIEKKLSAFRPAPRVIRCMTNTPVVVREGATVYATGTHAQVEDGRLMEQLLSSVGFCTEVEEDLIDAVTGLSGSGPAYAFTALDALADGGVKMGLPRRLAVRLGAQALLGAAKMLLHSEQHPGQLKDNVSSPGGATIHALHVLESGGFRSLLINAVEASCIRTRELQSMADQEQVSPAAIKKTILDKVKLDSPAGTALSPSGHTKLLPRSLAPAGKD

SEQ ID NO: 60550 - protein, 316 aa, Homo sapiens
MSVGFIGAGQLAFALAKGFTAAGVLAAHKIMASSPDMDLATVSALRKMGVKLTPHNKETVQHSDVLFLAVKPHIIPFILDEIGADIEDRHIVVSCAAGVTISSIEKKLSAFRPAPRVIRCMTNTPVVVREGATVYATGTHAQVEDGRLMEQLLSSVGFCTEVEEDLIDAVTGLSGSGPAYAFTALDALADGGVKMGLPRRLAVRLGAQALLGAAKMLLHSEQHPGQLKDNVSSPGGATIHALHVLESGGFRSLLINAVEASCIRTRELQSMADQEQVSPAAIKKTILDKDHLPLELGSPEGLHPLLLQYQLARAPS

SEQ ID NO: 60551 - protein, 346 aa, Homo sapiens
MVGGGRRVGRDEPVPSVGALGQGSPDSMSVGFIGAGQLAFALAKGFTAAGVLAAHKIMASSPDMDLATVSALRKMGVKLTPHNKETVQHSDVLFLAVKPHIIPFILDEIGADIEDRHIVVSCAAGVTISSIEKKLSAFRPAPRVIRCMTNTPVVVREGATVYATGTHAQVEDGRLMEQLLSSVGFCTEVEEDLIDAVTGLSGSGPAYAFTALDALADGGVKMGLPRRLAVRLGAQALLGAAKMLLHSEQHPGQLKDNVSSPGGATIHALHVLESGGFRSLLINAVEASCIRTRELQSMADQEQVSPAAIKKTILDKVKLDSPAGTALSPSGHTKLLPRSLAPAGKD

SEQ ID NO: 60552 - protein, 272 aa, Homo sapiens
MSVGFIGAGQLAFALAKGFTAAGVLAAHKIMASSPDMDLATVSALRKMGVKLTPHNKETVQHSDVLFLAVKPHIIPFILDEIGADIEDRHIVVSCAAGVTISSIEKKLSAFRPAPRVIRCMTNTPVVVREGATVYATGTHAQVEDGRLMEQLLSSVGFCTEVEEDLIDAVTGLSGSGPAYAFTALDALADGGVKMGLPRRLAVRLGAQALLGGCQDAAALRTAPRPAQGQRQLSWWGHHPCLACAGEWGLPLPAHQRCGGLLHPHTGAAVHG

SEQ ID NO: 60553 - protein, 240 aa, Homo sapiens
MSVGFIGAGQLAFALAKGFTAAGVLAAHKIMASSPDMDLATVSALRKMGVKLTPHNKETVQHSDVLFLAVKPHIISIEKLSAFRPAPRVIRCMTNTPVVVREGATVYATGTHAQVEDGRLMEQLLSSVGFCTEVEEDLIDAVTGLSGSGPAYGAAKMLLHSEQHPGQLKDNVSSPGGATIHALHVLESGGFRSLLINAVEASCIRTRWAPALPASLVSSPCMAEASLTHICSFTHSADTY

SEQ ID NO: 60554 - protein, 529 aa, Homo sapiens
MLKFRTVHGGLRLLGIRRTSTAPAASPNVRRLEYKPIKKVMVANRGEIAIRVFRACTELGIRTVAIYSEQDTGQMHRQKADEAYLIGRGLAPVQAYLHIPDIIKVAKENNVDAVHPGYGFLSERADFAQACQDAGVRFIGPSPEVVRKMGDKVEARAIAIAAGVPVVPGTDAPITSLHEAHEFSNTYGFPIIFKAAYGGGGRGMRVVHSYEELEENYTRAYSEALAAFGNGALFVEKFIEKPRHIEVQILGDQYGNILHLYERDCSIQRRHQKVVEIAPAAHLDPQLRTRLTSDSVKLAKQVGYENAGTVEFLVDRHGKHYFIEVNSRLQVEHTVTEEITDVDLVHAQIHVAEGRSLPDLGLRQENIRINGCAIQCRVTTEDPARSFQPDTGRIEVFRSGEGMGIRLDNASAFQGAVISPHYDSLLVKVIAHGKDHPTAATKMSRALAEFRVRGVKVRRHQAQPLAAALGRPCGQEARRPQAAVTAPTGPGSPTLVRVPPAARVLSSRLGGPSQTTPETSTEVSPTILL

SEQ ID NO: 60555 - protein, 1178 aa, Homo sapiens
MLKFRTVHGGLRLLGIRRTSTAPAASPNVRRLEYKPIKKVMVANRGEIAIRVFRACTELGIRTVAIYSEQDTGQMHRQKADEAYLIGRGLAPVQAYLHIPDIIKVAKENNVDAVHPGYGFLSERADFAQACQDAGVRFIGPSPEVVRKMGDKVEARAIAIAAGVPVVPGTDAPITSLHEAHEFSNTYGFPIIFKAAYGGGGRGMRVVHSYEELEENYTRAYSEALAAFGNGALFVEKFIEKPRHIEVQILGDQYGNILHLYERDCSIQRRHQKVVEIAPAAHLDPQLRTRLTSDSVKLAKQVGYENAGTVEFLVDRHGKHYFIEVNSRLQVEHTVTEEITDVDLVHAQIHVAEGRSLPDLGLRQENIRINGCAIQCRVTTEDPARSFQPDTGRIEVFRSGEGMGIRLDNASAFQGAVISPHYDSLLVKVIAHGKDHPTAATKMSRALAEFRVRGVKTNIAFLQNVLNNQQFLAGTVDTQFIDENPELFQLRPAQNRAQKLLHYLGHVMVNGPTTPIPVKASPSPTDPVVPAVPIGPPPAGFRDILLREGPEGFARAVRNHPGLLLMDTTFRDAHQSLLATRVRTHDLKKIAPYVAHNFSKLFSMENWGGATFDVAMRFLYECPWRRLQELRELIPNIPFQMLLRGANAVGYTNYPDNVVFKFCEVAKENGMDVFRVFDSLNYLPNMLLGMEAAGSAGGVVEAAISYTGDVADPSRTKYSLQYYMGLAEELVRAGTHILCIKDMAGLLKPTACTMLVSSLRDRFPDLPLHIHTHDTSGAGVAAMLACAQAGADVVDVAADSMSGMTSQPSMGALVACTRGTPLDTEVPMERVFDYSEYWEGARGLYAAFDCTATMKSGNSDVYENEIPGGQYTNLHFQAHSMGLGSKFKEVKKAYVEANQMLGDLIKVTPSSKIVGDLAQFMVQNGLSRAEAEAQAEELSFPRSVVEFLQGYIGVPHGGFPEPFRSKVLKDLPRVEGRPGASLPPLDLQALEKELVDRHGEEVTPEDVLSAAMYPDVFAHFKDFTATFGPLDSLNTRLFLQGPKIAEEFEVELERGKTLHIKALAVSDLNRAGQRQVFFELNGQLRSILVKDTQAMKEMHFHPKALKDVKGQIGAPMPGKVIDIKVVAGAKVAKGQPLCVLSAMKMETVVTSPMEGTVRKVHVTKDMTLEGDDLILEIE

SEQ ID NO: 60556 - protein, 1178 aa, Homo sapiens; identical to SEQ ID NO: 60555

SEQ ID NO: 60557 - protein, 1178 aa, Homo sapiens; identical to SEQ ID NO: 60555

SEQ ID NO: 60558 - protein, 204 aa, Homo sapiens
MRKMLAAVSRVLSGASQKPASRVLVASRNFANDATFEIKKCDLHRLEEGPPVTTVLTREDGLKYYRMMQTVRRMELKADQLYKQKIIRGFCHLCDGQFLLPLTQEACCVGLEAGINPTDHLITAYRAHGFTFTRGLSVREILAELTGRKGGCAKGKGGSMHMYAKNFYGGNGIVGAQVPLGAGIALACKYNGKDEVCLTLYGDG

SEQ ID NO: 60559 - protein, 109 aa, Homo sapiens
MELQTYRYHGHSMSDPGVSYRTREEIQEVRSKSDPIMLLKDRMVNSNLASVEELKEIDVEVRKEIEDAAQFATADPEPPLEELGYHIYSSDPPFEVRGANQWIKFKSVS

SEQ ID NO: 60560 - protein, 180 aa, Homo sapiens
MRKMLAAVSRVLSGASQKPASRVLVASRNFANDATFEIKKCDLHRLEEGPPVTTVLTREDGLKYYRMMQTVRRMELKADQLYKQKIIRGFCHLCDGQEACCVGLEAGINPTDHLITAYRAHGFTFTRGLSVREILAELTGRKGGCAKGKGGSMHMYAKNFYGGNGIVGAQVVKDEDCVLL

SEQ ID NO: 60561 - protein, 428 aa, Homo sapiens
MRKMLAAVSRVLSGASQKPRHGLATLPSLVSISRLKQSSHLGLPKCWDYSHSLKTRQASRVLVASRNFANDATFEIKKCDLHRLEEGPPVTTVLTREDGLKYYRMMQTVRRMELKADQLYKQKIIRGFCHLCDGQEACCVGLEAGINPTDHLITAYRAHGFTFTRGLSVREILAELTGRKGGCAKGKGGSMHMYAKNFYGGNGIVGAQVPLGAGIALACKYNGKDEVCLTLYGDGAANQGQIFEAYNMAALWKLPCIFICENNRYGMGTSVERAAASTDYYKRGDFIPGLRVDGMDILCVREATRFAAAYCRSGKGPILMELQTYRYHGHSMSDPGVSYRTREEIQEVRSKSDPIMLLKDRMVNSNLASVEELKEIDVEVRKEIEDAAQFATADPEPPLEELGYHIYSSDPPFEVRGANQWIKFKSVS

SEQ ID NO: 60562 - protein, 121 aa, Homo sapiens
MRKMLAAVSRVLSGASQKPFAGSPPPRHLTVGRKLSSRYEVTFESAQASRVLVASRNFANDATFEIKKCDLHRLEEGPPVTTVLTREDGLKYYRMMQTVRRMELKADQLYKQKIIRGFCHL

SEQ ID NO: 60563 - protein, 121 aa, Homo sapiens; identical to SEQ ID NO: 60562

SEQ ID NO: 60564 - protein, 390 aa, Homo sapiens
MRKMLAAVSRVLSGASQKPASRVLVASRNFANDATFEIKKCDLHRLEEGPPVTTVLTREDGLKYYRMMQTVRRMELKADQLYKQKIIRGFCHLCDGQEACCVGLEAGINPTDHLITAYRAHGFTFTRGLSVREILAELTGRKGGCAKGKGGSMHMYAKNFYGGNGIVGAQVPLGAGIALACKYNGKDEVCLTLYGDGAANQGQIFEAYNMAALWKLPCIFICENNRYGMGTSVERAAASTDYYKRGDFIPGLRVDGMDILCVREATRFAAAYCRSGKGPILMELQTYRYHGHSMSDPGVSYRTREEIQEVRSKSDPIMLLKDRMVNSNLASVEELKEIDVEVRKEIEDAAQFATADPEPPLEELGYHIYSSDPPFEVRGANQWIKFKSVS

SEQ ID NO: 60565 - protein, 205 aa, Homo sapiens
MRKMLAAVSRVLSGASQKPRHGLATLPSLVSISRLKQSSHLGLPKCWDYSHSLKTRQASRVLVASRNFANDATFEIKKCDLHRLEEGPPVTTVLTREDGLKYYRMMQTVRRMELKADQLYKQKIIRGFCHLCDGQEACCVGLEAGINPTDHLITAYRAHGFTFTRGLSVREILAELTGRKGGCAKGKGGSMHMYAKNFYGGNGIV

SEQ ID NO: 60566 - protein, 359 aa, Homo sapiens
MRKMLAAVSRVLSGASQKPASRVLVASRNFANDATFEIKKCDLHRLEEGPPVTTVLTREDGLKYYRMMQTVRRMELKADQLYKQKIIRGFCHLCDGQEACCVGLEAGINPTDHLITAYRAHGFTFTRGLSVREILAELTGRKGGCAKGKGGSMHMYAKNFYGGNGIVGAQGQIFEAYNMAALWKLPCIFICENNRYGMGTSVERAAASTDYYKRGDFIPGLRVDGMDILCVREATRFAAAYCRSGKGPILMELQTYRYHGHSMSDPGVSYRTREEIQEVRSKSDPIMLLKDRMVNSNLASVEELKEIDVEVRKEIEDAAQFATADPEPPLEELGYHIYSSDPPFEVRGANQWIKFKSVS

SEQ ID NO: 60567 - protein, 42 aa, Homo sapiens
ANQWIKFKSVKGRRRRGYTFRGLPDSVLNLVKEEENPVNEIQ

SEQ ID NO: 60568 - protein, 397 aa, Homo sapiens
MRKMLAAVSRVLSGASQKPASRVLVASRNFANDATFEIKKCDLHRLEEGPPVTTVLTREDGLKYYRMMQTVRRMELKADQLYKQKIIRGFCHLCDGQFLLPLTQEACCVGLEAGINPTDHLITAYRAHGFTFTRGLSVREILAELTGRKGGCAKGKGGSMHMYAKNFYGGNGIVGAQVPLGAGIALACKYNGKDEVCLTLYGDGAANQGQIFEAYNMAALWKLPCIFICENNRYGMGTSVERAAASTDYYKRGDFIPGLRVDGMDILCVREATRFAAAYCRSGKGPILMELQTYRYHGHSMSDPGVSYRTREEIQEVRSKSDPIMLLKDRMVNSNLASVEELKEIDVEVRKEIEDAAQFATADPEPPLEELGYHIYSSDPPFEVRGANQWIKFKSVS

SEQ ID NO: 60569 - protein, 388 aa, Homo sapiens
MLAAFISRVLRRVAQKSARRVLVASRNSSNDATFEIKKCDLYLLEEGPPVTTVLTRAEGLKYYRMMLTVRRMELKADQLYKQKFIRGFCHLCDGQEACCVGLEAGINPSDHVITSYRAHGVCYTRGLSVRSILAELTGRRGGCAKGKGGSMHMYTKNFYGGNGIVGAQGPLGAGIALACKYKGNDEICLTLYGDGAANQGQIAEAFNMAALWKLPCVFICENNLYGMGTSTERAAASPDYYKRGNFIPGLKVDGMDVLCVREATKFAANYCRSGKGPILMELQTYRYHGHSMSDPGVSYRTREEIQEVRSKRDPIIILQDRMVNSKLATVEELKEIGAEVRKEIDDAAQFATTDPEPHLEELGHHIYSSDSSFEVRGANPWIKFKSVS

SEQ ID NO: 60570 - protein, 359 aa, Homo sapiens
MAAVSGLVRRPLREVSGLLKRRFHWTAPAALQVTVRDAINQGMDEELERDEKVFLLGEEVAQYDGAYKVSRGLWKKYGDKRIIDTPISEMGFAGIAVGAAMAGLRPICEFMTFNFSMQAIDQVINSAAKTYYMSGGLQPVPIVFRGPNGASAGVAAQHSQCFAAWYGHCPGLKVVSPWNSEDAKGLIKSAIRDNNPVVVLENELMYGVPFEFPPEAQSKDFLIPIGKAKIERQGTHITVVSHSRPVGHCLEAAAVLSKEGVECEVINMRTIRPMDMETIEASVMKTNHLVTVEGGWPQFGVGAEICARIMEGPAFNFLDAPAVRVTGADVPMPYAKILEDNSIPQVKDIIFAIKKTLNI

SEQ ID NO: 60571 - protein, 341 aa, Homo sapiens
MAAVSGLVRRPLREVTVRDAINQGMDEELERDEKVFLLGEEVAQYDGAYKVSRGLWKKYGDKRIIDTPISEMGFAGIAVGAAMAGLRPICEFMTFNFSMQAIDQVINSAAKTYYMSGGLQPVPIVFRGPNGASAGVAAQHSQCFAAWYGHCPGLKVVSPWNSEDAKGLIKSAIRDNNPVVVLENELMYGVPFEFPPEAQSKDFLIPIGKAKIERQGTHITVVSHSRPVGHCLEAAAVLSKEGVECEVINMRTIRPMDMETIEASVMKTNHLVTVEGGWPQFGVGAEICARIMEGPAFNFLDAPAVRVTGADVPMPYAKILEDNSIPQVKDIIFAIKKTLNI

SEQ ID NO: 60572 - protein, 341 aa, Homo sapiens
MAAVSGLVRRPLREVSGLLKRRFHWTAPAALQVTVRDAINQGMDEELERDEKVFLLGEEVAQYDGAYKVSRGLWKKYGDKRIIDTPISEMGFAGIAVGAAMAGLRPICEFMTFNFSMQAIDQVINSAAKTYYMSGVAAQHSQCFAAWYGHCPGLKVVSPWNSEDAKGLIKSAIRDNNPVVVLENELMYGVPFEFPPEAQSKDFLIPIGKAKIERQGTHITVVSHSRPVGHCLEAAAVLSKEGVECEVINMRTIRPMDMETIEASVMKTNHLVTVEGGWPQFGVGAEICARIMEGPAFNFLDAPAVRVTGADVPMPYAKILEDNSIPQVKDIIFAIKKTLNI

SEQ ID NO: 60573 - protein, 411 aa, Homo sapiens
MKAARFVLRSAGSLNGAGLVPREVEHFSRYSPSPLSMKQLLDFGSENACERTSFAFLRQELPVRLANILKEIDILPTQLVNTSSVQLVKSWYIQSLMDLVEFHEKSPDDQKALSDFVDTLIKVRNRHHNVVPTMAQGIIEYKDACTVDPVTNQNLQYFLDRFYMNRISTRMLMNQHILIFSDSQTGNPSHIGSIDPNCDVVAVVQDAFECSRMLCDQYYLSSPELKLTQVNGKFPDQPIHIVYVPSHLHHMLFELFKNAMRATVEHQENQPSLTPIEVIVVLGKEDLTIKISDRGGGVPLRIIDRLFSYTYSTAPTPVMDNSRNAPLAGFGYGLPISRLYAKYFQGDLNLYSLSGYGTDAIIYLKALSSESIEKLPVFNKSAFKHYQMSSEADDWCIPSREPKNLAKEVAM

SEQ ID NO: 60574 - protein, 375 aa, Homo sapiens
MKQLLDFGSENACERTSFAFLRQELPVRLANILKEIDILPTQLVNTSSVQLVKSWYIQSLMDLVEFHEKSPDDQKALSDFVDTLIKVRNRHHNVVPTMAQGIIEYKDACTVDPVTNQNLQYFLDRFYMNRISTRMLMNQHILIFSDSQTGNPSHIGSIDPNCDVVAVVQDAFECSRMLCDQYYLSSPELKLTQVNGKFPDQPIHIVYVPSHLHHMLFELFKNAMRATVEHQENQPSLTPIEVIVVLGKEDLTIKISDRGGGVPLRIIDRLFSYTYSTAPTPVMDNSRNAPLAGFGYGLPISRLYAKYFQGDLNLYSLSGYGTDAIIYLKALSSESIEKLPVFNKSAFKHYQMSSEADDWCIPSREPKNLAKEVAM

SEQ ID NO: 60575 - protein, 537 aa, Homo sapiens
MPAPTQLFFPLIRNCELSRIYGTACYCHHKHLCCSSSYIPQSRLRYTPHPAYATFCRPKENWWQYTQGRRYASTPQKFYLTPPQVNSILKANEYSFKVPEFDGKNVSSILGFDSNQLPANAPIEDRRSAATCLQTRGMLLGVFDGHAGCACSQAVSERLFYYIAVSLLPHETLLEIENAVESGRALLPILQWHKHPNDYFSKEASKLYFNSLRTYWQELIDLNTGESTDIDVKEALINAFKRLDNDISLEAQVGDPNSFLNYLVLRVAFSGATACVAHVDGVDLHVANTGDSRAMLGVQEEDGSWSAVTLSNDHNAQNERELERLKLEHPKSEAKSVVKQDRLLGLLMPFRAFGDVKFKWSIDLQKRVIESGPDQLNDNEYTKFIPPNYHTPPYLTAEPEVTYHRLRPQDKFLVLATDGLWETMHRQDVVRIVGEYLTGMHHQQPIAVGGYKVTLGQMHGLLTERRTKMSSVFEDQNAATHLIRHAVGNNEFGTVDHERLSKMLSLPEELARMYRDDITIIVVQFNSHVVGAYQNQE

SEQ ID NO: 60576 - protein, 562 aa, Homo sapiens
MCVCPGPRRIGIPVRSSSLPLFSDAMPAPTQLFFPLIRNCELSRIYGTACYCHHKHLCCSSSYIPQSRLRYTPHPAYATFCRPKENWWQYTQGRRYASTPQKFYLTPPQVNSILKANEYSFKVPEFDGKNVSSILGFDSNQLPANAPIEDRRSAATCLQTRGMLLGVFDGHAGCACSQAVSERLFYYIAVSLLPHETLLEIENAVESGRALLPILQWHKHPNDYFSKEASKLYFNSLRTYWQELIDLNTGESTDIDVKEALINAFKRLDNDISLEAQVGDPNSFLNYLVLRVAFSGATACVAHVDGVDLHVANTGDSRAMLGVQEEDGSWSAVTLSNDHNAQNERELERLKLEHPKSEAKSVVKQDRLLGLLMPFRAFGDVKFKWSIDLQKRVIESGPDQLNDNEYTKFIPPNYHTPPYLTAEPEVTYHRLRPQDKFLVLATDGLWETMHRQDVVRIVGEYLTGMHHQQPIAVGGYKVTLGQMHGLLTERRTKMSSVFEDQNAATHLIRHAVGNNEFGTVDHERLSKMLSLPEELARMYRDDITIIVVQFNSHVVGAYQNQE

SEQ ID NO: 60577 - protein, 537 aa, Homo sapiens; identical to SEQ ID NO: 60575

SEQ ID NO: 60578 - protein, 76 aa, Homo sapiens
MPAPTQLFFPLIRNCELSRIYGTACYCHHKHLCCSSSYIPQSRLRYTPHPAYATFCRPKENWWQYTQGRRYASTPQ

SEQ ID NO: 60579 - protein, 128 aa, Homo sapiens
MPAPTQLFFPLIRNCELSRIYGTACYCHHKHLCCSSSYIPQSRLRYTPHPAYATFCRPKENWWQYTQGRRYASTPQKFYLTPPQVNSILKANEYSFKVPEFDGKNVSSILGFDSNQLPANAPIEDRRS

SEQ ID NO: 60580 - protein, 232 aa, Homo sapiens
MPAPTQLFFPLIRNCELSRIYGTACYCHHKHLCCSSSYIPQSRLRYTPHPAYATFCRPKENWWQYTQGRRYASTPQKFYLTPPQVNSILKANEYSFKVPEFDGKNVSSILGFDSNQLPANAPIEDRRSAATCLQTRGMLLGVFDGHAGCACSQAVSERLFYYIAVSLLPHETLLEIENAVESGRALLPILQWHKHPNDYFSKEASKLYFNSLRTYWQELIDLNTGESTDIDV

SEQ ID NO: 60581 - protein, 72 aa, Homo sapiens
MPAPTQLFFPLIRNCELSRIYGTACYCHHKHLCCSSSYIPQSRLRYTPHPAYATFCRPKENWWQYTQGRRYA

SEQ ID NO: 60582 - protein, 537 aa, Homo sapiens; identical to SEQ ID NO: 60575

SEQ ID NO: 60583 - protein, 147 aa, Homo sapiens
MPAPTQLFFPLIRNCELSRIYGTACYCHHKHLCCSSSYIPQSRLRYTPHPAYATFCRPKENWWQYTQGRRYASTPQKFYLTPPQVNSILKANEYSFKVPEFDGKNVSSILGFDSNQLPANAPIEDRRSAATCLQTRGMLLGVFDGHA

SEQ ID NO: 60584 - protein, 488 aa, Homo sapiens
MADTFLEHLCLLDIDSEPVAARSTSIIATIGPASRSVERLKEMIKAGMNIARLNFSHGSHEYHAESIALDTKGPEIRTGILQGGPESEVELVKGSQVLVTVDPAFRTRGNANTVWVDYPNIVRVVPVGGRIYIDDGLISLVVQKIGPEGLVTQVENGGVLGSRKGVNLPGAQVDLPGLSEQDVRDLRFGVEHGVDIVFASFVRKASDVAAVRAALGPEGHGIKIISKIENHEGVKRFDEILEVSDGIMVARGDLGIEIPAEKVFLAQKMMIGRCNLAGKPVVCATQMLESMITKPRPTRAETSDVANAVLDGADCIMLSGETAKGNFPVEAVKMQHAIAREAEAAVYHRQLFEELRRAAPLSRDPTEVTAIGAVEAAFKCCAAAIIVLTTTGRSAQLLSRYRPRAAVIAVTRSAQAARQVHLCRGVFPLLYREPPEAIWADDVDRRVQFGIESGKLRGFLRVGDLVIVVTGWRPGSGYTNIMRVLSIS

SEQ ID NO: 60585 - protein, 574 aa, Homo sapiens
MSIQENISSLQLRSWVSKSQRDLAKSILIGAPGGPAGYLRRASVAQLTQELGTAFFQQQQLPAAMADTFLEHLCLLDIDSEPVAARSTSIIATIGPASRSVERLKEMIKAGMNIARLNFSHGSHEYHAESIANVREAVESFAGSPLSYRPVAIALDTKGPEIRTGILQGGPESEVELVKGSQVLVTVDPAFRTRGNANTVWVDYPNIVRVVPVGGRIYIDDGLISLVVQKIGPEGLVTQVENGGVLGSRKGVNLPGAQVDLPGLSEQDVRDLRFGVEHGVDIVFASFVRKASDVAAVRAALGPEGHGIKIISKIENHEGVKRFDEILEVSDGIMVARGDLGIEIPAEKVFLAQKMMIGRCNLAGKPVVCATQMLESMITKPRPTRAETSDVANAVLDGADCIMLSGETAKGNFPVEAVKMQHAIAREAEAAVYHRQLFEELRRAAPLSRDPTEVTAIGAVEAAFKCCAAAIIVLTTTGRSAQLLSRYRPRAAVIAVTRSAQAARQVHLCRGVFPLLYREPPEAIWADDVDRRVQFGIESGKLRGFLRVGDLVIVVTGWRPGSGYTNIMRVLSIS

SEQ ID NO: 60586 - protein, 543 aa, Homo sapiens
MEGPAGYLRRASVAQLTQELGTAFFQQQQLPAAMADTFLEHLCLLDIDSEPVAARSTSIIATIGPASRSVERLKEMIKAGMNIARLNFSHGSHEYHAESIANVREAVESFAGSPLSYRPVAIALDTKGPEIRTGILQGGPESEVELVKGSQVLVTVDPAFRTRGNANTVWVDYPNIVRVVPVGGRIYIDDGLISLVVQKIGPEGLVTQVENGGVLGSRKGVNLPGAQVDLPGLSEQDVRDLRFGVEHGVDIVFASFVRKASDVAAVRAALGPEGHGIKIISKIENHEGVKRFDEILEVSDGIMVARGDLGIEIPAEKVFLAQKMMIGRCNLAGKPVVCATQMLESMITKPRPTRAETSDVANAVLDGADCIMLSGETAKGNFPVEAVKMQHAIAREAEAAVYHRQLFEELRRAAPLSRDPTEVTAIGAVEAAFKCCAAAIIVLTTTGRSAQLLSRYRPRAAVIAVTRSAQAARQVHLCRGVFPLLYREPPEAIWADDVDRRVQFGIESGKLRGFLRVGDLVIVVTGWRPGSGYTNIMRVLSIS

SEQ ID NO: 60587 - protein, 599 aa, Homo sapiens
MSIQENISSLQLRSWVSKSQRDLAKSILIGAPGVPLTTQQCGADPQRGRPREVCSGMEGPAGYLRRASVAQLTQELGTAFFQQQQLPAAMADTFLEHLCLLDIDSEPVAARSTSIIATIGPASRSVERLKEMIKAGMNIARLNFSHGSHEYHAESIANVREAVESFAGSPLSYRPVAIALDTKGPEIRTGILQGGPESEVELVKGSQVLVTVDPAFRTRGNANTVWVDYPNIVRVVPVGGRIYIDDGLISLVVQKIGPEGLVTQVENGGVLGSRKGVNLPGAQVDLPGLSEQDVRDLRFGVEHGVDIVFASFVRKASDVAAVRAALGPEGHGIKIISKIENHEGVKRFDEILEVSDGIMVARGDLGIEIPAEKVFLAQKMMIGRCNLAGKPVVCATQMLESMITKPRPTRAETSDVANAVLDGADCIMLSGETAKGNFPVEAVKMQHAIAREAEAAVYHRQLFEELRRAAPLSRDPTEVTAIGAVEAAFKCCAAAIIVLTTTGRSAQLLSRYRPRAAVIAVTRSAQAARQVHLCRGVFPLLYREPPEAIWADDVDRRVQFGIESGKLRGFLRVGDLVIVVTGWRPGSGYTNIMRVLSIS

SEQ ID NO: 60588 - protein, 531 aa, Homo sapiens
MSKPHSEAGTAFIQTQQLHAAMADTFLEHMCRLDIDSPPITARNTGIICTIGPASRSVETLKEMIKSGMNVARLNFSHGTHEYHAETIKNVRTATESFASDPILYRPVAVALDTKGPEIRTGLIKGSGTAEVELKKGATLKITLDNAYMEKCDENILWLDYKNICKVVEVGSKIYVDDGLISLQVKQKGADFLVTEVENGGSLGSKKGVNLPGAAVDLPAVSEKDIQDLKFGVEQDVDMVFASFIRKASDVHEVRKVLGEKGKNIKIISKIENHEGVRRFDEILEASDGIMVARGDLGIEIPAEKVFLAQKMMIGRCNRAGKPVICATQMLESMIKKPRPTRAEGSDVANAVLDGADCIMLSGETAKGDYPLEAVRMQHLIAREAEAAMFHRKLFEELVRASSHSTDLMEAMAMGSVEASYKCLAAALIVLTESGRSAHQVARYRPRAPIIAVTRNPQTARQAHLYRGIFPVLCKDPVQEAWAEDVDLRVNFAMNVGKARGFFKKGDVVIVLTGWRPGSGFTNTMRVVPVP

SEQ ID NO: 60589 - protein, 366 aa, Homo sapiens
MSKPHSEAGTAFIQTQQLHAAMADTFLEHMCRLDIDSPPIKKGVNLPGAAVDLPAVSEKDIQDLKFGVEQDVDMVFASFIRKASDVHEVRKVLGEKGKNIKIISKIENHEGVRRFDEILEASDGIMVARGDLGIEIPAEKVFLAQKMMIGRCNRAGKPVICATQMLESMIKKPRPTRAEGSDVANAVLDGADCIMLSGETAKGDYPLEAVRMQHLIAREAEAAMFHRKLFEELVRASSHSTDLMEAMAMGSVEASYKCLAAALIVLTESGRSAHQVARYRPRAPIIAVTRNPQTARQAHLYRGIFPVLCKDPVQEAWAEDVDLRVNFAMNVGKARGFFKKGDVVIVLTGWRPGSGFTNTMRVVPVP

SEQ ID NO: 60590 - protein, 531 aa, Homo sapiens
MSKPHSEAGTAFIQTQQLHAAMADTFLEHMCRLDIDSPPITARNTGIICTIGPASRSVETLKEMIKSGMNVARLNFSHGTHEYHAETIKNVRTATESFASDPILYRPVAVALDTKGPEIRTGLIKGSGTAEVELKKGATLKITLDNAYMEKCDENILWLDYKNICKVVEVGSKIYVDDGLISLQVKQKGADFLVTEVENGGSLGSKKGVNLPGAAVDLPAVSEKDIQDLKFGVEQDVDMVFASFIRKASDVHEVRKVLGEKGKNIKIISKIENHEGVRRFDEILEASDGIMVARGDLGIEIPAEKVFLAQKMMIGRCNRAGKPVICATQMLESMIKKPRPTRAEGSDVANAVLDGADCIMLSGETAKGDYPLEAVRMQHLIAREAEAAIYHLQLFEELRRLAPITSDPTEATAVGAVEASFKCCSGAIIVLTKSGRSAHQVARYRPRAPIIAVTRNPQTARQAHLYRGIFPVLCKDPVQEAWAEDVDLRVNFAMNVGKARGFFKKGDVVIVLTGWRPGSGFTNTMRVVPVP

SEQ ID NO: 60591 - protein, 531 aa, Homo sapiens; identical to SEQ ID NO: 60588

SEQ ID NO: 60592 - protein, 458 aa, Homo sapiens
MSKPHSEAGTAFIQTQQLHAAMADTFLEHMCRLDIDSPPITARNTGIICTIGPASRSEVELKKGATLKITLDNAYMEKCDENILWLDYKNICKVVEVGSKIYVDDGLISLQVKQKGADFLVTEVENGGSLGSKKGVNLPGAAVDLPAVSEKDIQDLKFGVEQDVDMVFASFIRKASDVHEVRKVLGEKGKNIKIISKIENHEGVRRFDEILEASDGIMVARGDLGIEIPAEKVFLAQKMMIGRCNRAGKPVICATQMLESMIKKPRPTRAEGSDVANAVLDGADCIMLSGETAKGDYPLEAVRMQHLIAREAEAAIYHLQLFEELRRLAPITSDPTEATAVGAVEASFKCCSGAIIVLTKSGRSAHQVARYRPRAPIIAVTRNPQTARQAHLYRGIFPVLCKDPVQEAWAEDVDLRVNFAMNVGKARGFFKKGDVVIVLTGWRPGSGFTNTMRVVPVP

SEQ ID NO: 60593 - protein, 516 aa, Homo sapiens
MSPEAQPQRTKGPQQPCRSPIVKPGLPSFRPSSCTQPWLTHSWSTCAAWTLIHHPSQPGTLASSVPLYHAETIKNVRTATESFASDPILYRPVAVALDTKGPEIRTGLIKGSGTAEVELKKGATLKITLDNAYMEKCDENILWLDYKNICKVVEVGSKIYVDDGLISLQVKQKGADFLVTEVENGGSLGSKKGVNLPGAAVDLPAVSEKDIQDLKFGVEQDVDMVFASFIRKASDVHEVRKVLGEKGKNIKIISKIENHEGVRRFDEILEASDGIMVARGDLGIEIPAEKVFLAQKMMIGRCNRAGKPVICATQMLESMIKKPRPTRAEGSDVANAVLDGADCIMLSGETAKGDYPLEAVRMQHLIAREAEAAIYHLQLFEELRRLAPITSDPTEATAVGAVEASFKCCSGAIIVLTKSGRSAHQVARYRPRAPIIAVTRNPQTARQAHLYRGIFPVLCKDPVQEAWAEDVDLRVNFAMNVGKARGFFKKGDVVIVLTGWRPGSGFTNTMRVVPVP

SEQ ID NO: 60594 - protein, 403 aa, Homo sapiens
MAGAATQASLESAPRIMRLVAECSRSRARAGELWLPHGTVATPVFMPVGTQATMKGITTEQLDALGCRICLGNTYHLGLRPGPELIQKANGLHGFMNWPHNLLTDSGGFQMVSLVSLSEVTEEGVRFRSPYDGNETLLSPEKSVQIQNALGSDIIMQLDDVVSSTVTGPRVEEAMYRSIRWLDRCIAAHQRPDKQNLFAIIQGGLDADLRATCLEEMTKRDVPGFAIGGLSGGESKSQFWRMVALSTSRLPKDKPRYLMGVGYATDLVVCVALGCDMFDCVFPTRTARFGSALVPTGNLQLRKKVFEKDFGPIDPECTCPTCQKHSRAFLHALLHSDNTAALHHLTVHNIAYQLQLMSAVRTSIVEKRFPDFVRDFMGAMYGDPTLCPTWATDALASVGITLG

SEQ ID NO: 60595 - protein, 225 aa, Homo sapiens
MAGAATQASLESAPRIMRLVAECSRSRARAGELWLPHGTVATPVFMPVGTQATMKGITTEQLDALGCRICLGNTYHLGLRPGPELIQKANGLHGFMNWPHNLLTDSGGFQMVSLVSLSEVTEEGVRFRSPYDGNETLLSPEKSVQIQNALGSDIIMQLDDVVSSTVTGPRVEEAMYRPLGLVTGALLQVNPLAGPVHCSPSAAGQAEPLRHYPGWAGRRSPGHLP

SEQ ID NO: 60596 - protein, 698 aa, Homo sapiens
MAAAGAAVARSPGIGAGPALRARRSPPPRAARLPRLLVLLAAAAVGPGAGGAARLYRAGEDAVWVLDSGSVRGATANSSAAWLVQFYSSWCGHCIGYAPTWRALAGDVRDWASAIRVAALDCMEEKNQAVCHDYDIHFYPTFRYFKAFTKEFTTGENFKGPDRELRTVRQTMIDFLQNHTEGSRPPACPRLDPIQPSDVLSLLDNRGSHYVAIVFESNSSYLGREVILDLIPYESIVVTRALDGDKAFLEKLGVSSVPSCYLIYPNGSHGLINVVKPLRAFFSSYLKSLPDVRKKSLPLPEKPHKEENSEIVVWREFDKSKLYTVDLESGLHYLLRVELAAHKSLAGAELKTLKDFVTVLAKLFPGRPPVKKLLEMLQEWLASLPLDRIPYNAVLDLVNNKMRISGIFLTNHIKWVGCQGSRSELRGYPCSLWKLFHTLTVEASTHPDALVGTGFEDDPQAVLQTMRRYVHTFFGCKECGEHFEEMAKESMDSVKTPDQAILWLWKKHNMVNGRLAGHLSEDPRFPKLQWPTPDLCPACHEEIKGLASWDEGHVLTFLKQHYGRDNLLDTYSADQGDSSEGGTLARGEEEEKRLTPPEVSHGDRDTQSVRPPGALGPRPALPESLHHSLDGKLQSLDGPGAHKEVGGAAPFLGVDFSSLDMSLCVVLYVASSLFLMVMYFFFRVRSRRWKVKHHHPAV

SEQ ID NO: 60597 - protein, 315 aa, Homo sapiens
MEEKNQAVCHDYDIHFYPTFRYFKAFTKEFTTGENFKGPDRELRTVRQTMIDFLQNHTEGSRPPACPRLDPIHVKPLRAFFSSYLKSLPDVRKKSLPLPEKPHKEENSEIVVWREFDKSKLYTVDLESGLHYLLRVELAAHKSLAGAELKTLKDFVTVLAKLFPGRPPVKKLLEMLQEWLASLPLDRIPYNAVLDLVNNKMRISGIFLTNHIKWVGCQGSRSELRGYPCSLWKLFHTLTVEASTHPDALVGTGFEDDPQAVLQTMRRYVHTFFGCKECGEHFEEMAKESMDSVKTPDQAILWLWKKHNMVNGRLA

SEQ ID NO: 60598 - protein, 244 aa, Homo sapiens
MAAAAAAGEARRVLVYGGRGALGSRCVQAFRARNWWVASVDVVENEEASASIIVKMTDSFTEQADQVTAEVGKLLGEEKVDAILCVAGGWAGGNAKSKSLFKNCDLMWKQSIWTSTISSHLATKHLKEGGLLTLAGAKAALDGTPGMIGYGMAKGAVHQLCQSLAGKNSGMPPGAAAIAVLPVTLDTPMNRKSMPEADFSSWTPLEFLVETFHDWITGKNRPSSGSLIQVVTTEGRTELTPAYF

SEQ ID NO: 60599 - protein, 152 aa, Homo sapiens
MGPPSLHSPTPSLGPLGALVLSSQHTSPDSCKSPWTLKAVRAARQAADFTLKVEVECSSLQEAVQAAEAGADLVLLDNFKPEELHPTATVLKAQFPSVAVEASGGITLDNLPQFCGPHIDVISMGMLTQAAPALDFSLKLFAKEVAPVPKIH

SEQ ID NO: 60600 - protein, 297 aa, Homo sapiens
MDAEGLALLLPPVTLAALVDSWLREDCPGLNYAALVSGAGPSQAALWAKSPGVLAGQPFFDAIFTQLNCQVSWFLPEGSKLVPVARVAEVRGPAHCLLLGERVALNTLARCSGIASAAAAAVEAARGAGWTGHVAGTRKTTPGFRLVEKYGLLVGGAASHRYDLGGLVMVKDNHVVAAGGVEKAVRAARQAADFTLKVEVECSSLQEAVQAAEAGADLVLLDNFKPEELHPTATVLKAQFPSVAVEASGGITLDNLPQFCGPHIDVISMGMLTQAAPALDFSLKLFAKEVAPVPKIH

SEQ ID NO: 60601 - protein, 165 aa, Homo sapiens
MDAEGLALLLPPVTLAALVDSWLREDCPGLNYAALVSGAGPSQAALWAKSPGVLAGQPFFDAIFTQLNCQVSWFLPEGSKLVPVARVAEVRGPAHCLLLGERVALNTLARCSGIASAAAAAVEAARGAGWTGHVAGTRKTTPGFRLVEKYGLLVGGAASHRYDLG

SEQ ID NO: 60602 - protein, 567 aa, Homo sapiens
MHGRLKVKTSEEQAEAKRLEREQKLKLYQSATQAVFQKRQAGELDESVLELTSQILGANPDFATLWNCRREVLQQLETQKSPEELAALVKAELGFLESCLRVNPKSYGTWHHRCWLLGRLPEPNWTRELELCARFLEVDERNFHCWDYRRFVATQAAVPPAEELAFTDSLITRNFSNYSSWHYRSCLLPQLHPQPDSGPQGRLPEDVLLKELELVQNAFFTDPNDQSAWFYHRWLLGRADPQDALRCLHVSRDEACLTVSFSRPLLVGSRMEILLLMVDDSPLIVEWRTPDGRNRPSHVWLCDLPAASLNDQLPQHTFRVIWTAGDVQKECVLLKGRQEGWCRDSTTDEQLFRCELSVEKSTVLQSELESCKELQELEPENKWCLLTIILLMRALDPLLYEKETLQYFQTLKAVDPMRATYLDDLRSKFLLENSVLKMEYAEVRVLHLAHKDLTVLCHLEQLLLVTHLDLSHNRLRTLPPALAALRCLEVLQASDNAIESLDGVTNLPRLQELLLCNNRLQQPAVLQPLASCPRLVLLNLQGNPLCQAVGILEQLAELLPSVSSVLT

SEQ ID NO: 60603 - protein, 567 aa, Homo sapiens; identical to SEQ ID NO: 60602

SEQ ID NO: 60604 - protein, 331 aa, Homo sapiens
MGTPQKDVIIKSDAPDTLLLEKHADYIASYGSKKDDYEYCMSEYLRMSGIYWGLTVMDLMGQLHRMNREEILAFIKSCQHECGGISASIGHDPHLLYTLSAVQILTLYDSINVIDVNKVVEYVKGLQKEDGSFAGDIWGEIDTRFSFCAVATLALLGKLDAINVEKAIEFVLSCMNFDGGFGCRPGSESHAGQIYCCTGFLAITSQLHQVNSDLLGWWLCERQLPSGGLNGRPEKLPDVCYSWWVLASLKIIGRLHWIDREKLRNFILACQDEETGGFADRPGDMVDPFHTLFGIAGLSLLGEEQIKPVNPVFCMPEEVLQRVNVQPELVS

SEQ ID NO: 60605 - protein, 320 aa, Homo sapiens
MGTPQKDVIIKSDAPDTLLLEKHADYIASYGSKKDDYEYCMSEYLRMSGIYWGLTVMDLMGQLHRMNREEILAFIKSCQHECGGISASIGHDPHLLYTLSAVQILTLYDSINVIDVNKVVEYVKGLQKEDGSFAGDIWGEIDTRFSFCAVATLALLGKLDAINVEKAIEFVLSCMNFDGGFGCRPGSESHAGQIYCCTGFLAITSQLHQVNSDLLGWWLCERQLPSGGLNGRPEKLPDVCYSWWVLASLKIIGRLHWIDREKLRNFILACQDEETGGFADRPGDMHFIYQNYPKKELSSNKETLTESLLPRLERSSTISA

SEQ ID NO: 60606 - protein, 152 aa, Homo sapiens
MGTPQKDVIIKSDAPDTLLLEKHADYIASYGSKKDDYEYCMSEYLRMSGIYWGLTVMDLMGQLHRMNREEILAFIKSCQHECGGISASIGHDPHLLYTLSAVQILTLYDSINVIDVNKVVEYVKGLQKEDGSFAGDIWGNVRFSPFYPKYQY

SEQ ID NO: 60607 - protein, 157 aa, Homo sapiens
MNFDGGFGCRPGSESHAGQIYCCTGFLAITSQLHQVNSDLLGWWLCERQLPSGGLNGRPEKLPDVCYSWWVLASLKIIGRLHWIDREKLRNFILACQDEETGGFADRPGDMVDPFHTLFGIAGLSLLGEEQIKPVNPVFCMPEEVLQRVNVQPELVS

SEQ ID NO: 60608 - protein, 491 aa, Homo sapiens; identical to SEQ ID NO: 58565

SEQ ID NO: 60609 - protein, 505 aa, Homo sapiens
MMASSYHEVVSRKKMSLKSERRGIHVDQSDLLCKKGCGYYGNPAWQGFCSKCWREEYHKARQKQIQEDWELAERLQREEEEAFASSQSSQGAQSLTFSKFEEKKTNEKTRKVTTVKKFFSASSRVGSKKEIQEAKAPSPSINRQTSIETDRVSKEFIEFLKTFHKTGQEIYKQTKLFLEGMHYKRDLSIEEQSECAQDFYHNVAERMQTRGKVPPERVEKIMDQIEKYIMTRLYKYVFCPETTDDEKKDLAIQKRIRALRWVTPQMLCVPVNEDIPEVSDMVVKAITDIIEMDSKRVPRDKLACITKCSKHIFNAIKITKNEPASADDFLPTLIYIVLKGNPPRLQSNIQYITRFCNPSRLMTGEDGYYFTNLCCAVAFIEKLDAQSLNLSQEDFDRYMSGQTSPRKQEAESWSPDACLGVKQMYKNLDLLSQLNERQERIMNEAKKLEKDLIDWTDGIAREVQDIVEKYPLEIKPPNQPLAAIDSENVENDKLPPPLQPQVYAG

SEQ ID NO: 60610 - protein, 45 aa, Homo sapiens
MSLKSERRGIHVDQSDLLCKKGCGYYGNPAWQGFCSKCWREEYHK

SEQ ID NO: 60611 - protein, 491 aa, Homo sapiens; identical to SEQ ID NO: 58565

SEQ ID NO: 60612 - protein, 123 aa, Homo sapiens
MEPAEQPSELVSAEGRNRKAVLCQRCGSRVLQPGTALFSRRQLFLPSMRKKPALSDGSNPDGDLLQEHWLVEDMFIFENVGFTKDVGNIKFLVCADCEIGPIGWHCLDDKNSFYVALERVSHE

SEQ ID NO: 60613 - protein, 401 aa, Homo sapiens
MEPRRAAPGVPGWGSREAAGSASAAELVYHLAGALGTELQDLARRFGPEAAAGLVPLVVRALELLEQAAVGPAPDSLQVSAQPAEQELRRLREENERLRRELRAGPQEERALLRQLKEVTDRQRDELRAHNRDLRQRGQETEALQEQLQRLLLVNAELRHKLAAMQTQLRAAQDRERERQQPGEAATPQAKERARGQAGRPGHQHGQEPEWATAGAGAPGNPEDPAEAAQQLGRPSEAGQCRFSREEFEQILQERNELKAKVFLLKEELAYFQRELLTDHRVPGLLLEAMKVAVRKQRKKIKAKMLGTPEEAESSEDEAGPWILLSDDKGDHPPPPESKIQSFFGLWYRGKAESSEDETSSPAPSKLGGEEEAQPQSPAPDPPCSALHEHLCLGASAAPEA

SEQ ID NO: 60614 - protein, 403 aa, Homo sapiens
MEEERGSALAAESALEKNVAELTVMDVYDIASLVGHEFERVIDQHGCEAIARLMPKVVRVLEILEVLVSRHHVAPELDELRLELDRLRLERMDRIEKERKHQKELELVEDVWRGEAQDLLSQIAQLQEENKQLMTNLSHKDVNFSEEEFQKHEGMSERERQVMKKLKEVVDKQRDEIRAKDRELGLKNEDVEALQQQQTRLMKINHDLRHRVTVVEAQGKALIEQKVELEADLQTKEQEMGSLRAELGKLRERLQGEHSQNGEEEPETEPVGEESISDAEKVAMDLKDPNRPRFTLQELRDVLHERNELKSKVFLLQEELAYYKSEEMEEENRIPQPPPIAHPRTSPQPESGIKRLFSFFSRDKKRLANTQRNVHIQESFGQWANTHRDDGYTEQGQEALQHL

SEQ ID NO: 60615 - protein, 211 aa, Homo sapiens
MEEPPVREEEEEEGEEDEERDEVGPEGALGKSPFQLTAEDVYDISYLLGRELMALGSDPRVTQLQFKVVRVLEMLEALVNEGSLALEELKMERDHLRKEVEGLRRQSPPASGEVNLGPNKMVVDLTDPNRPRFTLQELRDVLQERNKLKSQLLVVQEELQCYKSGLIPPREGPGGRREKDAVVTSAKNAGRNKEEKTIIKKLFFFRSGKQT

SEQ ID NO: 60616 - protein, 238 aa, Homo sapiens
MAEDKTKPSELDQGKYDADDNVKIICLGDSAVGKSKLMERFLMDGFQPQQLSTYALTLYKHTATVDGRTILVDFWDTAGQERFQSMHASYYHKAHACIMVFDVQRKVTYRNLSTWYTELREFRPEIPCIVVANKIDDINVTQKSFNFAKKFSLPLYFVSAADGTNVVKVWLTAEVASKLFNDAIRLAVSYKQNSQDFMDEIFQELENFSLEQEEEDVPDQEQSSSIETPSEEAASPHS

SEQ ID NO: 60617 - protein, 165 aa, Homo sapiens
MAEDKTKPSELDQGKYDADDNVKIICLGDSAVGKSKLMERFLMDGFQPQQLSTYALTLYKHTATVDGKTILVADINVTQKSFNFAKKFSLPLYFVSAADGTNVVKLFNDAIRLAVSYKQNSQDFMDEIFQELENFSLEQEEEDVPDQEQSSSIETPSEEVASPHS

SEQ ID NO: 60618 - protein, 229 aa, Homo sapiens
MAEDKTKPSELDQGKYDADDNVKIICLGDSAVGKSKLMERFLMDGFQPQQLSTYALTLYKHTATVDGKTILVDFWDTAGQERFQSMHASYYHKAHACIMVFDIQRKVTYRNLSTWYTELREFRPEIPCIVVANKIDADINVTQKSFNFAKKFSLPLYFVSAADGTNVVKLFNDAIRLAVSYKQNSQDFMDEIFQELENFSLEQEEEDVPDQEQSSSIETPSEEVASPHS

SEQ ID NO: 60619 - protein, 228 aa, Homo sapiens
MAEDKTKPSELDQGKYDADDNVKIICLGDSAVGKSKLMERFLMDGFQPQQLSTYALTLYKHTATVDGKTILVDFWDTAGQERFQSMHASYYHKAHACIMVFDIQRKVTYRNLSTWYTELREFRPEIPCIVVANKIDDINVTQKSFNFAKKFSLPLYFVSAADGTNVVKLFNDAIRLAVSYKQNSQDFMDEIFQELENFSLEQEEEDVPDQEQSSSIETPSEEVASPHS

SEQ ID NO: 60620 - protein, 228 aa, Homo sapiens; identical to SEQ ID NO: 60619

SEQ ID NO: 60621 - protein, 238 aa, Homo sapiens
MAEDKTKPSELDQGKYDADDNVKIICLGDSAVGKSKLMERFLMDGFQPQQLSTYALTLYKHTATVDGKTILVDFWDTAGQERFQSMHASYYHKAHACIMVFDIQRKVTYRNLSTWYTELREFRPEIPCIVVANKIDDINVTQKSFNFAKKFSLPLYFVSAADGTNVVKVWLTAEVASKLFNDAIRLAVSYKQNSQDFMDEIFQELENFSLEQEEEDVPDQEQSSSIETPSEEVASPHS

SEQ ID NO: 60622 - protein, 114 aa, Homo sapiens
MAEDKTKPSELDQGKYDADDNVKIICLGDSAVGKSKLMERFLMDGFQPQQLSTYALTLYKHTATVDGKTILVDFWDTAGQERFQSMHASYYHKAHACIMVFDIQRKVTYRNLST

SEQ ID NO: 60623 - protein, 101 aa, Homo sapiens
MAEDKTKPSELDQGKYDADDNVKIICLGDSAVGKSKLMERFLMDGFQPQQLSTYALTLYKHTATVDGKTILVDFWDTAGQERFQSMHASYYHKAHACIMQT

SEQ ID NO: 60624 - protein, 229 aa, Homo sapiens
MAEDKTKPSELDQGKYDADDNVKIICLGDSAVGKSKLMERFLMDGFQPQQLSTYALTLYKHTATVDGRTILVDFWDTAGQERFQSMHASYYHKAHACIMVFDVQRKVTYRNLSTWYTELREFRPEIPCIVVANKIDADINVTQKSFNFAKKFSLPLYFVSAADGTNVVKLFNDAIRLAVSYKQNSQDFMDEIFQELENFSLEQEEEDVPDQEQSSSIETPSEEAASPHS

SEQ ID NO: 60625 - protein, 229 aa, Homo sapiens; identical to SEQ ID NO: 60624

SEQ ID NO: 60626 - protein, 228 aa, Homo sapiens
MAEDKTKPSELDQGKYDADDNVKIICLGDSAVGKSKLMERFLMDGFQPQQLSTYALTLYKHTATVDGRTILVDFWDTAGQERFQSMHASYYHKAHACIMVFDVQRKVTYRNLSTWYTELREFRPEIPCIVVANKIDDINVTQKSFNFAKKFSLPLYFVSAADGTNVVKLFNDAIRLAVSYKQNSQDFMDEIFQELENFSLEQEEEDVPDQEQSSSIETPSEEAASPHS

SEQ ID NO: 60627 - protein, 20 aa, Homo sapiens
MAEDKTKPSELDQGKYDADD

SEQ ID NO: 60628 - protein, 228 aa, Homo sapiens; identical to SEQ ID NO: 60626

SEQ ID NO: 60629 - protein, 200 aa, Homo sapiens
MAKKTYDLLFKLLLIGDSGVGKTCVLFRFSDDAFNTTFISTIGIDFKIKTVELQGKKIKLQIWDTAGQERFHTITTSYYRGAMGIMLVYDITNGKSFENISKWLRNIDEHANEDVERMLLGNKCDMDDKRVVPKGKGEQIAREHGIRFFETSAKANINIEKAFLTLAEDILRKTPVKEPNSENVDISSGGGVTGWKSKCC

SEQ ID NO: 60630 - protein, 649 aa, Homo sapiens
MSLMVSAGRGLGAVWSPTHVQVTVLQARGLRAKGPGGTSDAYAVIQVGKEKYATSVSERSLGAPVWREEATFELPSLLSSGPAAAATLQLTVLHRALLGLDKFLGRAEVDLRDLHRDQGRRKTQWYKLKSKPGKKDKERGEIEVDIQFMRNNMTASMFDLSMKDKSRNPFGKLKDKIKGKNKDSGSDTASAIIPSTTPSVDSDDESVVKDKKKKSKIKTLLSKSNLQKTPLSQSMSVLPTSKPEKVLLRPGDFQSQWDEDDNEDESSSASDVMSHKRTASTDLKQLNQVNFTLPKKEGLSFLGGLRSKNDVLSRSNVCINGNHVYLEQPEAKGEIKDSSPSSSPSPKGFRKKHLFSSTENLAAGSWKEPAEGGGLSSDRQLSESSTKDSLKSMTLPSYRPAPLVSGDLRENMAPANSEATKEAKESKKPESRRSSLLSLMTGKKDVAKGSEGENPLTVPGREKEGMLMGVKPGEDASGPAEDLVRRSEKDTAAVVSRQGSSLNLFEDVQITEPEAEPESKSEPRPPISSPRAPQTRAVKPRLHPVKPMNAMATKVANCSLGTATIISENLNNEVMMKKYSPSDPAFAYAQLTHDELIQLVLKQKETISKKEFQVRELEDYIDNLLVRVMEETPNILRIPTQVGKKAGKM

SEQ ID NO: 60631 - protein, 1283 aa, Homo sapiens [sequence omitted]

SEQ ID NO: 60632 - protein, 142 aa, Homo sapiens
MSLMVSAGRGLGAVWSPTHVQVTVLQARGLRAKGPGGTSDAYAVIQVGKEKYATSVSERSLGAPVWREEATFELPSLLSSGPAAAATLQLTVLHRALLGLDKFLGRAEVDLRDLHRDLGKSFFKTLKKRAWAIFLRLCLKKN

SEQ ID NO: 60633 - protein, 439 aa, Homo sapiens
MRNNMTASMFDLSMKDKSRNPFGKLKDKIKGKNKDSGSDTASAIIPSTTPSVDSDDESVVKDKKKKSKIKTLLSKSNLQKTPLSQSMSVLPTSKPEKVLLRPGDFQSQWDEDDNEDESSSASDVMSHKRTASTDLKQLNQVNFTLPKKEGLSFLGGLRSKNDVLSRSNVCINGNHVYLEQPEAKGEIKDSSPSSSPSPKGFRKKHLFSSTENLAAGSWKEPAEGGGLSSDRQLSESSTKDSLKSMTLPSYRPAPLVSGDLRENMAPANSEATKEAKESKKPESRRSSLLSLMTGKKDVAKGSEGENPLTVPGREKEGMLMGVKPGEDASGPAEDLVRRSEKDTAAVVSRQGSSLNLFEDVQITEPEAEPESKSEPRPPISSPRAPQTRAVKPRLHPVKPMNAMATKVANCSLGTATIISENLNNEVMMKVCPLRSWCVR

SEQ ID NO: 60634 - protein, 512 aa, Homo sapiens
MMLSEQAQKWFPTHVQVTVLQAKDLKPKGKSGTNDTYTIIQLGKEKYSTSVAEKTLEPVWKEEASFELPGLLIQGSPEKYILFLIVMHRSLVGLDKFLGQVAINLNDIFEDKQRRKTEWFRLESKQGKRIKNRGEIKVNIQFMRNNMTASMFDLSMKDKTRSPFAKLKDKMKGRKNDGTFSDTSSAIIPSTHMPDANSEFSSGEIQMKSKPKKPFLLGPQRLSSAHSMSDLSGSHMSSEKLKAGTIGQTHLLGHQLDSFGTVPESGSLKSPHRRTLSFDTSKMNQPDSIVDEGELCFGRQNDPFTNVTASLPQKFATLPRKKNPFEESSETWDSSMNLFSKPIEIRKENKREKREKVSLFERVTGKKDSRRSDKLNNGGSDSPCDLKSPNAFSENRQDYFDYESTNPFTAKFRASNIMPSSSFHMSPTSNEDLRKIPDSNPFDATAGYRSLTYEEVLQELVKHKELLRRKDTHIRELEDYIDNLLVRVMEETPSILRVPYEPSRKAGKFSNS

SEQ ID NO: 60635 - protein, 532 aa, Homo sapiens
MMLSEQAQKWFPTHVQVTVLQAKDLKPKGKSGTNDTYTIIQLGKEKYSTSVAEKTLEPVWKEEASFELPGLLIQGSPEKYILFLIVMHRSLVGLDKFLGQVAINLNDIFEDKQRRKTEWFRLESKQGKRIKNRGEIKVNIQFMRNNMTASMFDLSMKDKTRSPFAKLKDKMKGRKNDGTFSDTSSAIIPSTHMPDANSEFSSGEIQMKSKPKKPFLLGPQRLSSAHSMSDLSGSHMSSEKLKAGTIGQTHLLGHQLDSFGTVPESGSLKSPHRRTLSFDTSKMNQPDSIVDEGELCFGRQNDPFTNVTASLPQKFATLPRKKNPFEESSETWDSSMNLFSKPIEIRKENKREKREKVSLFERVTGKKDSRRSDKLNNGGSDSPCDLKSPNAFSENRQDYFDYESTNPFTAKFRASNIMPSSRNTLLTPAVAEWRGSLRWAELFHMSPTSNEDLRKIPDSNPFDATAGYRSLTYEEVLQELVKHKELLRRKDTHIRELEDYIDNLLVRVMEETPSILRVPYEPSRKAGKFSNS

SEQ ID NO: 60636 - protein, 756 aa, Homo sapiens
MASAPPASPPGSEPPGPDPEPGGPDGPGAAQLAPGPAELRLGAPVGGPDPQSPGLDEPAPGAAADGGARWSAGPAPGLEGGPRDPGPSAPPPRSGPRGQLASPDAPGPGPRSEAPLPELDPLFSWTEEPEECGPASCPESAPFRLQGSSSSHRARGEVDVFSPFPAPTAGELALEQGPGSPPQPSDLSQTHPLPSEPVGSQEDGPRLRAVFDALDGDGDGFVRIEDFIQFATVYGAEQVKDLTKYLDPSGLGVISFEDFYQGITAIRNGDPDGQCYGGVASAQDEEPLACPDEFDDFVTYEANEVTDSAYMGSESTYSECETFTDEDTSTLVHPELQPEGDADSAGGSAVPSECLDAMEEPDHGALLLLPGRPHPHGQSVITVIGGEEHFEDYGEGSEAELSPETLCNGQLGCSDPAFLTPSPTKRLSSKKVARYLHQSGALTMEALEDPSPELMEGPEEDIADKVVFLERRVLELEKDTAATGEQHSRLRQENLQLVHRANALEEQLKEQELRACEMVLEETRRQKELLCKMEREKSIEIENLQTRLQQLDEENSELRSCTPCLKANIERLEEEKQKLLDEIESLTLRLSEEQENKRRMGDRLSHERHQFQRDKEATQELIEDLRKQLEHLQLLKLEAEQRRGRSSSMGLQEYHSRARESELEQEVRRLKQDNRNLKEQNEELNGQIITLSIQGAKSLFSTAFSESLAAEISSVSRDELMEAIQKQEEINFRLQDYIDRIIVAIMETNPSILEVK

SEQ ID NO: 60637 - protein, 460 aa, Homo sapiens
MSLLRANEVTDSAYMGSESTYSECETFTDEDTSTLVHPELQPEGDADSAGGSAVPSECLDAMEEPDHGALLLLPGRPHPHGQSVITVIGGEEHFEDYGEGSEAELSPETLCNGQLGCSDPAFLTPSPTKRLSSKKVARYLHQSGALTMEALEDPSPELMEGPEEDIADKVVFLERRVLELEKDTAATGEQHSRLRQENLQLVHRANALEEQLKEQELRACEMVLEETRRQKELLCKMEREKSIEIENLQTRLQQLDEENSELRSCTPCLKANIERLEEEKQKLLDEIESLTLRLSEEQENKRRMGDRLSHERHQFQRDKEATQELIEDLRKQLEHLQLLKLEAEQRRGRSSSMGLQEYHSRARESELEQEVRRLKQDNRNLKEQNEELNGQIITLSIQGAKSLFSTAFSESLAAEISSVSRDELMEAIQKQEEINFRLQDYIDRIIVAIMETNPSILEVK

SEQ ID NO: 60638 - protein, 460 aa, Homo sapiens
MPFLKANEVTDSAYMGSESTYSECETFTDEDTSTLVHPELQPEGDADSAGGSAVPSECLDAMEEPDHGALLLLPGRPHPHGQSVITVIGGEEHFEDYGEGSEAELSPETLCNGQLGCSDPAFLTPSPTKRLSSKKVARYLHQSGALTMEALEDPSPELMEGPEEDIADKVVFLERRVLELEKDTAATGEQHSRLRQENLQLVHRANALEEQLKEQELRACEMVLEETRRQKELLCKMEREKSIEIENLQTRLQQLDEENSELRSCTPCLKANIERLEEEKQKLLDEIESLTLRLSEEQENKRRMGDRLSHERHQFQRDKEATQELIEDLRKQLEHLQLLKLEAEQRRGRSSSMGLQEYHSRARESELEQEVRRLKQDNRNLKEQNEELNGQIITLSIQGAKSLFSTAFSESLAAEISSVSRDELMEAIQKQEEINFRLQDYIDRIIVAIMETNPSILEVK

SEQ ID NO: 60639 - protein, 182 aa, Homo sapiens
MGSESTYSECETFTDEDTSTLVHPELQPEGDADSAGGSAVPSECLDAMEEPDHGALLLLPGRPHPHGQSVITVIGGEEHFEDYGEGSEAELSPETLCNGQLGCSDPAFLTPSPTKRLSSKKVARYLHQSGALTMEALEDPSPELMEGPEEDIADKVVFLERRVLELEKDTAATGEQHSRLRQ

SEQ ID NO: 60640 - protein, 801 aa, Homo sapiens
MASAPPASPPGSEPPGPDPEPGGPDGPGAAQLAPGPAELRLGAPVGGPDPQSPGLDEPAPGAAADGGARWSAGPAPGLEGGPRDPGPSAPPPRSGPRGQLASPDAPGPGPRSEAPLPELDPLFSWTEEPEECGPASCPESAPFRLQGSSSSHRARGEVDVFSPFPAPTAGELALEQGPGSPPQPSDLSQTHPLPSEPVGSQEDGPRLRAVFDALDGDGDGFVRIEDFIQFATVYGAEQVKDLTKYLDPSGLGVISFEDFYQGITAIRNGDPDGQCYGGVASAQDEEPLACPDEFDDFVTYEANEVTDSAYMGSESTYSECETFTDEDTSTLVHPELQPEGDADSAGGSAVPSECLDAMEEPDHGALLLLPGRPHPHGQSVITVIGGEEHFEDYGEGSEAELSPETLCNGQLGCSDPAFLTPSTDPLAAKLHSILTDEAFEFYCSQCHKQINRLEDLSARLSDLEMNSPTKRLSSKKVARYLHQSGALTMEALEDPSPELMEGPEEDIADKVVFLERRVLELEKDTAATGEQHSRLRQENLQLVHRANALEEQLKEQELRACEMVLEETRRQKELLCKMEREKSIEIENLQTRLQQLDEENSELRSCTPCLKANIERLEEEKQKLLDEIESLTLRLSEEQENKRRMGDRLSHERHQFQRDKEATQELIEDLRKQLEHLQLLKLEAEQRRGRSSSMGLQEYHSRARESELEQEVRRLKQDNRNLKEQNEELNGQIITLSIQGAKSLFSTAFSESLAAEISSVSRDELMEAIQKQEEINFRLQDYIDRIIVAIMETNPSILEVK

SEQ ID NO: 60641 - protein, 637 aa, Homo sapiens
MAGGAGWSGAPAALLRSVRRLREVFEVCGRDPDGFLRVERVAALGLRFGQGEEVEKLVKYLDPNDLGRINFKDFCRGVFAMKGCEELLKDVLSVESAGTLPCAPEIPDCVEQGSEVTGPTFADGELIPREPGFFPEDEEEAMTLAPPEGPQELYTDSPMESTQSLEGSVGSPAEKDGGLGGLFLPEDKSLVHTPSMTTSDLSTHSTTSLISNEEQFEDYGEGDDVDCAPSSPCPDDETRTNVYSDLGSSVSSSAGQTPRKMRHVYNSELLDVYCSQCCKKINLLNDLEARLKNLKANSPNRKISSTAFGRQLMHSSNFSSSNGSTEDLFRDSIDSCDNDITEKVSFLEKKVTELENDSLTNGDLKSKLKQENTQLVHRVHELEEMVKDQETTAEQALEEEARRHREAYGKLEREKATEVELLNARVQQLEEENTELRTTVTRLKSQTEKLDEERQRMSDRLEDTSLRLKDEMDLYKRMMDKLRQNRLEFQKEREATQELIEDLRKELEHLQMYKLDCERPGRGRSASSGLGEFNARAREVELEHEVKRLKQENYKLRDQNDDLNGQILSLSLYEAKNLFAAQTKAQSLAAEIDTASRDELMEALKEQEEINFRLRQYMDKIILAILDHNPSILEIKH

SEQ ID NO: 60642 - protein, 637 aa, Homo sapiens; identical to SEQ ID NO: 60641

SEQ ID NO: 60643 - protein, 216 aa, Homo sapiens
MGTRDDEYDYLFKVVLIGDSGVGKSNLLSRFTRNEFNLESKSTIGVEFATRSIQVDGKTIKAQIWDTAGQERYRAITSAYYRGAVGALLVYDIAKHLTYENVERWLKELRDHADSNIVIMLVGNKSDLRHLRAVPTDEARAFAEKNGLSFIETSALDSTNVEAAFQTILTEIYRIVSQKQMSDRRENDMSPSNNVVPIHVPPTTENKPKVQCCQNI

SEQ ID NO: 60644 - protein, 155 aa, Homo sapiens
MGTRDDEYDYLFKVVLIGDSGVGKSNLLSRFTRNEFNLESKSTIGVEFATRSIQVDGKTIKAQIWDTAGQERYRAITSAYYRGAVGALLVYDIAKHLTYENVERWLKELRDHADSNIVIMLVGNKSDLRHLRAVPTDEARAFAGYNKANVRQTRK

SEQ ID NO: 60645 - protein, 203 aa, Homo sapiens
MAKAYDHLFKLLLIGDSGVGKTCLIIRFAEDNFNNTYISTIGIDFKIRTVDIEGKKIKLQVWDTAGQERFKTITTAYYRGAMGIILVYDITDEKSFENIQNWMKSIKENASAGVERLLLGNKCDMEAKRKVQKEQADKLAREHGIRFFETSAKSSMNVDEAFSSLARDILLKSGGRRSGNGNKPPSTDLKTCDKKNTNKCSLG

SEQ ID NO: 60646 - protein, 215 aa, Homo sapiens
MATAPYNYSYIFKYIIIGDMGVGKSCLLHQFTEKKFMADCPHTIGVEFGTRIIEVSGQKIKLQIWDTAGQERFRAVTRSYYRGAAGALMVYDITRRSTYNHLSSWLTDARNLTNPNTVIILIGNKADLEAQRDVTYEEAKQFAEENGLLFLEASAKTGENVEDAFLEAAKKIYQNIQDGSLDLNAAESGVQHKPSAPQGGRLTSEPQPQREGCGC

SEQ ID NO: 60647 - protein, 181 aa, Homo sapiens
MATAPYNYSYIFKYIIIGDMGVGKSCLLHQFTEKKFMADCPHTIGVEFGTRIIEVSGQKIKLQIWDTAGQERFRAVTRSYYRGAAGALMVYDITRRSTYNHLSSWLTDARNLTNPNTVIILIGNKADLEAQRDVTYEEAKQFAEENGLLFLEASAKTGENVEDAFLEAAKKIYQNIQDGSL

SEQ ID NO: 60648 - protein, 236 aa, Homo sapiens
MGQKASQQLALKDSKEVPVVCEVVSEAIVHAAQKLKEYLGFEYPPSKLCPAANTLNEIFLIHFITFCQEKGVDEWLTTTKMTKHQAFLFGADWIWTFWGSNKQIKLQLAVQTLQMSSPPPVESKPCDLSNPESRVEESSWKKSRFDKLEEFCNLIGEDCLGLFIIFGMPGKPKDIRGVVLDSVKSQMVRSHLPGGKAVAQFVLETEDCVFIKELLRNCLSKKDGLREVGKVYISIL

SEQ ID NO: 60649 - protein, 212 aa, Homo sapiens
MAQAHRTPQPRAAPSQPRVFKLVLLGSGSVGKSSLALRYVKNDFKSILPTVGCAFFTKVVDVGATSLKLEIWDTAGQEKYHSVCHLYFRGANAALLVYDITRKDSFLKAQQWLKDLEEELHPGEVLVMLVGNKTDLSQEREVTFQEGKEFADSQKLLFMETSAKLNHQVSEVFNTVAQELLQRSDEEGQALRGDAAVALNKGPARQAKCCAH

SEQ ID NO: 60650 - protein, 85 aa, Homo sapiens
MLVGNKTDLSQEREVTFQEGKEFADSQKLLFMETSAKLNHQVSEVFNTVAQELLQRSDEEGQALRGDAAVALNKGPARQAKCCAH

SEQ ID NO: 60651 - protein, 206 aa, Homo sapiens
MDEDVLTTLKILIIGESGVGKSSLLLRFTDDTFDPELAATIGVDFKVKTISVDGNKAKLAIWDTAGQERFRTLTPSYYRGAQGVILVYDVTRRDTFVKLDNWLNELETYCTRNDIVNMLVGNKIDKENREVDRNEGLKFARKHSMLFIEASAKTCDGVQCAFEELVEKIIQTPGLWESENQNKGVKLSHREEGQGGGACGGYCSVL

SEQ ID NO: 60652 - protein, 161 aa, Homo sapiens
MDEDVLTTLKILIIGESGVGKSSLLLRFTDDTFDPELAATIVYDVTRRDTFVKLDNWLNELETYCTRNDIVNMLVGNKIDKENREVDRNEGLKFARKHSMLFIEASAKTCDGVQCAFEELVEKIIQTPGLWESENQNKGVKLSHREEGQGGGACGGYCSVL

SEQ ID NO: 60653 - protein, 291 aa, Homo sapiens
  VARIANT 1: note = MOD_RES - Any amino acid
XRLPGSRPLPGPSSLGRSPSCSAEKTPFRGPPLGRQSAVKELDLVTAGKFRFSVRSECFSRGPPLKIKCNCYFSFCHILWRQKISVVLSFFTFSLGKIILTVELSISLLLRFTDDTFDPELAATIGVDFKVKTISVDGNKAKLAIWVTLHQQTANFFLKSQIGNSPILKWAMWQYDTAGQERFRTLTPSYYRGAQGVILVYDVTRRDTFVKLDNWLNELETYCTRNDIVNMLVGNKIDKENREVDRNEGLKFARKHSMLFIEASAKTCDGVQCAFEELVEKIIQTPGLWES

SEQ ID NO: 60654 - protein, 142 aa, Homo sapiens
MDEDVLTTLKILIIGESGVGKSSLLLRFTDDTFDPELAATIGVDFKVKTISVDGNKAKLAIWENREVDRNEGLKFARKHSMLFIEASAKTCDGVQCAFEELVEKIIQTPGLWESENQNKGVKLSHREEGQGGGACGGYCSVL

SEQ ID NO: 60655 - protein, 184 aa, Homo sapiens
MDEDVLTTLKILIIGESGVGKSSLLLRFTDDTFDPELAATDTAGQERFRTLTPSYYRGAQGVILVYDVTRRDTFVKLDNWLNELETYCTRNDIVNMLVGNKIDKENREVDRNEGLKFARKHSMLFIEASAKTCDGVQCAFEELVEKIIQTPGLWESENQNKGVKLSHREEGQGGGACGGYCSVL

SEQ ID NO: 60656 - protein, 129 aa, Homo sapiens
MSSMNPEYDYLFKLLLIGDSGVGKSCLLLRFADDTYTESYISTIGVDFKIRTIELDGKTIKLQIEFADSLGIPFLETSAKNATNVEQSFMTMAAEIKKRMGPGATAGGAEKSNVKIQSTPVKQSGGGCC

SEQ ID NO: 60657 - protein, 129 aa, Homo sapiens
MSCLHPTSDYLFKLLLIGDSGVGKSCLLLRFADDTYTESYISTIGVDFKIRTIELDGKTIKLQIEFADSLGIPFLETSAKNATNVEQSFMTMAAEIKKRMGPGATAGGAEKSNVKIQSTPVKQSGGGCC

SEQ ID NO: 60658 - protein, 173 aa, Homo sapiens
MSSMNPEYDYLFKLLLIGDSGVGKSCLLLRFADDTYTESYISTIGVDFKIRTIELDGKTIKLQIESFNNVKQWLQEIDRYASENVNKLLVGNKCDLTTKKVVDYTTAKEFADSLGIPFLETSAKNATNVEQSFMTMAAEIKKRMGPGATAGGAEKSNVKIQSTPVKQSGGGCC

SEQ ID NO: 60659 - protein, 173 aa, Homo sapiens
MSSMNPEYDYLFKLLLIGDSGVGKSCLLLRFAWDTAGQERFRTITSSYYRGAHGIIVVYDVTDQESFNNVKQWLQEIDRYASENVNKLLVGNKCDLTTKKVVDYTTAKEFADSLGIPFLETSAKNATNVEQSFMTMAAEIKKRMGPGATAGGAEKSNVKIQSTPVKQSGGGCC

SEQ ID NO: 60660 - protein, 205 aa, Homo sapiens
MSSMNPEYDYLFKLLLIGDSGVGKSCLLLRFADDTYTESYISTIGVDFKIRTIELDGKTIKLQIWDTAGQERFRTITSSYYRGAHGIIVVYDVTDQESFNNVKQWLQEIDRYASENVNKLLVGNKCDLTTKKVVDYTTAKEFADSLGIPFLETSAKNATNVEQSFMTMAAEIKKRMGPGATAGGAEKSNVKIQSTPVKQSGGGCC

SEQ ID NO: 60661 - protein, 141 aa, Homo sapiens
MSSMNPEYDYLFKLLLIGDSGVGKSCLLLRFAESFNNVKQWLQEIDRYASENVNKLLVGNKCDLTTKKVVDYTTAKEFADSLGIPFLETSAKNATNVEQSFMTMAAEIKKRMGPGATAGGAEKSNVKIQSTPVKQSGGGCC

SEQ ID NO: 60662 - protein, 201 aa, Homo sapiens
MNPEYDYLFKLLLIGDSGVGKSCLLLRFADDTYTESYISTIGVDFKIRTIELDGKTIKLQIWDTAGQERFRTITSSYYRGAHGIIVVYDVTDQESYANVKQWLQEIDRYASENVNKLLVGNKSDLTTKKVVDNTTAKEFADSLGIPFLETSAKNATNVEQAFMTMAAEIKKRMGPGAASGGERPNLKIDSTPVKPAGGGCC

SEQ ID NO: 60663 - protein, 162 aa, Homo sapiens
MNPEYDYLFKLLLIGDSGVGKSCLLLRFADDTYTESYISTIGVDFKIRTIELDGKTIKLQIWDTAGQERFRTITSSYYRGAHGIIVVYDVTDQESYANVKQGCRRLTAMPARTSISSWWATRATSPPRRWWTTPQPRSLQTLWASPSWRRAPRMPPMSSRRS

SEQ ID NO: 60664 - protein, 119 aa, Homo sapiens
MNPEYDYLFKLLLIGDSGVGKSCLLLRFADDTYTESYISTIGVDFKIRTIELDGKTIKLQIWDTAGQERFRTITSSYYRGAHGIIVVYDVTDQESYANVKQWLQEIDRYASENVNKLLV

SEQ ID NO: 60665 - protein, 225 aa, Homo sapiens
MAAAGGGGGGAAAAGRAYSFKVVLLGEGCVGKTSLVLRYCENKFNDKHITTLQASFLTKKLNIGGKRVNLAIWDTAGQERFHALGPIYYRDSNGAILVYDITDEDSFQKVKNWVKELRKMLGNEICLCIVGNKIDLEKERHVSIQEAESYAESVGAKHYHTSAKQNKGIEELFLDLCKRMIETAQVDERAKGNGSSQPGTARRGVQIIDDEPQAQTSGGGCCSSG

SEQ ID NO: 60666 - protein, 194 aa, Homo sapiens
MALRELKVCLLGDTGVGKSSIVWRFVEDSFDPNINPTIGASFMTKTVQYQNELHKFLIWDTAGQERFRALAPMYYRGSAAAIIVYDITKEETFSTLKNWVKELRQHGPPNIVVAIAGNKCDLIDVREVMERDAKDYADSIHAIFVETSAKNAININELFIEISRRIPSTDANLPSGGKGFKLRRQPSEPKRSCC

SEQ ID NO: 60667 - protein, 237 aa, Homo sapiens
MLEEDMEVAIKMVVVGNGAVGKSSMIQRYCKGIFTKDYKKTIGVDFLERQIQVNDEDVRLMLWDTAGQEEFDAITKAYYRGAQACVLVFSTTDRESFEAVSSWREKVVAEVGDIPTVLVQNKIDLLDDSCIKNEEAEALAKRLKLRFYRTSVKEDLNVNEVFKYLAEKYLQKLKQQIAEDPELTHSSSNKIGVFNTSGGSHSGQNSGTLNGGDVINLRPNKQRTKKNRNPFSSCSIP

SEQ ID NO: 60668 - protein, 237 aa, Homo sapiens; identical to SEQ ID NO: 60667

SEQ ID NO: 60669 - protein, 203 aa, Homo sapiens
MSGQRVDVKVVMLGKEYVGKTSLVERYVHDRFLVGPYQNTIGAAFVAKVMSVGDRTVTLGIWDTAGSERYEAMSRIYYRGAKAAIVCYDLTDSSSFERAKFWVKELRSLEEGCQIYLCGTKSDLLEEDRRRRRVDFHDVQDYADNIKAQLFETSSKTGQSVDELFQKVAEDYVSVAAFQVMTEDKGVDLGQKPNPYFYSCCHH

SEQ ID NO: 60670 - protein, 203 aa, Homo sapiens; identical to SEQ ID NO: 60669

SEQ ID NO: 60671 - protein, 66 aa, Homo sapiens
MSGQRVDVKVVMLGKEYVGKTSLVERYVHDRFLVGPYQNTIGAAFVAKVMSVGDRTVTLGIWDTAG

SEQ ID NO: 60672 - protein, 213 aa, Homo sapiens
MGNGTEEDYNFVFKVVLIGESGVGKTNLLSRFTRNEFSHDSRTTIGVEFSTRTVMLGTAAVKAQIWDTAGLERYRAITSAYYRGAVGALLVFDLTKHQTYAVVERWLKELYDHAEATIVVMLVGNKSDLSQAREVPTEEARMFAENNGLLFLETSALDSTNVELAFETVLKEIFAKVSKQRQNSIRTNAITLGSAQAGQEPGPGEKRACCISL

SEQ ID NO: 60673 - protein, 256 aa, Homo sapiens
MSRKKTPKSKGASTPAASTLPTANGARPARSGTALSGPDAPPNGPLQPGRPSLGGGVDFYDVAFKVMLVGDSGVGKTCLLVRFKDGAFLAGTFISTVGIDFRNKVLDVDGVKVKLQMWDTAGQERFRSVTHAYYRDAHALLLLYDVTNKASFDNIQAWLTEIHEYAQHDVALMLLGNKVDSAHERVVKREDGEKLAKEYGLPFMETSAKTGLNVDLAFTAIAKELKQRSMKAPSEPRFRLHDYVKREGRGASCCRP

SEQ ID NO: 60674 - protein, 190 aa, Homo sapiens
MLVGDSGVGKTCLLVRFKDGAFLAGTFISTVGIDFRNKVLDVDGVKVKLQMWDTAGQERFRSVTHAYYRDAHALLLLYDVTNKASFDNIQAWLTEIHEYAQHDVALMLLGNKVDSAHERVVKREDGEKLAKEYGLPFMETSAKTGLNVDLAFTAIAKELKQRSMKAPSEPRFRLHDYVKREGRGASCCRP

SEQ ID NO: 60675 - protein, 221 aa, Homo sapiens
MSDGDYDYLIKFLALGDSGVGKTSVLYQYTDGKFNSKFITTVGIDFREKRVVYRASGPDGATGRGQRIHLQLWDTAGQERFRSLTTAFFRDAMGFLLLFDLTNEQSFLNVRNWISQLQMHAYCENPDIVLCGNKSDLEDQRVVKEEEAIALAEKYGIPYFETSAANGTNISQAIEMLLDLIMKRMERCVDKSWIPEGVVRSNGHASTDQLSEEKEKGACGC

SEQ ID NO: 60676 - protein, 213 aa, Homo sapiens
MSDGDYDYLIKFLALGDSGVGKTSVLYQYTDGKFNSKFITTVGIDFREKRVVYRASGPDGATGRGQRIHLQLWDTAGQERFRSLTTAFFRDAMGFLLLFDLTNEQSFLNVRNWISQLQMHAYCENPDIVLCGNKSDLEDQRVVKEKYGIPYFETSAANGTNISQAIEMLLDLIMKRMERCVDKSWIPEGVVRSNGHASTDQLSEEKEKGACGC

SEQ ID NO: 60677 - protein, 221 aa, Homo sapiens; identical to SEQ ID NO: 60675

SEQ ID NO: 60678 - protein, 220 aa, Homo sapiens
MSDSEEESQDRQLKIVVLGDGASGKTSLTTCFAQETFGKQYKQTIGLDFFLRRITLPGNLNVTLQIWDIGGQTIGGKMLDKYIYGAQGVLLVYDITNYQSFENLEDWYTVVKKVSEESETQPLVALVGNKIDLEHMRTIKPEKHLRFCQENGFSSHFVSAKTGDSVFLCFQKVAAEILGIKLNKAEIEQSQRIVRAEIVKYPEEENQHTTSTQSRICSVQ

SEQ ID NO: 60679 - protein, 221 aa, Homo sapiens
MSDSEEESQDRQLKIVVLGDGASGKTSLTTCFAQETFGKQYKQTIGLDFFLRRITLPGNLNVTLQIWDIGGQTIGGKMLDKYIYGAQGVLLVYDITNYQSFENLEDWYTVVKKVSEESETQPLVALVGNKIDLEHMRTIKPEKHLRFCQENGFSSHFVSAKTGDSVFLCFQKVAAEILGIKLNKAEIEQSQRVVKADIVNYNQEPMSRTVNPPRSSMCAVQ

SEQ ID NO: 60680 - protein, 204 aa, Homo sapiens
MSDSEEESQDRQLKIVVLGDGASGKTSLTTCFAQETFGKQYKQTIGLDFFLRRITLPGNLNVTLQIWDIGGQTIGGKMLDKYIYGAQGVLLVYDITNYQSFENLEDWYTVVKKVSEESETQPLVALVGNKIDLEHMRTIKPEKHLRFCQENGFSSHFVSAKTGDSVFLCFQKVAAEILGIKLNKAEIEQSQGHFIIFISSTNRE

SEQ ID NO: 60681 - protein, 95 aa, Homo sapiens
MSDSEEESQDRQLKIVVLGDGASGKTSLTTCFAQETFGKQYKQTIGLDFFLRRITLPGNLNVTLQIWDIGGQTIGGKMLDKYIYGAQLIWSICEQ

SEQ ID NO: 60682 - protein, 212 aa, Homo sapiens
MAYAYLFKYIIIGDTGVGKSCLLLQFTDKRFQPVHDLTIGVEFGARMITIDGKQIKLQIWDTAGQESFRSITRSYYRGAAGALLVYDITRRDTFNHLTTWLEDARQHSNSNMVIMLIGNKSDLESRREVKKEEGEAFAREHGLIFMETSAKTASNVEEAFINTAKEIYEKIQEGVFDINNEANGIKIGPQHAATNATHAGNQGGQQAGGGCC

SEQ ID NO: 60683 - protein, 188 aa, Homo sapiens
MAYAYLFKYIIIGDTGVEFGARMITIDGKQIKLQIWDTAGQESFRSITRSYYRGAAGALLVYDITRRDTFNHLTTWLEDARQHSNSNMVIMLIGNKSDLESRREVKKEEGEAFAREHGLIFMETSAKTASNVEEAFINTAKEIYEKIQEGVFDINNEANGIKIGPQHAATNATHAGNQGGQQAGGGCC

SEQ ID NO: 60684 - protein, 166 aa, Homo sapiens
MITIDGKQIKLQIWDTAGQESFRSITRSYYRGAAGALLVYDITRRDTFNHLTTWLEDARQHSNSNMVIMLIGNKSDLESRREVKKEEGEAFAREHGLIFMETSAKTASNVEEAFINTAKEIYEKIQEGVFDINNEANGIKIGPQHAATNATHAGNQGGQQAGGGCC

SEQ ID NO: 60685 - protein, 209 aa, Homo sapiens [sequence omitted]

SEQ ID NO: 60686 - protein, 216 aa, Homo sapiens
MTYAYLFKYIIIGDTGVGKSCLLLQFTDKRFQPVHDLTIGVEFGARMVNIDGKQIKLQIWDTAGQESFRSITRSYYRGAAGALLVYDITRRETFNHLTSWLEDARQHSSSNMVIMLIGNKSDLESRRDVKREEGEAFAREHGLIFMETSAKTACNVEEAFINTAKEIYRKIQQGLFDVHNEANGIKIGPQQSISTSVGPSASQRNSRDIGSNSGCC

SEQ ID NO: 60687 - protein, 62 aa, Homo sapiens
MTYAYLFKYIIIGDTGVGKSCLLLQFTDKRFQPVHDLTIGVEFGARMVNIDGKQIKLQIWDT

SEQ ID NO: 60688 - protein, 981 aa, Homo sapiens
MAADSEPESEVFEITDFTTASEWERFISKVEEVLNDWKLIGNSLGKPLEKGIFTSGTWEEKSDEISFADFKFSVTHHYLVQESTDKEGKDELLEDVVPQSMQDLLGMNNDFPPRAHCLVRWYGLREFVVIAPAAHSDAVLSESKCNLLLSSVSIALGNTGCQVPLFVQIHHKWRRMYVGECQGPGVRTDFEMVHLRKVPNQYTHLSGLLDIFKSKIGCPLTPLPPVSIAIRFTYVLQDWQQYFWPQQPPDIDALVGGEVGGLEFGKLPFGACEDPISELHLATTWPHLTEGIIVDNDVYSDLDPIQAPHWSVRVRKAENPQCLLGDFVTEFFKICRRKESTDEILGRSAFEEEGKETADITHALSKLTEPASVPIHKLSVSNMVHTAKKKIRKHRGVEESPLNNDVLNTILLFLFPDAVSEKPLDGTTSTDNNNPPSESEDYNLYNQFKSAPSDSLTYKLALCLCMINFYHGGLKGVAHLWQEFVLEMRFRWENNFLIPGLASGPPDLRCCLLHQKLQMLNCCIERKKARDEGKKTSASDVTNIYPGDAGKAGDQLVPDNLKETDKEKGEVGKSWDSWSDSEEEFFECLSDTEELKGNGQESGKKGGPKEMANLRPEGRLYQHGKLTLLHNGEPLYIPVTQEPAPMTEDLLEEQSEVLAKLGTSAEGAHLRARMQSACLLSDMESFKAANPGCSLEDFVRWYSPRDYIEEEVIDEKGNVVLKGELSARMKIPSNMWVEAWETAKPIPARRQRRLFDDTREAEKVLHYLAIQKPADLARHLLPCVIHAAVLKVKEEESLENISSVKKIIKQIISHSSKVLHFPNPEDKKLEEIIHQITNVEALIARARSLKAKFGTEKCEQEEEKEDLERFVSCLLEQPEVLVTGAGRGHAGRIIHKLFVNAQRAAAMTPPEEELKRMGSPEERRQNSVSDFPPPAGREFILRTTVPRPAPYSKALPQRMYSVLTKEDFRLAGAFSSDTSFF

SEQ ID NO: 60689 - protein, 935 aa, Homo sapiens
MFSLISGIFTSGTWEEKSDEISFADFKFSVTHHYLVQESTDKEGKDELLEDVVPQSMQDLLGMNNDFPPRAHCLVRWYGLREFVVIAPAAHSDAVLSESKCNLLLSSVSIALGNTGCQVPLFVQIHHKWRRMYVGECQGPGVRTDFEMVHLRKVPNQYTHLSGLLDIFKSKIGCPLTPLPPVSIAIRFTYVLQDWQQYFWPQQPPDIDALVGGEVGGLEFGKLPFGACEDPISELHLATTWPHLTEGIIVDNDVYSDLDPIQAPHWSVRVRKAENPQCLLGDFVTEFFKICRRKESTDEILGRSAFEEEGKETADITHALSKLTEPASVPIHKLSVSNMVHTAKKKIRKHRGVEESPLNNDVLNTILLFLFPDAVSEKPLDGTTSTDNNNPPSESEDYNLYNQFKSAPSDSLTYKLALCLCMINFYHGGLKGVAHLWQEFVLEMRFRWENNFLIPGLASGPPDLRCCLLHQKLQMLNCCIERKKARDEGKKTSASDVTNIYPGDAGKAGDQLVPDNLKETDKEKGEVGKSWDSWSDSEEEFFECLSDTEELKGNGQESGKKGGPKEMANLRPEGRLYQHGKLTLLHNGEPLYIPVTQEPAPMTEDLLEEQSEVLAKLGTSAEGAHLRARMQSACLLSDMESFKAANPGCSLEDFVRWYSPRDYIEEEVIDEKGNVVLKGELSARMKIPSNMWVEAWETAKPIPARRQRRLFDDTREAEKVLHYLAIQKPADLARHLLPCVIHAAVLKVKEEESLENISSVKKIIKQIISHSSKVLHFPNPEDKKLEEIIHQITNVEALIARARSLKAKFGTEKCEQEEEKEDLERFVSCLLEQPEVLVTGAGRGHAGRIIHKLFVNAQRAAAMTPPEEELKRMGSPEERRQNSVSDFPPPAGREFILRTTVPRPAPYSKALPQRMYSVLTKEDFRLAVKIIDGDV

SEQ ID NO: 60690 - protein, 988 aa, Homo sapiens
MAADSEPESEVFEITDFTTASEWERFISKVEEVLNDWKLIGNSLGKPLEKGIFTSGTWEEKSDEISFADFKFSVTHHYLVQESTDKEGKDELLEDVVPQSMQDLLGMNNDFPPRAHCLVRWYGLREFVVIAPAAHSDAVLSESKCNLLLSSVSIALGNTGCQVPLFVQIHHKWRRMYVGECQGPGVRTDFEMVHLRKVPNQYTHLSGLLDIFKSKIGCPLTPLPPVSIAIRFTYVLQDWQQYFWPQQPPDIDALVGGEVGGLEFGKLPFGACEDPISELHLATTWPHLTEGIIVDNDVYSDLDPIQAPHWSVRVRKAENPQCLLGDFVTEFFKICRRKESTDEILGRSAFEEEGKETADITHALSKLTEPASVPIHKLSVSNMVHTAKKKIRKHRGVEESPLNNDVLNTILLFLFPDAVSEKPLDGTTSTDNNNPPSESEDYNLYNQFKSAPSDSLTYKLALCLCMINFYHGGLKGVAHLWQEFVLEMRFRWENNFLIPGLASGPPDLRCCLLHQKLQMLNCCIERKKARDEGKKTSASDVTNIYPGDAGKAGDQLVPDNLKETDKEKGEVGKSWDSWSDSEEEFFECLSDTEELKGNGQESGKKGGPKEMANLRPEGRLYQHGKLTLLHNGEPLYIPVTQEPAPMTEDLLEEQSEVLAKLGTSAEGAHLRARMQSACLLSDMESFKAANPGCSLEDFVRWYSPRDYIEEEVIDEKGNVVLKGELSARMKIPSNMWVEAWETAKPIPARRQRRLFDDTREAEKVLHYLAIQKPADLARHLLPCVIHAAVLKVKEEESLENISSVKKIIKQIISHSSKVLHFPNPEDKKLEEIIHQITNVEALIARARSLKAKFGTEKCEQEEEKEDLERFVSCLLEQPEVLVTGAGRGHAGRIIHKLFVNAQRLTESSDEAAAMTPPEEELKRMGSPEERRQNSVSDFPPPAGREFILRTTVPRPAPYSKALPQRMYSVLTKEDFRLAGAFSSDTSFF

SEQ ID NO: 60691 - protein, 1393 aa, Homo sapiens
MACSIVQFCYFQDLQAARDFLFPHLREEILSGALRRDPSKSTDWEDDGWGAWEENEPQEPEEEGNTCKTQKTSWLQDCVLSLSPTNDLMVIAREQKAVFLVPKWKYSDKGKEEMQFAVGWSGSLNVEEGECVTSALCIPLASQKRSSTGRPDWTCIVVGFTSGYVRFYTENGVLLLAQLLNEDPVLQLKCRTYEIPRHPGVTEQNEELSILYPAAIVTIDGFSLFQSLRACRNQVAKAAASGNENIQPPPLAYKKWGLQDIDTIIDHASVGIMTLSPFDQMKTASNIGGFNAAIKNSPPAMSQYITVGSNPFTGFFYALEGSTQPLLSHVALAVASKLTSALFNAASGWLGWKSKHEEEAVQKQKPKVEPATPLAVRFGLPDSRRHGESICLSPCNTLAAVTDDFGRVILLDVARGIAIRMWKGYRDAQIGWIQTVEDLHERVPEKADFSPFGNSQGPSRVAQFLVIYAPRRGILEVWSTQQGPRVGAFNVGKHCRLLYPGYKIMGLNNVTSQSWQPQTYQICLVDPVSGSVKTVNVPFHLALSDKKSERAKDMHLVKKLAALLKTKSPNLDLVETEIKELILDIKYPATKKQALESILASERLPFSCLRNITQTLMDTLKSQELESVDEGLLQFCANKLKLLQLYESVSQLNSLDFHLDTPFSDNDLALLLRLDEKELLKLQALLEKYKQENTRTNVRFSDDKDGVLPVKTFLEYLEYEKDVLNIKKISEEEYVALGSFFFWKCLHGESSTEDMCHTLESAGLSPQLLLSLLLSVWLSKEKDILDKPQSICCLHTMLSLLSKMKVAIDETWDSQSVSPWWQQMRTACIQSENNGAALLSAHVGHSVAAQISNNMTEKKFSQTVLGADSEALTDSWEALSLDTEYWKLLLKQLEDCLILQTLLHSKGNTQTSKVSSLQAEPLPRLSVKKLLEGGKGGIADSVAKWIFKQDFSPEVLKLANEERDAENPDEPKEGVNRSFLEVSEMEMDLGAIPDLLHLAYEQFPCSLELDVLHAHCCWEYVVQWNKDPEEARFFVRSIEHLKQIFNAHVQNGIALMMWNTFLVKRFSAATYLMDKVGKSPKDRLCRRDVGMSDTAMTSFLGSCLDLLQILMEADVSRDEIQVPVLDTEDAWLSVEGPISIVELALEQKHIHYPLVEHHSILCSILYAVMRFSLKTVKPLSLFDSKGKNAFFKDLTSIQLLPSGEMDPNFISVRQQFLLKVVSAAVQAQHSATKVKDPTEEATPTPFGKDQDWPALAVDLAHHLQVSEDVVRRHYVGELYNYGVDHLGEEAILQVHDKEVLASQLLVLTGQRLAHALLHTQTKEGMELLARLPPTLCTWLKAMDPQDLQNTEVPIATTAKLVNKVIELLPEKHGQYGLALHLIEAVEAISLPSL

SEQ ID NO: 60692 - protein, 203 aa, Homo sapiens
MSMEDYDFLFKIVLIGNAGVGKTCLVRRFTQGLFPPGQGATIGVDFMIKTVEINGEKVKLQIWDTAGQERFRSITQSYYRSANALILTYDITCEESFRCLPEWLREIEQYASNKVITVLVGNKIDLAERREVSQQRAEEFSEAQDMYYLETSAKESDNVEKLFLDLACRLISEARQNTLVNNVSSPLPGEGKSISYLTCCNFN

SEQ ID NO: 60693 - protein, 114 aa, Homo sapiens
MSMEDYDFLFKIVLIGNAGVGKTCLVRRFTQGLFPPGQGATIGVDFMIKTVEINGEKVKLQIWDTAGQERFRSITQSYYRSANALILTYDITCEESFRCLPEWLREIEQYASNK

SEQ ID NO: 60694 - protein, 203 aa, Homo sapiens; identical to SEQ ID NO: 60692

SEQ ID NO: 60695 - protein, 55 aa, Homo sapiens
MSMEDYDFLFKIVLIGNAGVGKTCLVRRFTQGLFPPGQGATIGVDFMIKTVEING

SEQ ID NO: 60696 - protein, 168 aa, Homo sapiens
MSMEDYDFLFKIVLIGNAGVGKTCLVRRFTQGLFPPGQGATIGVDFMIKTVEINGEKVKLQIWDTAGQERFRSITQSYYRSANALILTYDITCEESFRCLPEWLREIEQYASNKVITVLVGNKIDLAERREVSQQRAEEFSEAQDMYYLETSAKESDNVEKLFLDLAC

SEQ ID NO: 60697 - protein, 60 aa, Homo sapiens
MSMEDYDFLFKIVLIGNAGVGKTCLVRRFTQGLFPPGQGATIGVDFMIKTVEINGEKVKL

SEQ ID NO: 60698 - protein, 203 aa, Homo sapiens; identical to SEQ ID NO: 60692

SEQ ID NO: 60699 - protein, 100 aa, Homo sapiens
MSMEDYDFLFKIVLIGNAGVGKTCLVRRFTQGLFPPGQGATIGVDFMIKTVEINGEKVKLQIWDTAGQERFRSITQSYYRSANALILTYDITCEESFRCL

SEQ ID NO: 60700 - protein, 164 aa, Homo sapiens
MSMEDYDFLFKIVLIGNAGVGKTCLVRRFTQGLFPPGQGATIGVDFMIKTVEINGEKVKLQIWDTAGQERFRSITQSYYRSANALILTYDITCEESFRCLPEWLREIEQYASNKVITVLATRLTWLKGERFPSSELKNSQKLRTCIIWRPQPRNLIMWRNSSLT

SEQ ID NO: 60701 - protein, 139 aa, Homo sapiens
MSMEDYDFLFKIVLIGNAGVGKTCLVRRFTQGLFPPGQGATIGVDFMIKTVEINGEKVKLQIWDTAGQERFRSITQSYYRSANALILTYDITCEESFRCLPEWLREIEQYASNKVITVLVGNKIDLAERREVSQQRAEE

SEQ ID NO: 60702 - protein, 195 aa, Homo sapiens
MMAIRELKVCLLGDTGVGKSSIVCRFVQDHFDHNISPTIGASFMTKTVPCGNELHKFLIWDTAGQERFHSLAPMYYRGSAAAVIVYDITKQDSFYTLKKWVKELKEHGPENIVMAIAGNKCDLSDIREVPLKDAKEYAESIGAIVVETSAKNAINIEELFQGISRQIPPLDPHENGNNGTIKVEKPTMQASRRCC

SEQ ID NO: 60703 - protein, 186 aa, Homo sapiens
CLLNDTGVGKSSIVCRFVQDHFDHNISPTIGASFMTKTVPCGNELHKFLIWDTAGQERFHSLAPMYYRGSAAAVIVYDITKQDSFYTLKKWVKELKEHGPENIVMAIAGNKCDLSDIREVPLKDAKEYAESIGAIVVETSAKNAINIEELFQGISRQIPPLDPHENGNNGTIKVEKPTMQASRRCC

SEQ ID NO: 60704 - protein, 225 aa, Homo sapiens
MAGGGAGDPGLGAAAAPAPETREHLFKVLVIGELGVGKTSIIKRYVHQLFSQHYRATIGVDFALKVLNWDSRTLVRLQLWDIAGQERFGNMTRVYYKEAVGAFVVFDISRSSTFEAVLKWKSDLDSKVHLPNGSPIPAVLLANKCDQNKDSSQSPSQVDQFCKEHGFAGWFETSAKDNINIEEAARFLVEKILVNHQSFPNEENDVDKIKLDQETLRAENKSQCC

SEQ ID NO: 60705 - protein, 237 aa, Homo sapiens
MAQPILGHGSLQPASAAGLASLELDSSLDQYVQIRIFKIIVIGDSNVGKTCLTFRFCGGTFPDKTEATIGVDFREKTVEIEGEKIKVQVWDTAGQERFRKSMVEHYYRNVHAVVFVYDVTKMTSFTNLKMWIQECNGHAVPPLVPKVLVGNKCDLREQIQVPSNLALKFADAHNMLLFETSAKDPKESQNVESIFMCLACRLKAQKSLLYRDAERQQGKVQKLEFPQEANSKTSCPC

SEQ ID NO: 60706 - protein, 237 aa, Homo sapiens
MNILAPVRRDRVLAELPQCLRKEAALHGHKDFHPRVTCACQEHRTGTVGFCKDTFDKNYKATIGVDFEMERFEVLGIPFSLQLWDTAGQERFKCIASTYYRGAQAIIIVFNLNDVASLEHTKQWLADALKENDPSSVLLFLVGSKKDLSTPAQYALMEKDALQVAQEMKAEYWAVSSLTGENVREFFFRVAALTFEANVLAELEKSGARRIGDVVRINSDDSNLYLTASKKKPTCCP

SEQ ID NO: 60707 - protein, 259 aa, Homo sapiens
MNILAPVRRDRVLAELPQCLRKEAALHGHKDFHPRVTCACQEHRTGTVGFKISKVIVVGDLSVGKTCLINRFCKDTFDKNYKATIGVDFEMERFEVLGIPFSLQLWDTAGQERFKCIASTYYRGAQAIIIVFNLNDVASLEHTKQWLADALKENDPSSVLLFLVGSKKDLSTPAQYALMEKDALQVAQEMKAEYWAVSSLTGENVREFFFRVAALTFEANVLAELEKSGARRIGDVVRINSDDSNLYLTASKKKPTCCP

SEQ ID NO: 60708 - protein, 211 aa, Homo sapiens
MNILAPVRRDRVLAELPQCLRKEAALHGHKDFHPRVTCACQEHRTGTVGFKISKVIVVGDLSVGKTCLINRFCKDTFDKNYKATIGVDFEMERFEVLGIPFSLQLWDTAGQERFKCIASTYYRGAQAIIIVFNLNDVASLEHTKQWLADALKENDPSSVLLFLVGSKKDLSTPAQYALMEKDALQVAQEMKAEYWAVSSLTGENVREFFFR

SEQ ID NO: 60709 - protein, 251 aa, Homo sapiens
MNILAPVRRDRVLAELPQCLRKEAALHGHKDFHPRVTCACQEHRTGTVGFKISKVIVVGDLSVGKTCLINRFCKDTFDKNYKATIGVDFEMERFEVLGIPFSLQLWDTAGQERFKCIASTYYRGAQAIIIVFNLNDVASLEHTKQWLADALKENDPSSVLLFLTPAQYALMEKDALQVAQEMKAEYWAVSSLTGENVREFFFRVAALTFEANVLAELEKSGARRIGDVVRINSDDSNLYLTASKKKPTCCP

SEQ ID NO: 60710 - protein, 259 aa, Homo sapiens; identical to SEQ ID NO: 60707

SEQ ID NO: 60711 - protein, 211 aa, Homo sapiens; identical to SEQ ID NO: 60708

SEQ ID NO: 60712 - protein, 231 aa, Homo sapiens
  VARIANT 1: note = MOD_RES - Any amino acid
XSLRFPITNSAGAPCKAAGRMNILAPVRRDRVLAELPQCLRKEAALHGHKDFHPRVTCACQEHRTGTVGRFKISKVIVVGDLSVGKTCLINRFCKDTFDKNYKATIGVDFEMERFEVLGIPFSLQLWDTAGQERFKCIASTYYRGAQAIIIVFNLNDVASLEHTKQWLADALKENDPSSVLLFLVGSKKDLSTPAQYALMEKDALQVAQEMKTVQRLPSPRALCHPHSSRA

SEQ ID NO: 60713 - protein, 316 aa, Homo sapiens
MSHLPGLELRREAPPLLGPLLSPFPLPAGSWHRQMLRSSLRFPITNSAGAPCKAAGRMNILAPVRRDRVLAELPQCLRKEAALHGHKDFHPRVTCACQEHRTGTVGFKISKVIVVGDLSVGKTCLINRFCKDTFDKNYKATIGVDFEMERFEVLGIPFSLQLWDTAGQERFKCIASTYYRGAQAIIIVFNLNDVASLEHTKQWLADALKENDPSSVLLFLVGSKKDLSTPAQYALMEKDALQVAQEMKAEYWAVSSLTGENVREFFFRVAALTFEANVLAELEKSGARRIGDVVRINSDDSNLYLTASKKKPTCCP

SEQ ID NO: 60714 - protein, 274 aa, Homo sapiens
MLRSSLRFPITNSAGAPCKAAGRMNILAPVRRDRVLAELPQCLRKEAALHGHKDFHPRVTCACQEHRTGTVGFKISKVIVVGDLSVGKTCLINRFCKDTFDKNYKATIGVDFEMERFEVLGIPFSLQLWDTAGQERFKCIASTYYRGAQAIIIVFNLNDVASLEHTKQWLADALKENDPSSVLLFLTPAQYALMEKDALQVAQEMKAEYWAVSSLTGENVREFFFRVAALTFEANVLAELEKSGARRIGDVVRINSDDSNLYLTASKKKPTCCP

SEQ ID NO: 60715 - protein, 268 aa, Homo sapiens
MSHLPGLELRREAPPLLGPLLSPFPLPAGSWHRQMLRSSLRFPITNSAGAPCKAAGRMNILAPVRRDRVLAELPQCLRKEAALHGHKDFHPRVTCACQEHRTGTVGRFKISKVIVVGDLSVGKTCLINRFCKDTFDKNYKATIGVDFEMERFEVLGIPFSLQLWDTAGQERFKCIASTYYRGAQAIIIVFNLNDVASLEHTKQWLADALKENDPSSVLLFLVGSKKDLSTPAQYALMEKDALQVAQEMKTVQRLPSPRALCHPHSSRA

SEQ ID NO: 60716 - protein, 333 aa, Homo sapiens
MVIAGASWMLGRAAASPTQTPPTTSTIRVARRSRVALVAMVIAAAGSGGPGRAEPQLSQPSLDCGRMRSSLTPLGPPVSRDRVIASFPKWYTPEACLQLREHFHGQVSAACQRRNTGTVGLKLSKVVVVGDLYVGKTSLIHRFCKNVFDRDYKATIGVDFEIERFEIAGIPYSLQIWDTAGQEKFKCIASAYYRGAQVIITAFDLTDVQTLEHTRQWLEDALRENEAGSCFIFLVGTKKDLLSGAACEQAEADAVHLAREMQAEYWSVSAKTGENVKAFFSRVAALAFEQSVLQDLERQSSARLQVGNGDLIQMEGSPPETQESKRPSSLGCC

SEQ ID NO: 60717 - protein, 311 aa, Homo sapiens
MVIAGASWMLGRAAASPTQTPPTTSTIRVARRSRVALVAMVIAAAGSGGPGRAEPQLSQPSLDCGRMRSSLTPLGPPVSRDRVIASFPKWYTPEACLQLREHFHGQVSAACQRRNTGTVGFCKNVFDRDYKATIGVDFEIERFEIAGIPYSLQIWDTAGQEKFKCIASAYYRGAQVIITAFDLTDVQTLEHTRQWLEDALRENEAGSCFIFLVGTKKDLLSGAACEQAEADAVHLAREMQAEYWSVSAKTGENVKAFFSRVAALAFEQSVLQDLERQSSARLQVGNGDLIQMEGSPPETQESKRPSSLGCC

SEQ ID NO: 60718 - protein, 165 aa, Homo sapiens
MVIAAAGSGGPGRAEPQLSQPSLDCGRMRSSLTPLGPPVSRDRVIASFPKWYTPEACLQLREHFHGQVSAACQRRNTGTVGLKLSKVVVVGDLYVGKTSLSAQYAHPQGFLTAMNQPHSPRPLSPGYAHSSHPSRAVASRRWRAPCRQPSDQYCSPRAWHTAAAL

SEQ ID NO: 60719 - protein, 182 aa, Homo sapiens
MDLQRPDSYQGGAGPDFNDHVLHKTILVGDSGVGKTSLLVQFDQGKFIPGSFSATVGIGFTNKVVTVDGVRVKLQIWDTAGQERFRSVTHAYYRDAQALLLLYDITNKSSFDNIRAWLTEIHEYAQRDVVIMLLGNKADMSSERVIRSEDGETLAREYGVPFLETSAKTGMNVELAFLAIAK

SEQ ID NO: 60720 - protein, 189 aa, Homo sapiens
MTGTPGAVATRDGEAPERSPPCSPSYDLTGKVMLLGDTGVGKTCFLIQFKDGAFLSGTFIATVGIDFRNKVVTVDGVRVKLQIWDTAGQERFRSVTHAYYRDAQALLLLYDITNKSSFDNIRAWLTEIHEYAQRDVVIMLLGNKADMSSERVIRSEDGETLAREYGVPFLETSAKTGMNVELAFLAIAK

SEQ ID NO: 60721 - protein, 186 aa, Homo sapiens
MTGTPGAVATRDGEAPERSPPCSPSYDLTGKNKVVTVDGVRVKLQIWDTAGQERFRSVTHAYYRDAQALLLLYDITNKSSFDNIRAWLTEIHEYAQRDVVIMLLGNKADMSSERVIRSEDGETLAREYGVPFLETSAKTGMNVELAFLAIAKELKYRAGHQADEPSFQIRDYVESQKKRSSCCSFM

SEQ ID NO: 60722 - protein, 223 aa, Homo sapiens
MTGTPGAVATRDGEAPERSPPCSPSYDLTGKVMLLGDTGVGKTCFLIQFKDGAFLSGTFIATVGIDFRNKVVTVDGVRVKLQIWDTAGQERFRSVTHAYYRDAQALLLLYDITNKSSFDNIRAWLTEIHEYAQRDVVIMLLGNKADMSSERVIRSEDGETLAREYGVPFLETSAKTGMNVELAFLAIAKELKYRAGHQADEPSFQIRDYVESQKKRSSCCSFM

SEQ ID NO: 60723 - protein, 228 aa, Homo sapiens
MWLMSEAHGAEPVLLREAARPFTQTLRLCVPSGNSKVMLLGDTGVGKTCFLIQFKDGAFLSGTFIATVGIDFRNKVVTVDGVRVKLQIWDTAGQERFRSVTHAYYRDAQALLLLYDITNKSSFDNIRAWLTEIHEYAQRDVVIMLLGNKADMSSERVIRSEDGETLAREYGVPFLETSAKTGMNVELAFLAIAKELKYRAGHQADEPSFQIRDYVESQKKRSSCCSFM

SEQ ID NO: 60724 - protein, 191 aa, Homo sapiens
MWLMSEAHGAEPVLLREAARPFTQTLRLCVPSGNSKNKVVTVDGVRVKLQIWDTAGQERFRSVTHAYYRDAQALLLLYDITNKSSFDNIRAWLTEIHEYAQRDVVIMLLGNKADMSSERVIRSEDGETLAREYGVPFLETSAKTGMNVELAFLAIAKELKYRAGHQADEPSFQIRDYVESQKKRSSCCSFM

SEQ ID NO: 60725 - protein, 169 aa, Homo sapiens
MDLQRPDSYQGGAGPDFNDHVLHKTILVGDSGVGKTSLLVQFDQGKFIPGSFSATVGIGFTNKVVTVDGVRVKLQIWDTAGQERFRSVTHAYYRDAQALLLLYDITNKSSFDNIRAWLTEIHEYAQRDVVIMLLGNKVSGSGAGSAQPCTSSALAGPITTQEQLSRHPS

SEQ ID NO: 60726 - protein, 216 aa, Homo sapiens
MDLQRPDSYQGGAGPDFNDHVLHKTILVGDSGVGKTSLLVQFDQGKFIPGSFSATVGIGFTNKVVTVDGVRVKLQIWDTAGQERFRSVTHAYYRDAQALLLLYDITNKSSFDNIRAWLTEIHEYAQRDVVIMLLGNKADMSSERVIRSEDGETLAREYGVPFLETSAKTGMNVELAFLAIAKELKYRAGHQADEPSFQIRDYVESQKKRSSCCSFM

SEQ ID NO: 60727 - protein, 216 aa, Homo sapiens; identical to SEQ ID NO: 60726

SEQ ID NO: 60728 - protein, 223 aa, Homo sapiens; identical to SEQ ID NO: 60722

SEQ ID NO: 60729 - protein, 196 aa, Homo sapiens
MCCKVMLLGDTGVGKTCFLIQFKDGAFLSGTFIATVGIDFRNKVVTVDGVRVKLQIWDTAGQERFRSVTHAYYRDAQALLLLYDITNKSSFDNIRAWLTEIHEYAQRDVVIMLLGNKADMSSERVIRSEDGETLAREYGVPFLETSAKTGMNVELAFLAIAKELKYRAGHQADEPSFQIRDYVESQKKRSSCCSFM

SEQ ID NO: 60730 - protein, 211 aa, Homo sapiens
MQAPHKEHLYKLLVIGDLGVGKTSIIKRYVHQNFSSHYRATIGVDFALKVLHWDPETVVRLQLWDIAGQERFGNMTRVYYREAMGAFIVFDVTRPATFEAVAKWKNDLDSKLSLPNGKPVSVVLLANKCDQGKDVLMNNGLKMDQFCKEHGFVGWFETSAKENINIDEASRCLVKHILANECDLMESIEPDVVKPHLTSTKVASCSGCAKS

SEQ ID NO: 60731 - protein, 213 aa, Homo sapiens
MEAIWLYQFRLIVIGDSTVGKSCLIRRFTEGRFAQVSDPTVGVDFFSRLVEIEPGKRIKLQIWDTAGQERFRSITRAYYRNSVGGLLLFDITNRRSFQNVHEWLEETKVHVQPYQIVFVLVGHKCDLDTQRQVTRHEAEKLAAAYGMKYIETSARDAINVEKAFTDLTRDIYELVKRGEITIQEGWEGVKSGFVPNVVHSSEEVVKSERRCLC

SEQ ID NO: 60732 - protein, 220 aa, Homo sapiens
MASATDSRYGQKESSDQNFDYMFKILIIGNSSVGKTSFLFRYADDSFTPAFVSTVGIDFKVKTIYRNDKRIKLQIWDTAGQERYRTITTAYYRGAMGFILMYDITNEESFNAVQDWSTQIKTYSWDNAQVLLVGNKCDMEDERVVSSERGRQLADHLGFEFFEASAKDNINVKQTFERLVDVICEKMSESLDTADPAVTGAKQGPQLSDQQVPPHQDCAC

SEQ ID NO: 60733 - protein, 219 aa, Homo sapiens
MASVTDGKTGVKDASDQNFDYMFKLLIIGNSSVGKTSFLFRYADDTFTPAFVSTVGIDFKVKTVYRHEKRVKLQIWDTAGQERYRTITTAYYRGAMGFILMYDITNEESFNAVQDWATQIKTYSWDNAQVILVGNKCDMEEERVVPTEKGQLLAEQLGFDFFEASAKENISVRQAFERLVDAICDKMSDSLDTDPSMLGSSKNTRLSDTPPLLQQNCSC

SEQ ID NO: 60734 - protein, 219 aa, Homo sapiens; identical to SEQ ID NO: 60733

SEQ ID NO: 60735 - protein, 227 aa, Homo sapiens
MRHEAPMQMASAQDARYGQKDSSDQNFDYMFKLLIIGNSSVGKTSFLFRYADDSFTSAFVSTVGIDFKVKTVFKNEKRIKLQIWDTAGQERYRTITTAYYRGAMGFILMYDITNEESFNAVQDWSTQIKTYSWDNAQVILVGNKCDMEDERVISTERGQHLGEQLGFEFFETSAKDNINVKQTFERLVDIICDKMSESLETDPAITAAKQNTRLKETPPPPQPNCAC

SEQ ID NO: 60736 - protein, 278 aa, Homo sapiens
MSAPGSPDQAYDFLLKFLLVGDRDVGKSEILESLQDGTAESPYSHLGGIDYKTTTILLDGQRVKLKLWDTSGQGRFCTIFRSYSRGAQGVILVYDIANRWSFEGMDRWIKKIEEHAPGVPKILVGNRLHLAFKRQVPREQAQAYAERLGVTFFEVSPLCNFNIIESFTELARIVLLRHRLNWLGRPSKVLSLQDLCCRTIVSCTPVHLVDKLPLPIALRSHLKSFSMAKGLNARMMRGLSYSLTTSSTHKRSSLCKVKIVCPPQSPPKNCTRNSCKIS

SEQ ID NO: 60737 - protein, 218 aa, Homo sapiens
MSQTAMSETYDFLFKFLVIGNAGTGKSCLLHQFIEKKFKDDSNHTIGVEFGSKIINVGGKYVKLQIWDTAGQERFRSVTRSYYRGAAGALLVYDITSRETYNALTNWLTDARMLASQNIVIILCGNKKDLDADREVTFLEASRFAQENELMFLETSALTGENVEEAFVQCARKILNKIESGELDPERMGSGIQYGDAALRQLRSPRRAQAPNAQECGC

SEQ ID NO: 60738 - protein, 215 aa, Homo sapiens
MASRGATRPNGPNTGNKICQFKLVLLGESAVGKSSLVLRFVKGQFHEFQESTIGAAFLTQTVCLDDTTVKFEIWDTAGQERYHSLAPMYYRGAQAAIVVYDITNEESFARAKNWVKELQRQASPNIVIALSGNKADLANKRAVDFQEAQSYADDNSLLFMETSAKTSMNVNEIFMAIAKKLPKNEPQNPGANSARGRGVDLTEPTQPTRNQCCSN

SEQ ID NO: 60739 - protein, 201 aa, Homo sapiens
MASRGATRPNGPNTGNKICQFKLVLLGESAVGKSSLVLRFVKGQFHEFQESTIGVKFEIWDTAGQERYHSLAPMYYRGAQAAIVVYDITNEESFARAKNWVKELQRQASPNIVIALSGNKADLANKRAVDFQEAQSYADDNSLLFMETSAKTSMNVNEIFMAIAKKLPKNEPQNPGANSARGRGVDLTEPTQPTRNQCCSN

SEQ ID NO: 60740 - protein, 15 aa, Homo sapiens
MASRGATRPNGPNTG

SEQ ID NO: 60741 - protein, 215 aa, Homo sapiens
MTSRSTARPNGQPQASKICQFKLVLLGESAVGKSSLVLRFVKGQFHEYQESTIGAAFLTQSVCLDDTTVKFEIWDTAGQERYHSLAPMYYRGAQAAIVVYDITNQETFARAKTWVKELQRQASPSIVIALAGNKADLANKRMVEYEEAQAYADDNSLLFMETSAKTAMNVNDLFLAIAKKLPKSEPQNLGGAAGRSRGVDLHEQSQQNKSQCCSN

SEQ ID NO: 60742 - protein, 174 aa, Homo sapiens
MTSRSTARPNGQPQASKICQFKLVLLGESAVGKSSLVLRFVKGQFHEYQESTIGAAFLTQSVCLDDTTVKFEIWDTAGQERYHSLAPMYYRGAQAAIVVYDITNQEAQAYADDNSLLFMETSAKTAMNVNDLFLAIAKKLPKSEPQNLGGAAGRSRGVDLHEQSQQNKSQCCSN

SEQ ID NO: 60743 - protein, 115 aa, Homo sapiens
MTSRSTARPNGQPQASKICQFKLVLLGESAVGKSSLVLRFVKGQFHEYQESTIGAAFLTQSVCLDDTTVKFEIWDTAGQERYHSLAPMYYRGAQAAIVVYDITNQETFARAKTWV

SEQ ID NO: 60744 - protein, 100 aa, Homo sapiens
MTSRSTARPNGQPQASKICQFKLVLLGESAVGKSSLVLRFVKGQFHEYQESTIGAAFLTQSVCLDDTTVKFEIWDTAGQERYHSLAPMYYRGAQAAIVVY

SEQ ID NO: 60745 - protein, 215 aa, Homo sapiens; identical to SEQ ID NO: 60741

SEQ ID NO: 60746 - protein, 216 aa, Homo sapiens
MAGRGGAARPNGPAAGNKICQFKLVLLGESAVGKSSLVLRFVKGQFHEYQESTIGAAFLTQTVCLDDTTVKFEIWDTAGQERYHSLAPMYYRGAQAAIVVYDITNTDTFARAKNWVKELQRQASPNIVIALAGNKADLASKRAVEFQEAQAYADDNSLLFMETSAKTAMNVNEIFMAIAKKLPKNEPQNATGAPGRNRGVDLQENNPASRSQCCSN

SEQ ID NO: 60747 - protein, 216 aa, Homo sapiens; identical to SEQ ID NO: 60746

SEQ ID NO: 60748 - protein, 249 aa, Homo sapiens
MELSWRSPSPLSASLHSTSPHPHALWTTTAGRAMAGRGGAARPNGPAAGNKICQFKLVLLGESAVGKSSLVLRFVKGQFHEYQESTIGAAFLTQTVCLDDTTVKFEIWDTAGQERYHSLAPMYYRGAQAAIVVYDITNTDTFARAKNWVKELQRQASPNIVIALAGNKADLASKRAVEFQEAQAYADDNSLLFMETSAKTAMNVNEIFMAIAKKLPKNEPQNATGAPGRNRGVDLQENNPASRSQCCSN

SEQ ID NO: 60749 - protein, 74 aa, Homo sapiens
MAGRGGAARPNGPAAGNKICQFKLVLLGESAVGKSSLVLRFVKGQFHEYQESTIGAAFLTQTVCLDDTTVKFEI

SEQ ID NO: 60750 - protein, 92 aa, Homo sapiens
MAGRGGAARPNGPAAGNKICQFKLVLLGESAVGKSSLVLRFVKGQFHEYQESTIGAAFLTQTVCLDDTTVKFEIWDTAGQERYHSLAPMYYR

SEQ ID NO: 60751 - protein, 124 aa, Homo sapiens
MAGRGGAARPNGPAAGNKICQFKLVLLGESAVGKSSLVLRFVKGQFHEYQESTIGAAFLTQTVCLDDTTVKFEIWDTAGQERYHSLAPMYYRGAQAAIVVYDITNTDTFARAKNWVKELQRQAS

SEQ ID NO: 60752 - protein, 208 aa, Homo sapiens
MSTGGDFGNPLRKFKLVFLGEQSVGKTSLITRFMYDSFDNTYQATIGIDFLSKTMYLEDRTIRLQLWDTAGQERFRSLIPSYIRDSAAAVVVYDITNVNSFQQTTKWIDDVRTERGSDVIIMLVGNKTDLADKRQVSIEEGERKAKELNVMFIETSAKAGYNVKQLFRRVAAALPGMESTQDRSREDMIDIKLEKPQEQPVSEGGCSC

SEQ ID NO: 60753 - protein, 208 aa, Homo sapiens
MSTGGDFGNPLRKFKLVFLGEQSVGKTSLITRFMYDSFDNTYQATIGIDFLSKTMYLEDRTVRLQLWDTAGQERFRSLIPSYIRDSTVAVVVYDITNVNSFQQTTKWIDDVRTERGSDVIIMLVGNKTDLADKRQVSIEEGERKAKELNVMFIETSAKAGYNVKQLFRRVAAALPGMESTQDRSREDMIDIKLEKPQEQPVSEGGCSC

SEQ ID NO: 60754 - protein, 208 aa, Homo sapiens; identical to SEQ ID NO: 60752

SEQ ID NO: 60755 - protein, 174 aa, Homo sapiens
  VARIANT 1: note = MOD_RES - Any amino acid
XPLRKFKLVFLGEQSVGKTSLITRFMYDSFDNTYQATIGIDFLSKTMYLEDRTVRLQLWDTAGQERFRSLIPSYIRDSTVAVVVYDITNVNSFQQTTKWIDDVRTERGSDVIIMLVGNKTDLADKRQVSIEEGERKAKELNVMFIETSAKAGYNVKQRIGSCHVAQASLELLDS

SEQ ID NO: 60756 - protein, 74 aa, Homo sapiens
MSTGGDFGNPLRKFKLVFLGEQSVGKTSLITRFMYDSFDNTYQATIGIDFLSKTMYLEDRTVRLQLWDTAGQER

SEQ ID NO: 60757 - protein, 175 aa, Homo sapiens
MYDSFDNTYQATIGIDFLSKTMYLEDRTIRLQLWDTAGQERFRSLIPSYIRDSAAAVVVYDITNVNSFQQTTKWIDDVRTERGSDVIIMLVGNKTDLADKRQVSIEEGERKAKELNVMFIETSAKAGYNVKQLFRRVAAALPGMESTQDRSREDMIDIKLEKPQEQPVSEGGCSC

SEQ ID NO: 60758 - protein, 142 aa, Homo sapiens
MSTGGDFGNPLRKFKLVFLGEQSVGKTSLITRFMYDSFDNTYQATIGIDFLSKTMYLEDRTIRLQLWDTAGQERFRSLIPSYIRDSAAAVVVYDITNVNSFQQTTKWIDDVRTERGSDVIIMLVGNKTDLADKRQVSIEEGE

SEQ ID NO: 60759 - protein, 104 aa, Homo sapiens
MSTGGDFGNPLRKFKLVFLGEQSVGKTSLITRFMYDSFDNTYQATIGIDFLSKTMYLEDRTLFRRVAAALPGMESTQDRSREDMIDIKLEKPQEQPVSEGGCSC

SEQ ID NO: 60760 - protein, 201 aa, Homo sapiens
  VARIANT 1: note = MOD_RES - Any amino acid
XVFPRGLALRSADVVEVGKTSLITRFMYDSFDNTYQATIGIDFLSKTMYLEDRTIRLQLWDTAGQERFRSLIPSYIRDSAAAVVVYDITNVNSFQQTTKWIDDVRTERGSDVIIMLVGNKTDLADKRQVSIEEGERKAKELNVMFIETSAKAGYNVKQLFRRVAAALPGMESTQDRSREDMIDIKLEKPQEQPVSEGGCSC

SEQ ID NO: 60761 - protein, 47 aa, Homo sapiens
MSTGGDFGNPLRKFKLVFLGEQSVGKTSLITRFMYDSFDNTYQATIG

SEQ ID NO: 60762 - protein, 254 aa, Homo sapiens
MSAGGDFGNPLRKFKLVFLGEQSVAKTSLITRFRYDSFDNTYQAIIGIDFLSKTMYLEDGTIGLRLWDTAGQERLRSLIPRYIRDSAAAVVVYDITNVNSFQQTTKWIDDVRTERGSDVIITLVGNRTDLADKRQVSVEEGERKAKGLNVTFIETRAKAGYNVKQLFRRVAAALPGMESTQDGSREDMSDIKLEKPQEQTVSEGGCSCYSPMSSSTLPQKPPYSFIDCSVNIGLNLFPSLITFCNSSLLPVSWR

SEQ ID NO: 60763 - protein, 203 aa, Homo sapiens
MGSRDHLFKVLVVGDAAVGKTSLVQRYSQDSFSKHYKSTVGVDFALKVLQWSDYEIVRLQLWDIAGQERFTSMTRLYYRDASACVIMFDVTNATTFSNSQRWKQDLDSKLTLPNGEPVPCLLLANKCDLSPWAVSRDQIDRFSKENGFTGWTETSVKENKNINEAMRVLIEKMMRNSTEDIMSLSTQGDYINLQTKSSSWSCC

SEQ ID NO: 60764 - protein, 203 aa, Homo sapiens; identical to SEQ ID NO: 60763

SEQ ID NO: 60765 - protein, 203 aa, Homo sapiens; identical to SEQ ID NO: 60763

SEQ ID NO: 60766 - protein, 131 aa, Homo sapiens
MTRLYYRDASACVIMFDVTNATTFSNSQRWKQDLDSKLTLPNGEPVPCLLLANKCDLSPWAVSRDQIDRFSKENGFTGWTETSVKENKNINEAMRVLIEKMMRNSTEDIMSLSTQGDYINLQTKSSSWSCC

SEQ ID NO: 60767 - protein, 179 aa, Homo sapiens
MGSRDHLFKVLVVGDAAVGKTSLVQRYSQDSFSKHYKSTVGGQERFTSMTRLYYRDASACVIMFDVTNATTFSNSQRWKQDLDSKLTLPNGEPVPCLLLANKCDLSPWAVSRDQIDRFSKENGFTGWTETSVKENKNINEAMRVLIEKMMRNSTEDIMSLSTQGDYINLQTKSSSWSCC

SEQ ID NO: 60768 - protein, 207 aa, Homo sapiens
MAKTYDYLFKLLLIGDSGVGKTCVLFRFSEDAFNSTFISTIGIDFKIRTIELDGKRIKLQIWDTAGQERFRTITTAYYRGAMGIMLVYDITNEKSFDNIRNWIRNIEEHASADVEKMILGNKCDVNDKRQVSKERGEKLALDYGIKFMETSAKANINVENAFFTLARDIKAKMDKKLEGNSPQGSNQGVKITPDQQKRSSFFRCVLL

SEQ ID NO: 60769 - protein, 201 aa, Homo sapiens
MSGKSLLLKVILLGDGGVGKSSLMNRYVTNKFDSQAFHTIGVEFLNRDLEVDGRFVTLQIWDTAGQERFKSLRTPFYRGADCCLLTFSVDDRQSFENLGNWQKEFIYYADVKDPEHFPFVVLGNKVDKEDRQVTTEEAQTWCMENGDYPYLETSAKDDTNVTVAFEEAVRQVLAVEEQLEHCMLGHTIDLNSGSKAGSSCC

SEQ ID NO: 60770 - protein, 862 aa, Homo sapiens
MAQPGPASQPDVSLQQRVAELEKINAEFLRAQQQLEQEFNQKRAKFKELYLAKEEDLKRQNAVLQAAQDDLGHLRTQLWEAQAEMENIKAIATVSENTKQEAIDEVKRQWREEVASLQAVMKETVRDYEHQFHLRLEQERTQWAQYRESAEREIADLRRRLSEGQEEENLENEMKKAQEDAEKLRSVVMPMEKEIAALKDKLTEAEDKIKELEASKVKELNHYLEAEKSCRTDLEMYVAVLNTQKSVLQEDAEKLRKELHEVCHLLEQERQQHNQLKHTWQKANDQFLESQRLLMRDMQRMEIVLTSEQLRQVEELKKKDQEDDEQQRLNKRKDHKKADVEEEIKIPVVCALTQEESSAQLSNEEEHLDSTRGSVHSLDAGLLLPSGDPFSKSDNDMFKDGLRRAQSTDSLGTSGSLQSKALGYNYKAKSAGNLDESDFGPLVGADSVSENFDTASLGSLQMPSGFMLTKDQERAIKAMTPEQEETASLLSSVTQGMESAYVSPSGYRLVSETEWNLLQKEVHNAGNKLGRRCDMCSNYEKQLQGIQIQEAETRDQVKKLQLMLRQANDQLEKTMKDKQELEDFIKQSSEDSSHQISALVLRAQASEILLEELQQGLSQAKRDVQEQMAVLMQSREQVSEELVRLQKDNDSLQGKHSLHVSLQQAEDFILPDTTEALRELVLKYREDIINVRTAADHVEEKLKAEILFLKEQIQAEQCLKENLEETLQLEIENCKEEIASISSLKAELERIKVEKGQLESTLREKSQQLESLQEIKISLEEQLKKETAAKATVEQLMFEEKNKAQRLQTELDVSEQVQRDFVKLSQTLQVQLERIRQADSLERIRAILNDTKLTDINQLPET

SEQ ID NO: 60771 - protein, 829 aa, Homo sapiens
MAQPGPASQPDVSLQQRVAELEKINAEFLRAQQQLEQEFNQKRAKFKELYLAKEEDLKRQNAVLQAAQDDLGHLRTQLWEAQAEMENIKAIATVSENTKQEAIDEVKRQWREEVASLQAVMKETVRDYEHQFHLRLEQERTQWAQYRESAEREIADLRRRLSEGQEEENLENEMKKAQEDAEKLRSVVMPMEKEIAALKDKLTEAEDKIKELEASKVKELNHYLEAEKSCRTDLEMYVAVLNTQKSVLQEDAEKLRKELHEVCHLLEQERQQHNQLKHTWQKANDQFLESQRLLMRDMQRMEIVLTSEQLRQVEELKKKDQEDDEQQRLNKRKDHKKADVEEEIKIPVVCALTQEESSAQLSNEEEHLDSTRGSVHSLDAGLLLPSGDPFSKSDNDMFKDGLRRAQSTDSLGTSGSLQSKALGYNYKAKSAGNLDESDFGPLVGADSVSENFDTASLGSLQMPSGFMLTKDQERAIKAMTPEQEETASLLSSVTQGMESAYVSPSGYRLVSETEWNLLQKEVHNAGNKLGRRCDMCSNYEKQLQGIQIQEAETRDQVKKLQLMLRQANDQLEKTMKDKQELEDFIKQSSEDSSHQISALVLRAQASEILLEELQQGLSQAKRDVQEQMAVLMQSREQVSEELVRLQKDNDSLQGKHSLHVSLQQAEDFILPDTTEALRELVLKYREDIINVRTAADHVEEKLKAEILFLKEQIQAEQCLKENLEETLQLEIENCKEEIASISSLKAELERIKVEKGQATVEQLMFEEKNKAQRLQTELDVSEQVQRDFVKLSQTLQVQLERIRQADSLERIRAILNDTKLTDINQLPET

SEQ ID NO: 60772 - protein, 829 aa, Homo sapiens; identical to SEQ ID NO: 60771

SEQ ID NO: 60773 - protein, 819 aa, Homo sapiens
MAQPGPASQPDEDLKRQNAVLQAAQDDLGHLRTQLWEAQAEMENIKAIATVSENTKQEAIDEVKRQWREEVASLQAVMKETVRDYEHQFHLRLEQERTQWAQYRESAEREIADLRRRLSEGQEEENLENEMKKAQEDAEKLRSVVMPMEKEIAALKDKLTEAEDKIKELEASKVKELNHYLEAEKSCRTDLEMYVAVLNTQKSVLQEDAEKLRKELHEVCHLLEQERQQHNQLKHTWQKANDQFLESQRLLMRDMQRMEIVLTSEQLRQVEELKKKDQEDDEQQRLNKRKDHKKADVEEEIKIPVVCALTQEESSAQLSNEEEHLDSTRGSVHSLDAGLLLPSGDPFSKSDNDMFKDGLRRAQSTDSLGTSGSLQSKALGYNYKAKSAGNLDESDFGPLVGADSVSENFDTASLGSLQMPSGFMLTKDQERAIKAMTPEQEETASLLSSVTQGMESAYVSPSGYRLVSETEWNLLQKEVHNAGNKLGRRCDMCSNYEKQLQGIQIQEAETRDQVKKLQLMLRQANDQLEKTMKDKQELEDFIKQSSEDSSHQISALVLRAQASEILLEELQQGLSQAKRDVQEQMAVLMQSREQVSEELVRLQKDNDSLQGKHSLHVSLQQAEDFILPDTTEALRELVLKYREDIINVRTAADHVEEKLKAEILFLKEQIQAEQCLKENLEETLQLEIENCKEEIASISSLKAELERIKVEKGQLESTLREKSQQLESLQEIKISLEEQLKKETAAKATVEQLMFEEKNKAQRLQTELDVSEQVQRDFVKLSQTLQVQLERIRQADSLERIRAILNDTKLTDINQLPET

SEQ ID NO: 60774 - protein, 716 aa, Homo sapiens
MAQPGPASQPDVSLQQRVAELEKINAEFLRAQQQLEQEFNQKRAKFKELYLAKEEDLKRQNAVLQAAQDDLGHLRTQLWEAQAEMENIKAIATVSENTKQEAIDEVKRQWREEVASLQAVMKETVRDYEHQFHLRLEQERTQWAQYRESAEREIADLRRRLSEGQEEENLENEMKKAQEDAEKLRSVVMPMEKEIAALKDKLTEAEDKIKELEASKVKELNHYLEAEKSCRTDLEMYVAVLNTQKSVLQEDAEKLRKELHQERQQHNQLKHTWQKANDQFLESQRLLMRDMQRMEIVLTSEQLRQVEELKKKDQEDDEQQRLNKRKDHKKADVEEEIKIPVVCALTQEESSAQLSNEEEHLDSTRGSVHSLDAGLLLPSGDPFSKSDNDMFKDGLRRAQSTDSLGTSGSLQSKALGYNYKAKSAGNLDESDFGPLVGADSVSENFDTASLGSLQMPSGFMLTKDQERAIKAMTPEQEETASLLSSVTQGMESAYVSPSGYRLVSETEWNLLQKEVHNAGNKLGRRCDMCSNYEKQLQGIQIQEAETRDQVKKLQLMLRQANDQLEKTMKDKQELEDFIKQSSEDSSHQISALVLRAQASEILLEELQQGLSQAKRDVQEQMAVLMQSREQVSEELVRLQKDNDSLQGKHSLHVSLQQAEDFILPDTTEALRELVLKYREDIINVRTAADHVEEKLKAEILFLKEQIQAEQCLKKKK

SEQ ID NO: 60775 - protein, 862 aa, Homo sapiens; identical to SEQ ID NO: 60770

SEQ ID NO: 60776 - protein, 533 aa, Homo sapiens
MAAAAPVAADDDERRRRPGAALEDSRSQEGANGEAESGELSRLRAELAGALAEMETMKAVAEVSESTKAEAVAAVQRQCQEEVASLQAILKDSISSYEAQITALKQERQQQQQDCEEKERELGRLKQLLSRAYPLDSLEKQMEKAHEDSEKLREIVLPMEKEIEELKAKLLRAEELIQEIQRRPRHAPSLHGSTELLPLSRDPSPPLEPLEELSGDGGPAAEAFAHNCDDSASISSFSLGGGVGSSSSLPQSRQGLSPEQEETASLVSTGTLVPEGIYLPPPGYQLVPDTQWEQLQTEMQVLLAQVQNSEQLLRTLQGTVSQAQERVQLQMAELVTTHKCLHHEVKRLNEENQGLRAEQLPSSAPQGSQQEQGEEESLPSSVPELQQLLCCTRQEARARLQAQEHGAERLRIEIVTLREALEEETVARASLEGQLRVQREETASLCSLRTEMERVQQEQSKAQLPDLLSEQRAKVLRLQAELETSEQVQRDFVRLSQALQVRLERIRQAETLEQVRSIMDEAPLTDVRDIKDT

SEQ ID NO: 60777 - protein, 569 aa, Homo sapiens
MAAAAPVAADDDERRRRPGAALEDSRSQEGANGEAESGELSRLRAELAGALAEMETMKAVAEVSESTKAEAVAAVQRQCQEEVASLQAILKDSISSYEAQITALKQERQQQQQDCEEKERELGRLKQLLSRAYPLDSLEKQMEKAHEDSEKLREIVLPMEKEIEELKAKLLRAEELIQEIQRRPRHAPSLHGSTELLPLSRDPSPPLEPLEELSGDGGPAAEAFAHNCDDSASISSFSLGGGVGSSSSLPQSRQGLSPEQEETASLVSTGTLVPEGIYLPPPGYQLVPDTQWEQLQTEGRQLQKDLESVSRERDELQEGLRRSNEDCAKQMQVLLAQVQNSEQLLRTLQGTVSQAQERVQLQMAELVTTHKCLHHEVKRLNEENQGLRAEQLPSSAPQGSQQEQGEEESLPSSVPELQQLLCCTRQEARARLQAQEHGAERLRIEIVTLREALEEETVARASLEGQLRVQREETEVLEASLCSLRTEMERVQQEQSKAQLPDLLSEQRAKVLRLQAELETSEQVQRDFVRLSQALQVRLERIRQAETLEQVRSIMDEAPLTDVRDIKDT

SEQ ID NO: 60778 - protein, 498 aa, Homo sapiens
MAAAAPVAADDDERRRRPGADSISSYEAQITALKQERQQQQQDCEEKERELGRLKQLLSRAYPLDSLEKQMEKAHEDSEKLREIVLPMEKEIEELKAKLLRAEELIQEIQRRPRHAPSLHGSTELLPLSRDPSPPLEPLEELSGDGGPAAEAFAHNCDDSASISSFSLGGGVGSSSSLPQSRQGLSPEQEETASLVSTGTLVPEGIYLPPPGYQLVPDTQWEQLQTEGRQLQKDLESVSRERDELQEGLRRSNEDCAKQMQVLLAQVQNSEQLLRTLQGTVSQAQERVQLQMAELVTTHKCLHHEVKRLNEENQGLRAEQLPSSAPQGSQQEQGEEESLPSSVPELQQLLCCTRQEARARLQAQEHGAERLRIEIVTLREALEEETVARASLEGQLRVQREETEVLEASLCSLRTEMERVQQEQSKAQLPDLLSEQRAKVLRLQAELETSEQVQRDFVRLSQALQVRLERIRQAETLEQVRSIMDEAPLTDVRDIKDT

SEQ ID NO: 60779 - protein, 694 aa, Homo sapiens
MTDTVFSNSSNRWMYPSDRPLQSNDKEQLQAGWSVHPGGQPDRQRKQEELTDEEKEIINRVIARAEKMEEMEQERIGRLVDRLENMRKNVAGDGVNRCILCGEQLGMLGSACVVCEDCKKNVCTKCGVETNNRLHSVWLCKICIEQREVWKRSGAWFFKGFPKQVLPQPMPIKKTKPQQPVSEPAAPEQPAPEPKHPARAPARGDSEDRRGPGQKTGPDPASAPGRGNYGPPVRRASEARMSSSSRDSESWDHSGGAGDSSRSPAGLRRANSVQASRPAPGSVQSPAPPQPGQPGTPGGSRPGPGPAGRFPDQKPEVAPSDPGTTAPPREERTGGVGGYPAVGAREDRMSHPSGPYSQASAAAPQPAAARQPPPPEEEEEEANSYDSDEATTLGALEFSLLYDQDNSSLQCTIIKAKGLKPMDSNGLADPYVKLHLLPGASKSNKLRTKTLRNTRNPIWNETLVYHGITDEDMQRKTLRISVCDEDKFGHNEFIGETRFSLKKLKPNQRKNFNICLERVIPMKRAGTTGSARGMALYEEEQVERVGDIEERGKILVSLMYSTQQGGLIVGIIRCVHLAAMDANGYSDPFVKLWLKPDMGKKAKHKTQIKKKTLNPEFNEEFFYDIKHSDLAKKSLDISVWDYDIGKSNDYIGGCQLGISAKGERLKHWYECLKNKDKKIERWHQLQNENHVSSD

SEQ ID NO: 60780 - protein, 694 aa, Homo sapiens; identical to SEQ ID NO: 60779

SEQ ID NO: 60781 - protein, 694 aa, Homo sapiens; identical to SEQ ID NO: 60779

SEQ ID NO: 60782 - protein, 645 aa, Homo sapiens
MTDTVFSNSSNRWMYPSDRPLQSKLKDRRLVDRLENMRKNVAGDGVNRCILCGEQLGMLGSACVVCEDCKKNVCTKCGVETNNRLHSVWLCKICIEQREVWKRSGAWFFKGFPKQVLPQPMPIKKTKPQQPVSEPAAPEQPAPEPKHPARAPARGDSEDRRGPGQKTGPDPASAPGRGNYGPPVRRASEARMSSSSRDSESWDHSGGAGDSSRSPAGLRRANSVQASRPAPGSVQSPAPPQPGQPGTPGGSRPGPGPAGRFPDQKPEVAPSDPGTTAPPREERTGGVGGYPAVGAREDRMSHPSGPYSQASAAAPQPAAARQPPPPEEEEEEANSYDSDEATTLGALEFSLLYDQDNSSLQCTIIKAKGLKPMDSNGLADPYVKLHLLPGASKSNKLRTKTLRNTRNPIWNETLVYHGITDEDMQRKTLRISVCDEDKFGHNEFIGETRFSLKKLKPNQRKNFNICLERVIPMKRAGTTGSARGMALYEEEQVERVGDIEERGKILVSLMYSTQQGGLIVGIIRCVHLAAMDANGYSDPFVKLWLKPDMGKKAKHKTQIKKKTLNPEFNEEFFYDIKHSDLAKKSLDISVWDYDIGKSNDYIGGCQLGISAKGERLKHWYECLKNKDKKIERWHQLQNENHVSSD

SEQ ID NO: 60783 - protein, 694 aa, Homo sapiens; identical to SEQ ID NO: 60779

SEQ ID NO: 60784 - protein, 12 aa, Homo sapiens
MTDTVFSNSSNR

SEQ ID NO: 60785 - protein, 83 aa, Homo sapiens
MTDTVFSNSSNRWMYPSDRPLQSNDKEQLQAGWSVHPGGQPDRQRKQEELTDEEKEIINRVIARAEKMEEMEQERIGRLVDRL

SEQ ID NO: 60786 - protein, 94 aa, Homo sapiens
MTDTVFSNSSNRWMYPSDRPLQSNDKEQLQAGWSVHPGGQPDRQRKQEELTDEEKEIINRVIARAEKMEEMEQERIGRLVDRLENMRKNVAGDG

SEQ ID NO: 60787 - protein, 163 aa, Homo sapiens
MTDTVFSNSSNRWMYPSDRPLQSNDKEQLQAGWSVHPGGQPDRQRKQEELTDEEKEIINRVIARAEKMEEMEQERIGRLVDRLENMRKNVAGDGVNRCILCGEQLGMLGSACVVCEDCKKNVCTKCGVETNNRLHSVWLCKICIEQREVWKRSGAWFFKGFPK

SEQ ID NO: 60788 - protein, 127 aa, Homo sapiens
MTDTVFSNSSNRWMYPSDRPLQSNDKEQLQAGWSVHPGGQPDRQRKQEELTDEEKEIINRVIARAEKMEEMEQERIGRLVDRLENMRKNVAGDGVNRCILCGEQLGMLGSACVVCEDCKKNVCTKCG

SEQ ID NO: 60789 - protein, 104 aa, Homo sapiens
MTDTVFSNSSNRWMYPSDRPLQSNDKEQLQAGWSVHPGGQPDRQRKQEELTDEEKEIINRVIARAEKMEEMEQERIGRLVDRLENMRKNVAGDGVNRCILCGEQ

SEQ ID NO: 60790 - protein, 39 aa, Homo sapiens
MTDTVFSNSSNRWMYPSDRPLQSNDKEQLQAGWSVHPGG

SEQ ID NO: 60791 - protein, 115 aa, Homo sapiens
MTDTVFSNSSNRWMYPSDRPLQSNDKEQLQAGWSVHPGGQPDRQRKQEELTDEEKEIINRVIARAEKMEEMEQERIGRLVDRLENMRKNVAGDGVNRCILCGEQLGMLGSACVVC

SEQ ID NO: 60792 - protein, 690 aa, Homo sapiens
MTDTVFSNSSNRWMYPSDRPLQSKLQAGWSVHPGGQPDRQRKQEELTDEEKEIINRVIARAEKMEEMEQERIGRLVDRLENMRKNVAGDGVNRCILCGEQLGMLGSACVVCEDCKKNVCTKCGVETNNRLHSVWLCKICIEQREVWKRSGAWFFKGFPKQVLPQPMPIKKTKPQQPVSEPAAPEQPAPEPKHPARAPARGDSEDRRGPGQKTGPDPASAPGRGNYGPPVRRASEARMSSSSRDSESWDHSGGAGDSSRSPAGLRRANSVQASRPAPGSVQSPAPPQPGQPGTPGGSRPGPGPAGRFPDQKPEVAPSDPGTTAPPREERTGGVGGYPAVGAREDRMSHPSGPYSQASAAAPQPAAARQPPPPEEEEEEANSYDSDEATTLGALEFSLLYDQDNSSLQCTIIKAKGLKPMDSNGLADPYVKLHLLPGASKSNKLRTKTLRNTRNPIWNETLVYHGITDEDMQRKTLRISVCDEDKFGHNEFIGETRFSLKKLKPNQRKNFNICLERVIPMKRAGTTGSARGMALYEEEQVERVGDIEERGKILVSLMYSTQQGGLIVGIIRCVHLAAMDANGYSDPFVKLWLKPDMGKKAKHKTQIKKKTLNPEFNEEFFYDIKHSDLAKKSLDISVWDYDIGKSNDYIGGCQLGISAKGERLKHWYECLKNKDKKIERWHQLQNENHVSSD

SEQ ID NO: 60793 - protein, 125 aa, Homo sapiens
MTDTVFSNSSNRWMYPSDRPLQSNDKEQLQAGWSVHPGGQPDRQRKQEELTDEEKEIINRVIARAEKMEEMEQERIGRLVDRLENMRKNVAGDGVNRCILCGEQLGMLGSACVVCEDCKKNVCTK

SEQ ID NO: 60794 - protein, 181 aa, Homo sapiens
MTDTVFSNSSNRWMYPSDRPLQSNDKEQLQAGWSVHPGGQPDRQRKQEELTDEEKEIINRVIARAEKMEEMEQERIGRLVDRLENMRKNVAGDGVNRCILCGEQLGMLGSACVVCEDCKKNVCTKCGVETNNRLHSVWLCKICIEQREVWKRSGAWFFKGFPKQVLPQPMPIKKTKPQQPV

SEQ ID NO: 60795 - protein, 94 aa, Homo sapiens; identical to SEQ ID NO: 60786

SEQ ID NO: 60796 - protein, 120 aa, Homo sapiens
MTDTVFSNSSNRWMYPSDRPLQSNDKEQLQAGWSVHPGGQPDRQRKQEELTDEEKEIINRVIARAEKMEEMEQERIGRLVDRLENMRKNVAGDGVNRCILCGEQLGMLGSACVVCEDCKK

SEQ ID NO: 60797 - protein, 134 aa, Homo sapiens
MTDTVFSNSSNRWMYPSDRPLQSNDKEQLQAGWSVHPGGQPDRQRKQEELTDEEKEIINRVIARAEKMEEMEQERIGRLVDRLENMRKNVAGDGVNRCILCGEQLGMLGSACVVCEDCKKNVCTKCGVETNNRL

SEQ ID NO: 60798 - protein, 315 aa, Homo sapiens
MADTIFGSGNDQWVCPNDRQLALRAKLQTGWSVHTYQTEKQRRKQHLSPAEVEAILQVIQRAERLDVLEQQRIGRLVERLETMRRNVMGNGLSQCLLCGEVLGFLGSSSVFCKDCRKKVCTKCGIEASPGQKRPLWLCKICSEQREVWKRSGAWFYKGLPKYILPLKTPGRADDPHFRPLPTEPAEREPRSSETSRIYTWARGRVVSSDSDSDSDLSSSSLEDRLPSTGVRDRKGDKPWKESGGSVEAPRMGFTHPPGHLSGCQSSLASGETGTGSADPPGGPRPGLTRRAPVKDTPGRAPAADAAPAGPSSCLG

SEQ ID NO: 60799 - protein, 286 aa, Homo sapiens
MADTIFGSGNDQWVCPNDRQLALRAKLQTGWSVHTYQTEKQRRKQHLSPAEVEAILQVIQRAERLDVLEQQRIGRLVERLETMRRNVMGNGLSQCLLCGEVLGFLGSSSVFCKDCRKVWKRSGAWFYKGLPKYILPLKTPGRADDPHFRPLPTEPAEREPRSSETSRIYTWARGRVVSSDSDSDSDLSSSSLEDRLPSTGVRDRKGDKPWKESGGSVEAPRMGFTHPPGHLSGCQSSLASGETGTGSADPPGGPRPGLTRRAPVKDTPGRAPAADAAPAGPSSCLG

SEQ ID NO: 60800 - protein, 286 aa, Homo sapiens; identical to SEQ ID NO: 60799

SEQ ID NO: 60801 - protein, 776 aa, Homo sapiens
MNPEEQIVTWLISLGVLESPKKTICDPEEFLKSSLKNGVVLCKLINRLMPGSVEKFCLDPQTEADCINNINDFLKGCATLQVEIFDPDDLYSGVNFSKVLSTLLAVNKATEDQLSERPCGRSSSLSAANTSQTNPQGAVSSTVSGLQRQSKTVEMTENGSHQLIVKARFNFKQTNEDELSVCKGDIIYVTRVEEGGWWEGTLNGRTGWFPSNYVREIKSSERPLSPKAVKGFETAPLTKNYYTVVLQNILDTEKEYAKELQSLLVTYLRPLQSNNNLSTVEVTSLLGNFEEVCTFQQTLCQALEECSKFPENQHKVGGCLLSLMPHFKSMYLAYCANHPSAVNVLTQHSDELEQFMENQGASSPGILILTTNLSKPFMRLEKYVTLLQELERHMEDTHPDHQDILKAIVAFKTLMGQCQDLRKRKQLELQILSEPIQAWEGEDIKNLGNVIFMSQVMVQYGACEEKEERYLMLFSNVLIMLSASPRMSGFIYQGKIPIAGTVVTRLDEIEGNDCTFEITGNTVERIVVHCNNNQDFQEWLEQLNRLIRGPASCSSLSKTSSSSCSAHSSFSSTGQPRGPLEPPQIIKPWSLSCLRPAPPLRPSAALGYKERMSYILKESSKSPKTMKKFLHKRKTERKPSEEEYVIRKSTAALEEDAQILKVIEAYCTSANFQQGHGSSTRKDSIPQVLLPEEEKLIIEETRSNGQTIMEEKSLVDTVYALKDEVRELKQENKRMKQCLEEELKSRRDLEKLVRRLLKQTDECIRGESSSKTSILP

SEQ ID NO: 60802 - protein, 622 aa, Homo sapiens
MTENGSHQLIVKARFNFKQTNEDELSVCKGDIIYVTRVEEGGWWEGTLNGRTGWFPSNYVREIKSSERPLSPKAVKGFETAPLTKNYYTVVLQNILDTEKEYAKELQSLLVTYLRPLQSNNNLSTVEVTSLLGNFEEVCTFQQTLCQALEECSKFPENQHKVGGCLLSLMPHFKSMYLAYCANHPSAVNVLTQHSDELEQFMENQGASSPGILILTTNLSKPFMRLEKYVTLLQELERHMEDTHPDHQDILKAIVAFKTLMGQCQDLRKRKQLELQILSEPIQAWEGEDIKNLGNVIFMSQVMVQYGACEEKEERYLMLFSNVLIMLSASPRMSGFIYQGKIPIAGTVVTRLDEIEGNDCTFEITGNTVERIVVHCNNNQDFQEWLEQLNRLIRGPASCSSLSKTSSSSCSAHSSFSSTGQPRGPLEPPQIIKPWSLSCLRPAPPLRPSAALGYKERMSYILKESSKSPKTMKKFLHKRKTERKPSEEEYVIRKSTAALEEDAQILKVIEAYCTSANFQQGHGSSTRKDSIPQVLLPEEEKLIIEETRSNGQTIMEEKSLVDTVYALKDEVRELKQENKRMKQCLEEELKSRRDLEKLVRRLLKQTDECIRGESSSKTSILP

SEQ ID NO: 60803 - protein, 622 aa, Homo sapiens; identical to SEQ ID NO: 60802

SEQ ID NO: 60804 - protein, 649 aa, Homo sapiens
MTENGSHQLIVKARFNFKQTNEDELSVCKGDIIYVTRVEEGGWWEGTLNGRTGWFPSNYVREIKSSDGVSLLLPGLECNGAISAHHNLCLPGSKRPLSPKAVKGFETAPLTKNYYTVVLQNILDTEKEYAKELQSLLVTYLRPLQSNNNLSTVEVTSLLGNFEEVCTFQQTLCQALEECSKFPENQHKVGGCLLSLMPHFKSMYLAYCANHPSAVNVLTQHSDELEQFMENQGASSPGILILTTNLSKPFMRLEKYVTLLQELERHMEDTHPDHQDILKAIVAFKTLMGQCQDLRKRKQLELQILSEPIQAWEGEDIKNLGNVIFMSQVMVQYGACEEKEERYLMLFSNVLIMLSASPRMSGFIYQGKIPIAGTVVTRLDEIEGNDCTFEITGNTVERIVVHCNNNQDFQEWLEQLNRLIRGPASCSSLSKTSSSSCSAHSSFSSTGQPRGPLEPPQIIKPWSLSCLRPAPPLRPSAALGYKERMSYILKESSKSPKTMKKFLHKRKTERKPSEEEYVIRKSTAALEEDAQILKVIEAYCTSANFQQGHGSSTRKDSIPQVLLPEEEKLIIEETRSNGQTIMEEKSLVDTVYALKDEVRELKQENKRMKQCLEEELKSRRDLEKLVRRLLKQTDECIRGESSSKTSILP

SEQ ID NO: 60805 - protein, 622 aa, Homo sapiens
MTENGSHQLIVKARFNFKQTNEDELSVCKGDIIYVTRVEEGGWWEGTLNGRTGWFPSNYVREIKSSERPLSPKAVKGFETAPLTKNYYTVVLQNILDTEKEYAKELQSLLVTYLRPLQSNNNLSTVEVTSLLGNFEEVCTFQQTLCQALEECSKFPENQHKVGGCLLSLMPHFKSMYLAYCANHPSAVNVLTQHSDELEQFMENQGASSPGILILTTNLSKPFMRLEKYVTLLQELERHMEDTHPDHQDILKAIVAFKTLMGQCQDLRKRKQLELQILSEPIQAWEGEDIKNLGNVIFMSQVMVQYGACEEKEERYLMLFSNVLIMLSASPRMSGFIYQGKIPIAGTVVTRLDEIEGNDCTFEITGNTVERIVVHCNNNQDFQEWLEQLNRLIRGPASCSSLSKTSSSSCSAHSSFSSTGQPRGPLEPPQIIKPWSLSCLRPAPPLRPSAALGYKEAFTFVFEESSKSPKTMKKFLHKRKTERKPSEEEYVIRKSTAALEEDAQILKVIEAYCTSANFQQGHGSSTRKDSIPQVLLPEEEKLIIEETRSNGQTIMEEKSLVDTVYALKDEVRELKQENKRMKQCLEEELKSRRDLEKLVRRLLKQTDECIRGESSSKTSILP

SEQ ID NO: 60806 - protein, 631 aa, Homo sapiens
MFYAHFVLSKRGPLAKIWLAAHWDKKLTKAHVFECNLESSVESIISPKVKMALRTSGHLLLGVVRIYHRKAKYLLADCNEAFIKIKMAFRPGVVDLPEENREAAYNAITLPEEFHDFDQPLPDLDDIDVAQQFSLNQSRVEEITMREEVGNISILQENDFGDFGMDDREIMREGSAFEDDDMLVSTTTSNLLLESEQSTSNLNEKINHLEYEDQYKDDNFGEGNDGGILDDKLISNNDGGIFDDPPALSEAGVMLPEQPAHDDMDEDDNVSMGGPDSPDSVDPVEPMPTMTDQTTLVPNEEEAFALEPIDITVKETKAKRKRKLIVDSVKELDSKTIRAQLSDYSDIVTTLDLAPPTKKLMMWKETGGVEKLFSLPAQPLWNNRLLKLFTRCLTPLVPEDLRKRRKGGEADNLDEFLKEFENPEVPREDQQQQHQQRDVIDEPIIEEPSRLQESVMEASRTNIDESAMPPPPPQGVKRKAGQIDPEPVMPPQQVEQMEIPPVELPPEEPPNICQLIPELELLPEKEKEKEKEKEDDEEEEDEDASGGDQDQEERRWNKRTQQMLHGLQRALAKTGAESISLLELCRNTNRKQAAAKFYSFLVLKKQQAIELTQEEPYSDIIATPGPRFHII

SEQ ID NO: 60807 - protein, 352 aa, Homo sapiens
MVRPVRHKKPVNYSQFDHSDSDDDFVSATVPLNKKSRTAPKELKQDKPKPNLNNLRKEEIPVQEKTPKKRLPEGTFSIPASAVPCTKMALDDKLYQRDLEVALALSVKELPTVTTNVQNSQDKSIEKHGSSKIETMNKSPHISNCSVASDYLDLDKITVEDDVGGVQGKRKAASKAAAQQRKILLEGSDGDSANDTEPDFAPGEDSEDDSDFCESEDNDEDFSMRKSKVKEIKKKEVKVKSPVEKKEKKSKSKCNALVTSVDSAPAAVKSESQSLPKKVSLSSDTTRKPLEIRSPSAESKKPKWVPPAASGGSRSSSSPLVVVSVKSPNQSLRLGLSRLARVKPLHPNATST

SEQ ID NO: 60808 - protein, 302 aa, Homo sapiens
MVRPVRHKKPVNYSQFDHSDSDDDFVSATVPLNKKSRTAPKELKQDKPKPNLNNLRKEEIPVQEKTPKKRLPEGTFSIPASAVPCTKMALDDKLYQRDLEVALALSVKELPTVTTNVQNSQDKSIEKHGSSKIETMNKSPHISNCSVASDYLDLDKITVEDDVGGVQGKRKAASKAAAQQRKILLEGSDGDSANDTEPDFAPGEDSEDDSDFCESEDNDEDFSMRKSKVKEIKKKEVKVKSPVEKKEKKSKSKCNALAASGGSRSSSSPLVVVSVKSPNQSLRLGLSRLARVKPLHPNATST

SEQ ID NO: 60809 - protein, 335 aa, Homo sapiens
MVRPVRHKKPVNYSQFDHSDSDDDFVSATVPLNKKSRTAPKELKQDKPKPNLNNLRKEEIPVQEKTPKKRMALDDKLYQRDLEVALALSVKELPTVTTNVQNSQDKSIEKHGSSKIETMNKSPHISNCSVASDYLDLDKITVEDDVGGVQGKRKAASKAAAQQRKILLEGSDGDSANDTEPDFAPGEDSEDDSDFCESEDNDEDFSMRKSKVKEIKKKEVKVKSPVEKKEKKSKSKCNALVTSVDSAPAAVKSESQSLPKKVSLSSDTTRKPLEIRSPSAESKKPKWVPPAASGGSRSSSSPLVVVSVKSPNQSLRLGLSRLARVKPLHPNATST

SEQ ID NO: 60810 - protein, 233 aa, Homo sapiens
MNKSPHISNCSVASDYLDLDKITVEDDVGGVQGKRKAASKAAAQQRKILLEGSDGDSANDTEPDFAPGEDSEDDSDFCESEDNDEDFSMRKSKVKEIKKKEVKVKSPVEKKEKKSKSKCNALVTSVDSAPAAVKSESQSLPKKVSLSSDTTRKPLEIRSPSAESKKPKWVPPGMAYLSSRTGAWKIITAASGGSRSSSSPLVVVSVKSPNQSLRLGLSRLARVKPLHPNATST

SEQ ID NO: 60811 - protein, 135 aa, Homo sapiens
MRGKTFRFEMQRDLVSFPLSPAVRVKLVSAGFQTAEELLEVKPSELSKEVGISKAEALETLQIIRRECLTNKPRYAGTSESHKKCTALELLEQEHTQGFIITFCSALDDILGGGVPLMKTTEICGAPGVGKTQLW

SEQ ID NO: 60812 - protein, 284 aa, Homo sapiens
MAELVPFAVPIESDKTLLVWELSSGPTAEALHHSLFTAFSQFGLLYSVRVFPNAAVAHPGFYAVIKFYSARAAHRAQKACDRKQLFQKSPVKVRLGTRHKAVQHQALALNSSKCQELANYYFGFNGCSKRIIKLQELSDLEERENEDSMVPLPKQSLKFFCALEVVLPSCDCRSPGIGLVEEPMDKVEEGPLSFLMKRKTAQKLAIQKALSDAFQKLLIVVLESGKIAVEYRPSEDIVGVRCEEELHGLIQVPCSPWKQYGQEEEGYLSDFSLEEEEFRLPELD

SEQ ID NO: 60813 - protein, 116 aa, Homo sapiens
MHLLVPPPQHSLFTAFSQFGLLYSVRVFPNAAVAHPGFYAVIKFYSARAAHRAQKACDRKQLFQKSPVKVRLGTRHKAVQHQALALNSSKCQELANYYFGFNGCSKRIIKDHYHSL

SEQ ID NO: 60814 - protein, 236 aa, Homo sapiens
MAELVPFAVPIESDKTLLVWELSSGPTAEALHHSLFTAFSQFGLLYSVRVFPNAAVAHPGFYAVIKFYSARAAHRAQKACDRKQLFQKSPVKVRLGTRHKAVQHQALALNSSKCQELANYYFGFNGCSKRIIKLQELSDLEERENEDSMVPLPKQSLKFFCALEVVLPSCDCRSPGIGLVEEPMDKVEEGPLSFLMKRKTAQKLAIQKALSDAFQKLLIVVLGKTVLIILEVLQFQ

SEQ ID NO: 60815 - protein, 261 aa, Homo sapiens
MHLLVPPPQHSLFTAFSQFGLLYSVRVFPNAAVAHPGFYAVIKFYSARAAHRAQKACDRKQLFQKSPVKVRLGTRHKAVQHQALALNSSKCQELANYYFGFNGCSKRIIKLQELSDLEERENEDSMVPLPKQSLKFFCALEVVLPSCDCRSPGIGLVEEPMDKVEEGPLSFLMKRKTAQKLAIQKALSDAFQKLLIVVLESGKIAVEYRPSEDIVGVRCEEELHGLIQVPCSPWKQYGQEEEGYLSDFSLEEEEFRLPELD

SEQ ID NO: 60816 - protein, 130 aa, Homo sapiens
FGFNGCSKRIIKLQELSDLEERENEDSMVPLPKQSLKFFCALEVVLPSCDCRSPGIGLVEEPMDKVEEESGKIAVEYRPSEDIVGVRCEEELHGLIQVPCSPWKQYGQEEEGYLSDFSLEEEEFRLPELD

SEQ ID NO: 60817 - protein, 166 aa, Homo sapiens
MAELVPFAVPIESDKTLLVWELSSGPTAEALHHSLFTAFSQFGLLYSVRVFPNAAVAHPGFYAVIKFYSARAAHRAQKACDRKQLFQKSPVKVRLGTRHKAVQHQALALNSSKCQELANYYFGFNGCSKRIIKVPCSPWKQYGQEEEGYLSDFSLEEEEFRLPELD

SEQ ID NO: 60818 - protein, 213 aa, Homo sapiens
MHLLVPPPQHSLFTAFSQFGLLYSVRVFPNAAVAHPGFYAVIKFYSARAAHRAQKACDRKQLFQKSPVKVRLGTRHKAVQHQALALNSSKCQELANYYFGFNGCSKRIIKLQELSDLEERENEDSMVPLPKQSLKFFCALEVVLPSCDCRSPGIGLVEEPMDKVEEGPLSFLMKRKTAQKLAIQKALSDAFQKLLIVVLGKTVLIILEVLQFQ

SEQ ID NO: 60819 - protein, 251 aa, Homo sapiens
MAELVPFAVPIESDKTLLVWELSSGPTAEALHHSLFTAFSQFGLLYSVRVFPNAAVAHPGFYAVIKFYSARAAHRAQKACDRKQLFQKSPVKVRLGTRHKAVQHQALALNSSKCQELANYYFGFNGCSKRIIKLQELSDLEERENEDSMVPLPKQSLKFFCALEVVLPSCDCRSPGIGLVEEPMDKVEEESGKIAVEYRPSEDIVGVRCEEELHGLIQVPCSPWKQYGQEEEGYLSDFSLEEEEFRLPELD

SEQ ID NO: 60820 - protein, 139 aa, Homo sapiens
MAELVPFAVPIESDKTLLVWELSSGPTAEALHHSLFTAFSQFGLLYSVRVFPNAAVAHPGFYAVIKFYSARAAHRAQKACDRKQLFQKSPVKVRLGTRHKAVQHQALALNSSKCQELANYYFGFNGCSKRIIKDHYHSL

SEQ ID NO: 60821 - protein, 143 aa, Homo sapiens
MHLLVPPPQHSLFTAFSQFGLLYSVRVFPNAAVAHPGFYAVIKFYSARAAHRAQKACDRKQLFQKSPVKVRLGTRHKAVQHQALALNSSKCQELANYYFGFNGCSKRIIKVPCSPWKQYGQEEEGYLSDFSLEEEEFRLPELD

SEQ ID NO: 60822 - protein, 910 aa, Homo sapiens
MRRSAAPSQLQGNSFKKPKFIPPGRSNPGLNEEITKLNPDIKLFEGVAINNTFLPSQNDLRICSLNLPSEESTREINNRDNCSGKYCFEAPTLATLDPPHTVHSAPKEVAVSKEQEEKSDSLVKYFSVVWCKPSKKKHKKWEGDAVLIVKGKSFILKNLEGKDIGRGIGYKFKELEKIEEGQTLMICGKEIEVMGVISPDDFSSGRCFQLGGGSTAISHSSQVARKCFSNPFKSVCKPSSKENRQNDFQNCKPRHDPYTPNSLVMPRPDKNHQWVFNKNCFPLVDVVIDPYLVYHLRPHQKEGIIFLYECVMGMRMNGRCGAILADEMGLGKTLQCISLIWTLQCQGPYGGKPVIKKTLIVTPGSLVNNWKKEFQKWLGSERIKIFTVDQDHKVEEFIKSIFYSVLIISYEMLLRSLDQIKNIKFDLLICDEGHRLKNSAIKTTTALISLSCEKRIILTGTPIQNDLQEFFALIDFVNPGILGSLSSYRKIYEEPIILSREPSASEEEKELGERRAAELTCLTGLFILRRTQEIINKYLPPKIENVVFCRPGALQIELYRKLLNSQVVRFCLQGLLENSPHLICIGALKKLCNHPCLLFNSIKEKECSSTCDKNEEKSLYKGLLSVFPADYNPLLFTEKESGKLQVLSKLLAVIHELRPTEKVVLVSNYTQTLNILQEVCKRHGYAYTRLDGQTPISQRQQIVDGFNSQHSSFFIFLLSSKAGGVGLNLIGGSHLILYDIDWNPATDIQAMSRVWRDGQKYPVHIYRLLTTGTIEEKIYQRQISKQGLCGAVVDLTKTSEHIQFSVEELKNLFTLHESSDCVTHDLLDCECTGEEVHTGDSLEKFIVSRDCQLGPHHQKSNSLKPLSMSQLKQWKHFSGDHLNLTDPFLERITENVSFIFQNITTQATGT

SEQ ID NO: 60823 - protein, 299 aa, Homo sapiens
MVGKARSSNFTLSEKLDLLKLVKPYVKILEEHTNKHSVIVEKNRCWDIIAVNYNAIGVDRPPRTAQGLRTLYKRLKEYAKQELLQQKETQSDFKSNISEPTKKVMEMIPQISSFCLVRDRNHIQSANLDEEAQAGTSSLQVMLDHHPVAITVEVKQEEDIKPPPPLVLNSQQSDTLEQREEHELVHVMERSLSPSLSSVDMRMTSSPSSIPRRDDFFRHESGEHFRSLLGYDPQILQMLKEEHQIILENQKNFGLYVQEKRDGLKRRQQLEEELLRAKIEVEKLKAIRLRHDLPEYNSL

SEQ ID NO: 60824 - protein, 125 aa, Homo sapiens
MRRSAAPSQLQGNSFKKPKFIPPGRSNPGLNEEITKLNPDIKLFEGVAINNTFLPSQNDLRICSLNLPSEESTREINNRDNCSGKYCFEAPTLATLDPPHTVHSAPKEVAVSKEQEEKSDSLVKY

SEQ ID NO: 60825 - protein, 117 aa, Homo sapiens
MRRSAAPSQLQGNSFKKPKFIPPGRSNPGLNEEITKLNPDIKLFEGVAINNTFLPSQNDLRICSLNLPSEESTREINNRDNCSGKYCFEAPTLATLDPPHTVQTWMRRHRLVPVHYR

SEQ ID NO: 60826 - protein, 158 aa, Homo sapiens
MLDHHPVAITVEVKQEEDIKPPPPLVLNSQQSDTLEQREEHELVHVMERSLSPSLSSVDMRMTSSPSSIPRRDDFFRHESGEHFRSLLGYDPQILQMLKEEHQIILENQKNFGLYVQEKRDGLKRRQQLEEELLRAKIEVEKLKAIRLRHDLPEYNSL

SEQ ID NO: 60827 - protein, 582 aa, Homo sapiens
MGLGKTLQCISLIWTLQCQGPYGGKPVIKKTLIVTPGSLVNNWKKEFQKWLGSERIKIFTVDQDHKVEEFIKSIFYSVLIISYEMLLRSLDQIKNIKFDLLICDEGHRLKNSAIKTTTALISLSCEKRIILTGTPIQNDLQEFFALIDFVNPGILGSLSSYRKIYEEPIILSREPSASEEEKELGEREQLNLLASLDSLLRRTQEIINKYLPPKIENVVFCRPGALQIELYRKLLNSQVVRFCLQGLLENSPHLICIGALKKLCNHPCLLFNSIKEKECSSTCDKNEEKSLYKGLLSVFPADYNPLLFTEKESGKLQVLSKLLAVIHELRPTEKVVLVSNYTQTLNILQEVCKRHGYAYTRLDGQTPISQRQQIVDGFNSQHSSFFIFLLSSKAGGVGLNLIGGSHLILYDIDWNPATDIQAMSRVWRDGQKYPVHIYRLLTTGTIEEKIYQRQISKQGLCGAVVDLTKTSEHIQFSVEELKNLFTLHESSDCVTHDLLDCECTGEEVHTGDSLEKFIVSRDCQLGPHHQKSNSLKPLSMSQLKQWKHFSGDHLNLTDPFLERITENVSFIFQNITTQATGT

SEQ ID NO: 60828 - protein, 429 aa, Homo sapiens
MAAMLKCVMSGSQVKVFGKAVQALSRISDEFWLDPSKKGLALRCVNSSRSAYGCVLFSPVFFQHYQWSALVKMSENELDTTLHLKCKLGMKSILPIFRCLNSLERNIEKCRIFTRSDKCKVVIQFFYRHGIKRTHNICFQESQPLQVIFDKNVCTNTLMIQPRLLADAIVLFTSSQEEVTLAVTPLNFCLKSSNEESMDLSNAVHSEMFVGSDEFDFFQIGMDTEITFCFKELKGILTFSEATHAPISIYFDFPGKPLALSIDDMLVEANFILATLADEQSRASSPQSLCLSQKRKRSDLIEKKAGKNVTGQALECISKKAAPRRLYPKETLTNISALENCGSPAMKRVDGDVSEVSESSVSNTEEVPGSLCLRKFSCMFFGAVSSDQQEHFNHPFDSLARASDSEEDMNNVCCRKEFNGSDAKYFCII

SEQ ID NO: 60829 - protein, 345 aa, Homo sapiens
MSENELDTTLHLKCKLGMKSILPIFRCLNSLERNIEKCRIFTRSDKCKVVIQFFYRHGIKRTHNICFQESQPLQVIFDKNVCTNTLMIQPRLLADAIVLFTSSQEEVTLAVTPLNFCLKSSNEESMDLSNAVHSEMFVGSDEFDFFQIGMDTEITFCFKELKGILTFSEATHAPISIYFDFPGKPLALSIDDMLVEANFILATLADEQSRASSPQSLCLSQKRKRSDLIEKKAGKNVTGQALECISKKAAPRRLYPKETLTNISALENCGSPAMKRVDGDVSEVSESSVSNTEEVPGSLCLRKFSCMFFGAVSSDQQEHFNHPFDSLARASDSEEDMNNGSFSIF

SEQ ID NO: 60830 - protein, 345 aa, Homo sapiens; identical to SEQ ID NO: 60829

SEQ ID NO: 60831 - protein, 716 aa, Homo sapiens
MEDSTSPKQEKENQEELGETRRPWEGKTAASPQYSEPESSEPLEAKQGPETGRQSRSSRPWSPQSRAKTPLGGPAGPETSSPAPVSPREPSSSPSPLAPARQDLAAPPQSDRTTSVIPEAGTPYPDPLEQSSDKRESTPHHTSQSEGNTFQQSQQPKPHLCGRRDVSYNNAKQKELRFDVFQEEDSNSDYDLQQPAPGGSEVAPSMLEITIQNAKAYLLKTSSNSGFNLYDHLSNMLTKILNERPENAVDIFENISQDVKMAHFSKKFDALQNENELLPTYEIAEKQKALFLQGHLEGVDQELEDEIAENALPNVMESAFYFEQAGVGLGTDETYRIFLALKQLTDTHPIQRCRFWGKILGLEMNYIVAEVEFREGEDEEEVEEEDVAEERDNGESEAHEDEEDELPKSFYKAPQAIPKEESRTGANKYVYFVCNEPGRPWVKLPPVIPAQIVIARKIKKFFTGRLDAPIISYPPFPGNESNYLRAQIARISAGTHVSPLGFYQFGEEEGEEEEEAEGGRNSFEENPDFEGIQVIDLVESLSNWVHHVQHILSQGRCNWFNSIQKNEEEEEEEDEEKDDSDYIEQEVGLPLLTPISEDLEIQNIPPWTTRLSSNLIPQYAIAVLQSNLWPGAYAFSNGKKFENFYIGWGHKYSPDNYTPPVPPPVYQEYPSGPEITEMDDPSVEEEQAFRAAQEAVLLAAENEESEEDEDEEDDYD

SEQ ID NO: 60832 - protein, 469 aa, Homo sapiens
MEDSTSPKQEKENQEELGETRRPWEGKTAASPQYSEPESSEPLEAKQGPETGRQSRSSRPWSPQSRAKTPLGGPAGPETSSPAPVSPREPSSSPSPLAPARQDLAAPPQSDRTTSVIPEAGTPYPDPLEQSSDKRESTPHHTSQSEGNTFQQSQQPKPHLCGRRDVSYNNAKQKELRFDVFQEEDSNSDYDLQQPAPGGSEVAPSMLEITIQNAKAYLLKTSSNSGFNLYDHLSNMLTKILNERPENAVDIFENISQDVKMAHFSKKFDALQNENELLPTYEIAEKQKALFLQGHLEGVDQELEDEIGRCNWFNSIQKNEEEEEEEDEEKDDSDYIEQEVGLPLLTPISEDLEIQNIPPWTTRLSSNLIPQYAIAVLQSNLWPGAYAFSNGKKFENFYIGWGHKYSPDNYTPPVPPPVYQEYPSGPEITEMDDPSVEEEQAFRAAQEAVLLAAENEESEEDEDEEDDYD

SEQ ID NO: 60833 - protein, 600 aa, Homo sapiens
MEDSTSPKQEKENQEELGETRRPWEGKTAASPQYSEPESSEPLEAKQGPETGRQSRSSRPWSPQSRAKTPLGGPAGPETSSPAPVSPREPSSSPSPLAPARQDLAAPPQSDRTTSVIPEAGTPYPDPLEQSSDKRESTPHHTSQSEGNTFQQSQQPKPHLCGRRDVSYNNAKQKELRFDVFQEEDSNSDYDLQQPAPGGSEVAPSMLEITIQNAKAYLLKTSSNSGFNLYDHLSNMLTKILNERPENAVDIFENISQDVKMAHFSKKFDALQNENELLPTYEIAEKQKALFLQGHLEGVDQELEDEIAENALPNVMESAFYFEQAGVGLGTDETYRIFLALKQLTDTHPIQRCRFWGKILGLEMNYIVAEVEFREGEDEEEVEEEDVAEERDNGESEAHEDEEDELPKSFYKAPQAIPKEESRTGANKYVYFVCNEPGRPWVKLPPVIPAQIVIARKIKKFFTGRLDAPIISYPPFPGNESNYLRAQIARISAGTHVSPLGFYQFGEEEGEEEEEAEGGRNSFEENPDFEGIQVIDLVESLSNWVHHVQHILSQRFRIYPPGQHGYPQISFHNMLLQSFNPTFGLEHMPSPMAKSLKIST

SEQ ID NO: 60834 - protein, 511 aa, Homo sapiens
MLEITIQNAKAYLLKTSSNSGFNLYDHLSNMLTKILNERPENAVDIFENISQDVKMAHFSKKFDALQNENELLPTYEIAEKQKALFLQGHLEGVDQELEDEIAENALPNVMESAFYFEQAGVGLGTDETYRIFLALKQLTDTHPIQRCRFWGKILGLEMNYIVAEVEFREGEDEEEVEEEDVAEERDNGESEAHEDEEDELPKSFYKAPQAIPKEESRTGANKYVYFVCNEPGRPWVKLPPVIPAQIVIARKIKKFFTGRLDAPIISYPPFPGNESNYLRAQIARISAGTHVSPLGFYQFGEEEGEEEEEAEGGRNSFEENPDFEGIQVIDLVESLSNWVHHVQHILSQGRCNWFNSIQKNEEEEEEEDEEKDDSDYIEQEVGLPLLTPISEDLEIQNIPPWTTRLSSNLIPQYAIAVLQSNLWPGAYAFSNGKKFENFYIGWGHKYSPDNYTPPVPPPVYQEYPSGPEITEMDDPSVEEEQAFRAAQEAVLLAAENEESEEDEDEEDDYD

SEQ ID NO: 60835 - protein, 176 aa, Homo sapiens
MLVKRDYRYDRVLFWGRILGLVADYYIAQGLSEDQLAPRKTLYSLNCTEWSLLPPATEEMVAQSSVVKGRFMGDPSYEYEHTELQKVNEGEKVFEEEIVVQIKEETRLVSVIDQIDKAVAIIPRGALFKTPFGPTHVNRTFEGYYNWYKTPAPHPTCDGNQGVRARGRSPSLGRFL

SEQ ID NO: 60836 - protein, 276 aa, Homo sapiens
MDADSLLLSLELASGSGQGLSPDRRASLLTSLMLVKRDYRYDRVLFWGRILGLVADYYIAQGLSEDQLAPRKTLYSLNCTEWSLLPPATEEMVAQSSVVKGRFMGDPSYEYEHTELQKVNEGEKVFEEEIVVQIKEETRLVSVIDQIDKAVAIIPRGALFKTPFGPTHVNRTFEGLSLSEAKKLSSYFHFREPVELKNKTLLEKADLDPSLDFMDSLEHDIPKGSWSIQMERGNALVVLRSLLWPGLTFYHAPRTKNYGYVYVGTGEKNMDLPFML

SEQ ID NO: 60837 - protein, 306 aa, Homo sapiens
MDADSLLLSLELASGSGQGLSPDRRASLLTSLMLVKRDYRYDRVLFWGRILGLVADYYIAQGLSEDQLAPRKTLYSLNCTEWSLLPPATEEMVAQSSVVKGRFMGDPSYEYEHTELQKVNEGEKVFEEEIVIDKAVAIIPRGALFKTPFGPTHVNRTFEGLSLSEAKKLSSYFHFREPVELKNKTLLEKADLDPSLDFMDSLEHDIPKGSEAVVQGDFTWLLSRCGFGWPCSWDSCSVSMRVLEHPDGEGQCPGGAAQPALAGPHLLPCSPHQELWLRLRGHWREEHGLALHAIEWEPAWMFLNRV

SEQ ID NO: 60838 - protein, 133 aa, Homo sapiens
  VARIANT 1: note = MOD_RES - Any amino acid
XLNCTEWSLLPPATEEMVAQSSVVKGRFMGDPSYEYEHTELQKVNEGEKVFEEEIVVQIKEETRLVSVIDQIDKAVAIIPRGALFKTPFGPTHVNRTFEGYYNWYKTPAPHPTCDGNQGVRARGRSPSLGRFL

SEQ ID NO: 60839 - protein, 361 aa, Homo sapiens
MWVLTPAAFAGKLLSVFRQPLSSLWRSLVPLFCWLRATFWLLATKRRKQQLVLRGPDETKEEEEDPPLPTTPTSVNYHFTRQCNYKCGFCFHTAKTSFVLPLEEAKRGLLLLKEAGMEKINFSGGEPFLQDRGEYLGKLVRFCKVELRLPSVSIVSNGSLIRERWFQNYGEYLDILAISCDSFDEEVNVLIGRGQGKKNHVENLQKLRRWCRDYRVAFKINSVINRFNVEEDMTEQIKALNPVRWKVFQCLLIEGENCGEDALREAERFVIGDEEFERFLERHKEVSCLVPESNQKMKDSYLILDEYMRFLNCRKGRKDPSKSILDVGVEEAIKFSGFDEKMFLKRGGKYIWSKADLKLDW

SEQ ID NO: 60840 - protein, 254 aa, Homo sapiens [sequence omitted]

SEQ ID NO: 60841 - protein, 557 aa, Homo sapiens
MYKRNGLMASVLVTSATPQGSSSSDSLEGQSCDYASKSYDAVVFDVLKVTPEEFASQITLMDIPVFKAIQPEELASCGWSKKEKHSLAPNVVAFTRRFNQVSFWVVREILTAQTLKIRAEILSHFVKIAKKLLELNNLHSLMSVVSALQSAPIFRLTKTWALLNRKDKTTFEKLDYLMSKEDNYKRTREYIRSLKMVPSIPYLGIYLLDLIYIDSAYPASGSIMENEQRSNQMNNILRIIADLQVSCSYDHLTTLPHVQKYLKSVRYIEELQKFVEDDNYKLSLRIEPGSSSPRLVSSKEDLAGPSAGSGSARFSRRPTCPDTSVAGSLPTPPVPRHRKSHSLGNNMMCQLSVVESKSATFPSEKARHLLDDSVLESRSPRRGLALTSSSAVTNGLSLGSSESSEFSEEMSSGLESPTGPCICSLGNSAAVPTMEGPLRRKTLLKEGRKPALSSWTRYWVILSGSTLLYYGAKSLRGTDRKHYKSTPGKKVSIVGWMVQLPDDPEHPDIFQLNNPDKGNVYKFQTGSRFHAILWHKHLDDACKSNRPQVPANLMSFE

SEQ ID NO: 60842 - protein, 173 aa, Homo sapiens
MYKRNGLMASVLVTSATPQGSSSSDSLEGQSCDYASKSYDAVVFDVLKVTPEEFASQITLMDIPVFKAIQPEELASCGWSKKEKHSLAPNVVAFTRRFNQKLLELNNLHSLMSVVSALQSAPIFRLTKTWALLNRKDKTTFEKLDYLMSKEDNYKRTREYIRSLKMVPSIPYL

SEQ ID NO: 60843 - protein, 529 aa, Homo sapiens
MYKRNGLMASVLVTSATPQGSSSSDSLEGQSCDYASKSYDAVVFDVLKVTPEEFASQITLMDIPVFKAIQPEELASCGWSKKEKHSLAPNVVAFTRRFNQVSFWVVREILTAQTLKIRAEILSHFVKIAKKLLELNNLHSLMSVVSALQSAPIFRLTKTWALLNRKDKTTFEKLDYLMSKEDNYKRTREYIRSLKMVPSIPYLGIYLLDLIYIDSAYPASGSIMENEQRSNQMNNILRIIADLQVSCSYDHLTTLPHVQKYLKSVRYIEELQKFVEDDNYKLSLRIEPGSSSPRLVSSKEDLAGPSAGSGSARFSRRPTCPDTSVAGSLPTPPVPRHRKSHSLGNNRGRLYATLGPNWRVPVRNSPRTRSCVYSPTGPCICSLGNSAAVPTMEGPLRRKTLLKEGRKPALSSWTRYWVILSGSTLLYYGAKSLRGTDRKHVSIVGWMVQLPDDPEHPDIFQLNNPDKGNVYKFQTGSRFHAILWHKHLDDACKSNRPQEAGAAPGPTGTDSHEVDHLEGGAGKEAGPCA

SEQ ID NO: 60844 - protein, 305 aa, Homo sapiens
MYKRNGLMASVLVTSATPQGSSSSDSLEGQSCDYASKSYDAVVFDVLKVTPEEFASQITLMDIPVFKAIQPEELASCGWSKKEKHSLAPNVVAFTRRFNQVSFWVVREILTAQTLKIRAEILSHFVKIAKKLLELNNLHSLMSVVSALQSAPIFRLTKTWALLNRKDKTTFEKLDYLMSKEDNYKRTREYIRSLKMVPSIPYLGIYLLDLIYIDSAYPASGSIMENEQRSNQMNNILRIIADLQVSCSYDHLTTLPHVQKYLKSVRYIEELQKFVEDDNYKLSLRIEPGSSSPRLVSSKEDLAAM

SEQ ID NO: 60845 - protein, 213 aa, Homo sapiens
MYKRNGLMASVLVTSATPQGSSSSDSLEGQSCDYASKSYDAVVFDVLKVTPEEFASQITLMDIPVFKAIQPEELASCGWSKKEKHSLAPNVVAFTRRFNQVSFWVVREILTAQTLKIRAEILSHFVKIAKKLLELNNLHSLMSVVSALQSAPIFRLTKTWALLNRKDKTTFEKLDYLMSKEDNYKRTREYIRSLKMVPSIPYLGRSLNWLIFF

SEQ ID NO: 60846 - protein, 108 aa, Homo sapiens
MYKRNGLMASVLVTSATPQGSSSSDSLEGQSCDYASKSYDAVVFDVLKVTPEEFASQITLMDIPVFKAIQPEKGWPARMEDSLQKSTVSSRPHDTLQFRKTLPVGPGT

SEQ ID NO: 60847 - protein, 384 aa, Homo sapiens
MYKRNGLMASVLVTSATPQGSSSSDSLEGQSCDYASKSYDAVVFDVLKVTPEEFASQITLMDIPVFKAIQPEELASCGWSKKEKHSLAPNVVAFTRRFNQVSFWVVREILTAQTLKIRAEILSHFVKIAKKLLELNNLHSLMSVVSALQSAPIFRLTKTWALLNRKDKTTFEKLDYLMSKEDNYKRTREYIRSLKMVPSIPYLGIYLLDLIYIDSAYPASGSIMENEQRSNQMNNILRIIADLQVSCSYDHLTTLPHVQKYLKSVRYIEELQKFVEDDNYKLSLRIEPGSSSPRLVSSKEDLAVSHLSSLSHQGQAEEARLKPTSGQHPAWMWPSSSRVPAAPPASAAPRSPWPRNLRNDQGQPGAVALTCNPSTLGSRSRRIT

SEQ ID NO: 60848 - protein, 537 aa, Homo sapiens
MYKRNGLMASVLVTSATPQGSSSSDSLEGQSCDYASKSYDAVVFDVLKVTPEEFASQITLMDIPVFKAIQPEELASCGWSKKEKHSLAPNVVAFTRRFNQVSFWVVREILTAQTLKIRAEILSHFVKIAKKLLELNNLHSLMSVVSALQSAPIFRLTKTWALLNRKDKTTFEKLDYLMSKEDNYKRTREYIRSLKMVPSIPYLGIYLLDLIYIDSAYPASGSIMENEQRSNQMNNILRIIADLQVSCSYDHLTTLPHVQKYLKSVRYIEELQKFVEDDNYKLSLRIEPGSSSPRLVSSKEDLAGPSAGSGSARFSRRPTCPDTSVAGSLPTPPVPRHRKSHSLGNNRGRLYATLGPNWRVPVRNSPRTRSCVYSPTGPCICSLGNSAAVPTMEGPLRRKTLLKEGRKPALSSWTRYWVILSGSTLLYYGAKSLRGTDRKHYKSTPGKKVSIVGWMVQLPDDPEHPDIFQLNNPDKGNVYKFQTGSRFHAILWHKHLDDACKSNRPQEAGAAPGPTGTDSHEVDHLEGGAGKEAGPCA

SEQ ID NO: 60849 - protein, 153 aa, Homo sapiens
  VARIANT 1: note = MOD_RES - Any amino acid
XNSPRTRSCVYSPTGPCICSLGNSAAVPTMEGPLRRKTLLKEGRKPALSSWTRYWVILSGSTLLYYGAKSLRGTDRKHYKSTPGKKVSIVGWMVQLPDDPEHPDIFQLNNPDKGNVYKFQTGSRFHAILWHKHLDDACKSNRPQVPANLMSFE

SEQ ID NO: 60850 - protein, 2083 aa, Homo sapiens
MFSKKPHGDVKKSTQKVLDTKKDALTRLKHLRIVIENAESIDLKQFFDQHFSHIYYVFFENFVTIEASLKQKGHKSQREELDAILFIFEKILQLLPERIHQRWQFHSIGLILKKLLHTGNSLKIRREGVRLFLLWLQALQNNCSKEQLWMFSCLIPGFSAPQSEHGPRTLDNLINPPLNLQETQVTIEEITPLVPPQSGDKGQEDLTSYFLEALLKYIVIQVKSLEWKNKENQERGFSFLFSHFKKYYLPYIFPNICKENSLYHPILDIPQMRPKPHYVVIKKDAETNEAIYCTKEPFIKARVIVIRWLVSFWLEPKPHTGPHIPGMEGEVLPKNIQRAAASLVSREESKNDNADKTDRTTEPEQSHSNTSTLTEREPSSSSLCSIDEEHLTDIEIVRRVFSSKRSNVNFVTEIFRQAFLLPICEAAAMRKVVKVYQEWIQQEEKPLFMQEPEEIVITSSDLPCIENVTDHDISMEEGEKREEENGTNTADHVRNSSWAKNGSYQGALHNASEEATEQNIRAGTQAVLQVFIINSSNIFLLEPANEIKNLLDEHTDMCKRILNIYRYMVVQVSMDKKTWEQMLLVLLRVTESVLKMPSQAFLQFQGKKNMTLAGRLAGPLFQTLIVAWIKANLNVYISRELWDDLLSVLSSLTYWEELATEWSLTMETLTKVLARNLYSLDLSDLPLDKLSEQKQKKHKGKGVGHEFQKVSVDKSFSRGWSRDQPGQAPMRQRSATTTGSPGTEKARSIVRQKTVAMRSRSIGECALPSAYIRSAKSAPVLIHTSKPFLPDIVLTPLSDELSDIDDAQILPRSTRVRHFSQSEETGNEVFGALNEEQPLPRSSSTSDILEPFTVERAKVNKEDMSQKLPPLNSDIGGSSANVPDLMDEFIAERLRSGNASTMTRRGSSPGSLEIPKDLPDILNKQNQMRPIDDPGVPSEWTSPASAGSSDLISSDSHSDSFSAFQYDGRKFDNFGFGTDTGVTSSADVDSGSGHHQSAEEQEVASLTTLHIDSETSSLNQQAFSAEVATITGSESASPVHSPLGSRSQTPSPSTLNIDHMEQKDLQLDEKLHHSVLQTPDDLEISEFPSECCSVMAGGTLTGWHADVATVMWRRMLGILGDVNSIMDPEIHAQVFDYLCELWQNLAKIRDNLGISTDNLTSPSPPVLIPPLRILTPWLFKATMLTDKYKQGKLHAYKLICNTMKRRQDVSPNRDFLTHFYNIMHCGLLHIDQDIVNTIIKHCSPQFFSLGLPGATMLIMDFIVAAGRVASSAFLNAPRVEAQVLLGSLVCFPNLYCELPSLHPNIPDVAVSQFTDVKELIIKTVLSSARDEPSGPARCVALCSLGIWICEELVHESHHPQIKEALNVICVSLKFTNKTVAHVACNMLHMLVHYVPRLQIYQPDSPLKIIQILIATITHLLPSTEASSYEMDKRLVVSLLLCLLDWIMALPLKTLLQPFHATGAESDKTEKSVLNCIYKVLHGCVYGAQCFSNPRYFPMSLSDLASVDYDPFMHLESLKEPEPLHSPDSERSSKLQPVTEVKTQMQHGLISIAARTVITHLVNHLGHYPMSGGPAMLTSQVCENHDNHYSESTELSPELFESPNIQFFVLNNTTLVSCIQIRSEENMPGGGLSAGLASANSNVRIIVRDLSGKYSWDSAILYGPPPVSGLSEPTSFMLSLSHQEKPEEPPTSNECLEDITVKDGLSLQFKRFRETVPTWDTIRDEEDVLDELLQYLGVTSPECLQRTGISLNIPAPQPVCISEKQENDVINAILKQHTEEKEFVEKHFNDLNMKAVEQDEPIPQKPQSAFYYCRLLLSILGMNSWDKRRSFHLLKKNEKLLRELRNLDSRQCRETHKIAVFYVAEGQEDKHSILTNTGGSQAYEDFVAGLGWEVNLTNHCGFMGGLQKNKSTGLTTPYFATSTVEVIFHVSTRMPSDSDDSLTKKLRHLGNDEVHIVWSEHTRDYRRGIIPTEFGDVLIVIYPMKNHMFSIQIMKKPEVPFFGPLFDGAIVNGKVLPIMVRATAINASRALKSLIPLYQNFYEERARYLQTIVQHHLEPTTFEDFAAQVFSPAPYHHLPSDADH

SEQ ID NO: 60851 - protein, 2083 aa, Homo sapiens
MFSKKPHGDVKKSTQKVLDTKKDALTRLKHLRIVIENAESIDLKQFFDQHFSHIYYVFFENFVTIEASLKQKGHKSQREELDAILFIFEKILQLLPERIHQRWQFHSIGLILKKLLHTGNSLKIRREGVRLFLLWLQALQNNCSKEQLWMFSCLIPGFSAPQSEHGPRTLDNLINPPLNLQETQVTIEEITPLVPPQSGDKGQEDLTSYFLEALLKYIVIQVKSLEWKNKENQERGFSFLFSHFKKYYLPYIFPNICKENSLYHPILDIPQMRPKPHYVVIKKDAETNEAIYCTKEPFIKARVIVIRWLVSFWLEPKPHTGPHIPGMEGEVLPKNIQRAAASLVSREESKNDNADKTDRTTEPEQSHSNTSTLTEREPSSSSLCSIDEEHLTDIEIVRRVFSSKRSNVNFVTEIFRQAFLLPICEAAAMRKVVKVYQEWIQQEEKPLFMQEPEEIVITSSDLPCIENVTDHDISMEEGEKREEENGTNTADHVRNSSWAKNGSYQGALHNASEEATEQNIRAGTQAVLQVFIINSSNIFLLEPANEIKNLLDEHTDMCKRILNIYRYMVVQVSMDKKTWEQMLLVLLRVTESVLKMPSQAFLQFQGKKNMTLAGRLAGPLFQTLIVAWIKANLNVYISRELWDDLLSVLSSLTYWEELATEWSLTMETLTKVLARNLYSLDLSDLPLDKLSEQKQKKHKGKGVGHEFQKVSVDKSFSRGWSRDQPGQAPMRQRSATTTGSPGTEKARSIVRQKTVDIDDAQILPRSTRVRHFSQSEETGNEVFGALNEEQPLPRSSSTSDILEPFTVERAKVNKEDMSQKLPPLNSDIGGSSANVPDLMDEFIAERLRSGNASTMTRRGSSPGSLEIPKDLPDILNKQNQMRPIDDPGVPSEWTSPASAGSSDLISSDSHSDSFSAFQYDGRKFDNFGFGTDTGVTSSADVDSGSGHHQSAEEQEVASLTTLHIDSETSSLNQQAFSAEVATITGSESASPVHSPLGSRSQTPSPSTLNIDHMEQKDLQLDEKLHHSVLQTPDDLEISEFPSECCSVMAGGTLTGWHADVATVMWRRMLGILGDVNSIMDPEIHAQVFDYLCELWQNLAKIRDNLGISTDNLTSPSPPVLIPPLRILTPWLFKATMLTDKYKQGKLHAYKLICNTMKRRQDVSPNRDFLTHFYNIMHCGLLHIDQDIVNTIIKHCSPQFFSLGLPGATMLIMDFIVAAGRVASSAFLNAPRVEAQVLLGSLVCFPNLYCELPSLHPNIPDVAVSQFTDVKELIIKTVLSSARDEPSGPARCVALCSLGIWICEELVHESHHPQIKEALNVICVSLKFTNKTVAHVACNMLHMLVHYVPRLQIYQPDSPLKIIQILIATITHLLPSTEASSYEMDKRLVVSLLLCLLDWIMALPLKTLLQPFHATGAESDKTEKSVLNCIYKVLHGCVYGAQCFSNPRYFPMSLSDLASVDYDPFMHLESLKEPEPLHSPDSERSSKLQPVTEVKTQMQHGLISIAARTVITHLVNHLGHYPMSGGPAMLTSQVCENHDNHYSESTELSPELFESPNIQFFVLNNTTLVSCIQIRSEENMPGGGLSAGLASANSNVRIIVRDLSGKYSWDSAILYGPPPVSGLSEPTSFMLSLSHQEKPEEPPTSNECLEDITVKDGLSLQFKRFRETVPTWDTIRDEEDVLDELLQYLGVTSPECLQRTGISLNIPAPQPVCISEKQENDVINAILKQHTEEKEFVEKHFNDLNMKAVEQDEPIPQKPQSAFYYCRLLLSILGMNSWDKRRSFHLLKKNEKLLRELRNLDSRQCRETHKIAVFYVAEGQEDKHSILTNTGGSQAYEDFVAGLGWEVNLTNHCGFMGGLQKNKSTGLTTPYFATSTVEVIFHVSTRMPSDSDDSLTKKLRHLGNDEVHIVWSEHTRDYRRGIIPTEFGDVLIVIYPMKNHMFSIQIMKKPEVPFFGPLFDGAIVNGKVLPIMVRATAINASRALKSLIPLYQNFYEERARYLQTIVQHHLEPTTFEDFAAQVFSPAPYHHLPSDAGSYPEILPSETPTATQVDGADLASPMSPRTSKSRMSMKLRRSSGSANKS

SEQ ID NO: 60852 - protein, 2073 aa, Homo sapiens
MFSKKPHGDVKKSTQKVLDTKKDALTRLKHLRIVIENAESIDLKQFFDQHFSHIYYVFFENFVTIEASLKQKGHKSQREELDAILFIFEKILQLLPERIHQRWQFHSIGLILKKLLHTGNSLKIRREGVRLFLLWLQALQNNCSKEQLWMFSCLIPGFSAPQSEHGPRTLDNLINPPLNLQETQVTIEEITPLVPPQSGDKGQEDLTSYFLEALLKYIVIQVKSLEWKNKENQERGFSFLFSHFKKYYLPYIFPNICKENSLYHPILDIPQMRPKPHYVVIKKDAETNEAIYCTKEPFIKARVIVIRWLVSFWLEPKPHTGPHIPGMEGEVLPKNIQRAAASLVSREESKNDNADKTDRTTEPEQSHSNTSTLTEREPSSSSLCSIDEEHLTDIEIVRRVFSSKRSNVNFVTEIFRQAFLLPICEAAAMRKVVKVYQEWIQQEEKPLFMQEPEEIVITSSDLPCIENVTDHDISMEEGEKREEENGTNTADHVRNSSWAKNGSYQGALHNASEEATEQNIRAGTQAVLQVFIINSSNIFLLEPANEIKNLLDEHTDMCKRILNIYRYMVVQVSMDKKTWEQMLLVLLRVTESVLKMPSQAFLQFQGKKNMTLAGRLAGPLFQTLIVAWIKANLNVYISRELWDDLLSVLSSLTYWEELATEWSLTMETLTKVLARNLYSLDLSDLPLDKLSEQKQKKHKGKGVGHEFQKVSVDKSFSRGWSRDQPGQAPMRQRSATTTGSPGTEKARSIVRQKTVDIDDAQILPRSTRVRHFSQSEETGNEVFGALNEEQPLPRSSSTSDILEPFTVERAKVNKEDMSQKLPPLNSDIGGSSANVPDLMDEFIAERLRSGNASTMTRRGSSPGSLEIPKDLPDILNKQNQMRPIDDPGVPSEWTSPASAGSSDLISSDSHSDSFSAFQYDGRKFDNFGFGTDTGVTSSADVDSGSGHHQSAEEQEVASLTTLHIDSETSSLNQQAFSAEVATITGSESASPVHSPLGSRSQTPSPSTLNIDHMEQKDLQLDEKLHHSVLQTPDDLEISEFPSECCSVMAGGTLTGWHADVATVMWRRMLGILGDVNSIMDPEIHAQVFDYLCELWQNLAKIRDNLGISTDNLTSPSPPVLIPPLRILTPWLFKATMLTDKYKQGKLHAYKLICNTMKRRQDVSPNRDFLTHFYNIMHCGLLHIDQDIVNTIIKHCSPQFFSLGLPGATMLIMDFIVAAGRVASSAFLNAPRVEAQVLLGSLVCFPNLYCELPSLHPNIPDVAVSQFTDVKELIIKTVLSSARDEPSGPARCVALCSLGIWICEELVHESHHPQIKEALNVICVSLKFTNKTVAHVACNMLHMLVHYVPRLQIYQPDSPLKIIQILIATITHLLPSTEASSYEMDKRLVVSLLLCLLDWIMALPLKTLLQPFHATGAESDKTEKSVLNCIYKVLHGCVYGAQCFSNPRYFPMSLSDLASVDYDPFMHLESLKEPEPLHSPDSERSSKLQPVTEVKTQMQHGLISIAARTVITHLVNHLGHYPMSGGPAMLTSQVCENHDNHYSESTELSPELFESPNIQFFVLNNTTLVSCIQIRSEENMPGGGLSAGLASANSNVRIIVRDLSGKYSWDSAILYGPPPVSGLSEPTSFMLSLSHQEKPEEPPTSNECLEDITVKDGLSLQFKRFRETVPTWDTIRDEEDVLDELLQYLGVTSPECLQRTGISLNIPAPQPVCISEKQENDVINAILKQHTEEKEFVEKHFNDLNMKAVEQDEPIPQKPQSAFYYCRLLLSILGMNSWDKRRSFHLLKKNEKLLRELRNLDSRQCRETHKIAVFYVAEGQEDKHSILTNTGGSQAYEDFVAGLGWEVNLTNHCGFMGGLQKNKSTGLTTPYFATSTVEVIFHVSTRMPSDSDDSLTKKLRHLGNDEVHIVWSEHTRDYRRGIIPTEFGDVLIVIYPMKNHMFSIQIMKKPEVPFFGPLFDGAIVNGKVLPIMVRATAINASRALKSLIPLYQNFYEERARYLQTIVQHHLEPTTFEDFAAQVFSPAPYHHLPSDAEERNAVIVLFLPKPPLENIGHLKAPTQRFYPVKLPQQRR

SEQ ID NO: 60853 - protein, 2049 aa, Homo sapiens
MFSKKPHGDVKKSTQKVLDTKKDALTRLKHLRIVIENAESIDLKQFFDQHFSHIYYVFFENFVTIEASLKQKGHKSQREELDAILFIFEKILQLLPERIHQRWQFHSIGLILKKLLHTGNSLKIRREGVRLFLLWLQALQNNCSKEQLWMFSCLIPGFSAPQSEHGPRTLDNLINPPLNLQETQVTIEEITPLVPPQSGDKGQEDLTSYFLEALLKYIVIQVKSLEWKNKENQERGFSFLFSHFKKYYLPYIFPNICKENSLYHPILDIPQMRPKPHYVVIKKDAETNEAIYCTKEPFIKARVIVIRWLVSFWLEPKPHTGPHIPGMEGEVLPKNIQRAAASLVSREESKNDNADKTDRTTEPEQSHSNTSTLTEREPSSSSLCSIDEEHLTDIEIVRRVFSSKRSNVNFVTEIFRQAFLLPICEAAAMRKVVKVYQEWIQQEEKPLFMQEPEEIVITSSDLPCIENVTDHDISMEEGEKREEENGTNTADHVRNSSWAKNGSYQGALHNASEEATEQNIRAGTQAVLQVFIINSSNIFLLEPANEIKNLLDEHTDMCKRILNIYRYMVVQVSMDKKTWEQMLLVLLRVTESVLKMPSQAFLQFQGKKNMTLAGRLAGPLFQTLIVAWIKANLNVYISRELWDDLLSVLSSLTYWEELATEWSLTMETLTKVLARNLYSLDLSDLPLDKLSEQKQKKHKGKGVGHEFQKVSVDKSFSRGWSRDQPGQAPMRQRSATTTGSPGTEKARSIVRQKTVDIDDAQILPRSTRVRHFSQSEETGNEVFGALNEEQPLPRSSSTSDILEPFTVERAKEAEQNATRGSTEGSVQSCNGLFWKESCSDIGGSSANVPDLMDEFIAERLRSGNASTMTRRGSSPGSLEIPKDLPDILNKQNQMRPIDDPGVPSEWTSPASAGSSDLISSDSHSDSFSAFQYDGRKFDNFGFGTDTGVTSSADVDSGSGHHQSAEEQEVASLTTLHIDSETSSLNQQAFSAEVATITGSESASPVHSPLGSRSQTPSPSTLNIDHMEQKDLQLDEKLHHSVLQTPDDLEISEFPSECCSVMAGGTLTGWHADVATVMWRRMLGILGDVNSIMDPEIHAQVFDYLCELWQNLAKIRDNLGISTDNLTSPSPPVLIPPLRILTPWLFKATMLTDKYKQGKLHAYKLICNTMKRRQDVSPNRDFLTHFYNIMHCGLLHIDQDIVNTIIKHCSPQFFSLGLPGATMLIMDFIVAAGRVASSAFLNAPRVEAQVLLGSLVCFPNLYCELPSLHPNIPDVAVSQFTDVKELIIKTVLSSARDEPSGPARCVALCSLGIWICEELVHESHHPQIKEALNVICVSLKFTNKTVAHVACNMLHMLVHYVPRLQIYQPDSPLKIIQILIATITHLLPSTEASSYEMDKRLVVSLLLCLLDWIMALPLKTLLQPFHATGAESDKTEKSVLNCIYKVLHGCVYGAQCFSNPRYFPMSLSDLASVDYDPFMHLESLKEPEPLHSPDSERSSKLQPVTEVKTQMQHGLISIAARTVITHLVNHLGHYPMSGGPAMLTSQVCENHDNHYSESTELSPELFESPNIQFFVLNNTTLVSCIQIRSEENMPGGGLSAGLASANSNVRIIVRDLSGKYSWDSAILYGPPPVSGLSEPTSFMLSLSHQEKPEEPPTSNECLEDITVKDGLSLQFKRFRETVPTWDTIRDEEDVLDELLQYLGVTSPECLQRTGISLNIPAPQPVCISEKQENDVINAILKQHTEEKEFVEKHFNDLNMKAVEQDEPIPQKPQSAFYYCRLLLSILGMNSWDKRRSFHLLKKNEKLLRELRNLDSRQCRETHKIAVFYVAEGQEDKHSILTNTGGSQAYEDFVAGLGWEVNLTNHCGFMGGLQKNKSTGLTTPYFATSTVEVIFHVSTRMPSDSDDSLTKKLRHLGNDEVHIVWSEHTRDYRRGIIPTEFGDVLIVIYPMKNHMFSIQIMKKPEVPFFGPLFDGAIVNGKVLPIMVRATAINASRALKSLIPLYQNFYEERARYLQTIVQHHLEPTTFEDFAAQVFSPAPYHHLPSDADH

SEQ ID NO: 60854 - protein, 2036 aa, Homo sapiens
MFSKKPHGDVKKSTQKVLDTKKDALTRLKHLRIVIENAESIDLKQFFDQHFSHIYYVFFENFVTIEASLKQKGHKSQREELDAILFIFEKILQLLPERIHQRWQFHSIGLILKKLLHTGNSLKIRREGVRLFLLWLQALQNNCSKEQLWMFSCLIPGFSAPQSEHGPRTLDNLINPPLNLQETQVTIEEITPLVPPQSGDKGQEDLTSYFLEALLKYIVIQVKSLEWKNKENQERGFSFLFSHFKKYYLPYIFPNICKENSLYHPILDIPQMRPKPHYVVIKKDAETNEAIYCTKEPFIKARVIVIRWLVSFWLEPKPHTGPHIPGMEGEVLPKNIQRAAASLVSREESKNDNADKTDRTTEPEQSHSNTSTLTEREPSSSSLCSIDEEHLTDIEIVRRVFSSKRSNVNFVTEIFRQAFLLPICEAAAMRKVVKVYQEWIQQEEKPLFMQEPEEIVITSSDLPCIENVTDHDISMEEGEKREEENGTNTADHVRNSSWAKNGSYQGALHNASEEATEQNIRAGTQAVLQVFIINSSNIFLLEPANEIKNLLDEHTDMCKRILNIYRYMVVQVSMDKKTWEQMLLVLLRVTESVLKMPSQAFLQFQGKKNMTLAGRLAGPLFQTLIVAWIKANLNVYISRELWDDLLSVLSSLTYWEELATEWSLTMETLTKVLARNLYSLDLSDLPLDKLSEQKQKKHKGKGVGHEFQKVSVDKSFSRGWSRDQPGQAPMRQRSATTTGSPGTEKARSIVRQKTVDIDDAQILPRSTRVRHFSQSEETGNEVFGALNEEQPLPRSSSTSDILEPFTVERAKVNKEDMSQKLPPLNSDIGGSSANVPDLMDEFIAERLRSGNASTMTRRGSSPGSLEIPKDLPDILNKQNQMRPIDDPGVPSEWTSPASAGSSDLISSDSHSDSFSAFQYDGRKFDNFGFGTDTGVTSSADVDSGSGHHQSAEEQEVASLTTLHIDSETSSLNQQAFSAEVATITGSESASPVHSPLGSRSQTPSPSTLNIDHMEQKDLQLDEKLHHSVLQTPDDLEISEFPSECCSVMAGGTLTGWHADVATVMWRRMLGILGDVNSIMDPEIHAQVFDYLCELWQNLAKIRDNLGISTDNLTSPSPPVLIPPLRILTPWLFKATMLTDKYKQGKLHAYKLICNTMKRRQDVSPNRDFLTHFYNIMHCGLLHIDQDIVNTIIKHCSPQFFSLGLPGATMLIMDFIVAAGRVASSAFLNAPRVEAQVLLGSLVCFPNLYCELPSLHPNIPDVAVSQFTDVKELIIKTVLSSARDEPSGPARCVALCSLGIWICEELVHESHHPQIKEALNVICVSLKFTNKTVAHVACNMLHMLVHYVPRLQIYQPDSPLKIIQILIATITHLLPSTEASSYEMDKRLVVSLLLCLLDWIMALPLKTLLQPFHATGAESDKTEKSVLNCIYKVLHGCVYGAQCFSNPRYFPMSLSDLASVDYDPFMHLESLKEPEPLHSPDSERSSKLQPVTEVKTQMQHGLISIAARTVITHLVNHLGHYPMSGGPAMLTSQVCENHDNHYSESTELSPELFESPNIQFFVLNNTTLVSCIQIRSEENMPGGGLSAGLASANSNVRIIVRDLSGKYSWDSAILYGPPPVSGLSEPTSFMLSLSHQEKPEEPPTSNECLEDITVKDGLSLQFKRFRETVPTWDTIRDEEDVLDELLQYLGVTSPECLQRTGISLNIPAPQPVCISEKQENDVINAILKQHTEEKEFVEKHFNDLNMKAVEQDEPIPQKPQSAFYYCRLLLSILGMNSWDKRRSFHLLKKNEKLLRELRNLDSRQCRETHKIAVFYVAEGQEDKHSILTNTGGSQAYEDFVAGLGWEVNLTNHCGFMGGLQKNKSTGLTTPYFATSTVEVIFHVSTRMPSDSDDSLTKKLRHLGNDEVHIVWSEHTRDYRRGIIPTEFGDVLIVIYPMKNHMFSIQIMKKPEVPFFGPLFDGAIVNGKVLPIMVRATAINASRALKSLIPLYQNFYEERARYLQTIVQHHLEPTTFEDFAAQVFSPAPYHHLPSDADH

SEQ ID NO: 60855 - protein, 2083 aa, Homo sapiens; identical to SEQ ID NO: 60850

SEQ ID NO: 60856 - protein, 722 aa, Homo sapiens
QILIATITHLLPSTEASSYEMDKRLVVSLLLCLLDWIMALPLKTLLQPFHATGAESDKTEKSVLNCIYKVLHGCVYGAQCFSNPRYFPMSLSDLASVDYDPFMHLESLKEPEPLHSPDSERSSKLQPVTEVKTQMQHGLISIAARTVITHLVNHLGHYPMSGGPAMLTSQVCENHDNHYSESTELSPELFESPNIQFFVLNNTTLVSCIQIRSEENMPGGGLSAGLASANSNVRIIVRDLSGKYSWDSAILYGPPPVSGLSEPTSFMLSLSHQEKPEEPPTSNECLEDITVKDGLSLQFKRFRETVPTWDTIRDEEDVLDELLQYLGVTSPECLQRTGISLNIPAPQPVCISEKQENDVINAILKQHTEEKEFVEKHFNDLNMKAVEQDEPIPQKPQSAFYYCRLLLSILGMNSWDKRRSFHLLKKNEKLLRELRNLDSRQCRETHKIAVFYVAEGQEDKHSILTNTGGSQAYEDFVAGLGWEVNLTNHCGFMGGLQKNKSTGLTTPYFATSTVEVIFHVSTRMPSDSDDSLTKKLRHLGNDEVHIVWSEHTRDYRRGIIPTEFGDVLIVIYPMKNHMFSIQIMKKPEVPFFGPLFDGAIVNGKVLPIMVRATAINASRALKSLIPLYQNFYEERARYLQTIVQHHLEPTTFEDFAAQVFSPAPYHHLPSDAVGSYPEILPSETPTATQVDGADLASPMSPRTSKSRMSMKLRRSSGSANKS

SEQ ID NO: 60857 - protein, 902 aa, Homo sapiens
MVQRMWAEAAGPAGGAEPLFPGSRRSRSVWDAVRLEVGVPDSCPVVLHSFTQLDPDLPRPESSTQEIGEELINGVIYSISLRKVQLHHGGNKGQRWLGYENESALNLYETCKVRTVKAGTLEKLVEHLVPAFQGSDLSYVTIFLCTYRAFTTTQQVLDLLFKRYGCILPYSDEDGGPQDQLKNAISSILGTWLDQYSEDFCQPPDFPCLKQLVAYVQLNMPGSDLERRAHLLLAQLEHSEPIEAEPEALSPVPALKPTPELELALTPARAPSPVPAPAPEPEPAPTPAPGSELEVAPAPAPELQQAPEPAVGLESAPAPALELEPAPEQDPAPSQTLELEPAPAPVPSLQPSWPSPVVAENGLSEEKPHLLVFPPDLVAEQFTLMDAELFKKVVPYHCLGSIWSQRDKKGKEHLAPTIRATVTQFNSVANCVITTCLGNRSTKAPDRARVVEHWIEVARECRILKNFSSLYAILSALQSNSIHRLKKTWEDVSRDSFRIFQKLSEIFSDENNYSLSRELLIKEGTSKFATLEMNPKRAQKRPKETGIIQGTVPYLGTFLTDLVMLDTAMKDYLYGRLINFEKRRKEFEVIAQIKLLQSACNNYSIAPDEQFGAWFRAVERLSETESYNLSCELEPPSESASNTLRTKKNTAIVKRWSDRQAPSTELSTSGSSHSKSCDQLRCGPYLSSGDIADALSVHSAGSSSSDVEEINISFVPESPDGQEKKFWESASQSSPETSGISSASSSTSSSSASTTPVAATRTHKRSVSGLCNSSSALPLYNQQVGDCCIIRVSLDVDNGNMYKSILVTSQDKAPAVIRKAMDKHNLEEEEPEDYELLQILSDDRKLKIPENANVFYAMNSTANYDFVLKKRTFTKGVKVKHGASSTLPRMKQKGLKIAKGIF

SEQ ID NO: 60858 - protein, 914 aa, Homo sapiens
MVQRMWAEAAGPAGGAEPLFPGSRRSRSVWDAVRLEVGVPDSCPVVLHSFTQLDPDLPRPESSTQEIGEELINGVIYSISLRKVQLHHGGNKGQRWLGYENESALNLYETCKVRTVKAGTLEKLVEHLVPAFQGSDLSYVTIFLCTYRAFTTTQQVLDLLFKRYGRCDALTASSRYGCILPYSDEDGGPQDQLKNAISSILGTWLDQYSEDFCQPPDFPCLKQLVAYVQLNMPGSDLERRAHLLLAQLEHSEPIEAEPEALSPVPALKPTPELELALTPARAPSPVPAPAPEPEPAPTPAPGSELEVAPAPAPELQQAPEPAVGLESAPAPALELEPAPEQDPAPSQTLELEPAPAPVPSLQPSWPSPVVAENGLSEEKPHLLVFPPDLVAEQFTLMDAELFKKVVPYHCLGSIWSQRDKKGKEHLAPTIRATVTQFNSVANCVITTCLGNRSTKAPDRARVVEHWIEVARECRILKNFSSLYAILSALQSNSIHRLKKTWEDVSRDSFRIFQKLSEIFSDENNYSLSRELLIKEGTSKFATLEMNPKRAQKRPKETGIIQGTVPYLGTFLTDLVMLDTAMKDYLYGRLINFEKRRKEFEVIAQIKLLQSACNNYSIAPDEQFGAWFRAVERLSETESYNLSCELEPPSESASNTLRTKKNTAIVKRWSDRQAPSTELSTSGSSHSKSCDQLRCGPYLSSGDIADALSVHSAGSSSSDVEEINISFVPESPDGQEKKFWESASQSSPETSGISSASSSTSSSSASTTPVAATRTHKRSVSGLCNSSSALPLYNQQVGDCCIIRVSLDVDNGNMYKSILVTSQDKAPAVIRKAMDKHNLEEEEPEDYELLQILSDDRKLKIPENANVFYAMNSTANYDFVLKKRTFTKGVKVKHGASSTLPRMKQKGLKIAKGIF

SEQ ID NO: 60859 - protein, 446 aa, Homo sapiens
MPGSDLERRAHLLLAQLEHSEPIEAEPEALSPVPALKPTPELELALTPARAPSPVPAPAPEPEPAPTPAPGSELEVAPAPAPELQQAPEPAVGLESAPAPALELEPAPEQDPAPSQTLELEPAPAPVPSLQPSWPSPVVAENGLSEEKPHLLVFPPDLVAEQFTLMDAECRILKNFSSLYAILSALQSNSIHRLKKTWEDVSRDSFRIFQKLSEIFSDENNYSLSRELLIKEGTSKFATLEMNPKRAQKRPKETGIIQGTVPYLGTFLTDLVMLDTAMKDYLYGRLINFEKRRKEFEVIAQIKLLQSACNNYSIAPDEQFGAWFRAVERLSETESYNLSCELEPPSESASNTLRTKKNTAIVKRWSDRQAPSTELSTSGSSHSKSCDQLRCGPYLSSGDIADALSVHSAGSSSSDVEEINISFVPESPDGQEKKFWESASQSSPET

SEQ ID NO: 60860 - protein, 885 aa, Homo sapiens
MCLWGHSTAPAHTLSSPPLLFCSLPCALHLQPGTGHPPGQVPRKSSTQEIGEELINGVIYSISLRKVQLHHGGNKGQRWLGYENESALNLYETCKVRTVKAGTLEKLVEHLVPAFQGSDLSYVTIFLCTYRAFTTTQQVLDLLFKRYGCILPYSDEDGGPQDQLKNAISSILGTWLDQYSEDFCQPPDFPCLKQLVAYVQLNMPGSDLERRAHLLLAQLEHSEPIEAEPEALSPVPALKPTPELELALTPARAPSPVPAPAPEPEPAPTPAPGSELEVAPAPAPELQQAPEPAVGLESAPAPALELEPAPEQDPAPSQTLELEPAPAPVPSLQPSWPSPVVAENGLSEEKPHLLVFPPDLVAEQFTLMDAELFKKVVPYHCLGSIWSQRDKKGKEHLAPTIRATVTQFNSVANCVITTCLGNRSTKAPDRARVVEHWIEVARECRILKNFSSLYAILSALQSNSIHRLKKTWEDVSRDSFRIFQKLSEIFSDENNYSLSRELLIKEGTSKFATLEMNPKRAQKRPKETGIIQGTVPYLGTFLTDLVMLDTAMKDYLYGRLINFEKRRKEFEVIAQIKLLQSACNNYSIAPDEQFGAWFRAVERLSETESYNLSCELEPPSESASNTLRTKKNTAIVKRWSDRQAPSTELSTSGSSHSKSCDQLRCGPYLSSGDIADALSVHSAGSSSSDVEEINISFVPESPDGQEKKFWESASQSSPETSGISSASSSTSSSSASTTPVAATRTHKRSVSGLCNSSSALPLYNQQVGDCCIIRVSLDVDNGNMYKSILVTSQDKAPAVIRKAMDKHNLEEEEPEDYELLQILSDDRKLKIPENANVFYAMNSTANYDFVLKKRTFTKGVKVKHGASSTLPRMKQKGLKIAKGIF

SEQ ID NO: 60861 - protein, 913 aa, Homo sapiens
MAREAGQVCARPAVPRGRKGSVFFACVSVVTARRRAVARRAALQSPTPWLAPLPAPATTESSTQEIGEELINGVIYSISLRKVQLHHGGNKGQRWLGYENESALNLYETCKVRTVKAGTLEKLVEHLVPAFQGSDLSYVTIFLCTYRAFTTTQQVLDLLFKRYGRCDALTASSRYGCILPYSDEDGGPQDQLKNAISSILGTWLDQYSEDFCQPPDFPCLKQLVAYVQLNMPGSDLERRAHLLLAQLEHSEPIEAEPEALSPVPALKPTPELELALTPARAPSPVPAPAPEPEPAPTPAPGSELEVAPAPAPELQQAPEPAVGLESAPAPALELEPAPEQDPAPSQTLELEPAPAPVPSLQPSWPSPVVAENGLSEEKPHLLVFPPDLVAEQFTLMDAELFKKVVPYHCLGSIWSQRDKKGKEHLAPTIRATVTQFNSVANCVITTCLGNRSTKAPDRARVVEHWIEVARECRILKNFSSLYAILSALQSNSIHRLKKTWEDVSRDSFRIFQKLSEIFSDENNYSLSRELLIKEGTSKFATLEMNPKRAQKRPKETGIIQGTVPYLGTFLTDLVMLDTAMKDYLYGRLINFEKRRKEFEVIAQIKLLQSACNNYSIAPDEQFGAWFRAVERLSETESYNLSCELEPPSESASNTLRTKKNTAIVKRWSDRQAPSTELSTSGSSHSKSCDQLRCGPYLSSGDIADALSVHSAGSSSSDVEEINISFVPESPDGQEKKFWESASQSSPETSGISSASSSTSSSSASTTPVAATRTHKRSVSGLCNSSSALPLYNQQVGDCCIIRVSLDVDNGNMYKSILVTSQDKAPAVIRKAMDKHNLEEEEPEDYELLQILSDDRKLKIPENANVFYAMNSTANYDFVLKKRTFTKGVKVKHGASSTLPRMKQKGLKIAKGIF

SEQ ID NO: 60862 - protein, 859 aa, Homo sapiens
MMVDCQSSTQEIGEELINGVIYSISLRKVQLHHGGNKGQRWLGYENESALNLYETCKVRTVKAGTLEKLVEHLVPAFQGSDLSYVTIFLCTYRAFTTTQQVLDLLFKRYGRCDALTASSRYGCILPYSDEDGGPQDQLKNAISSILGTWLDQYSEDFCQPPDFPCLKQLVAYVQLNMPGSDLERRAHLLLAQLEHSEPIEAEPEALSPVPALKPTPELELALTPARAPSPVPAPAPEPEPAPTPAPGSELEVAPAPAPELQQAPEPAVGLESAPAPALELEPAPEQDPAPSQTLELEPAPAPVPSLQPSWPSPVVAENGLSEEKPHLLVFPPDLVAEQFTLMDAELFKKVVPYHCLGSIWSQRDKKGKEHLAPTIRATVTQFNSVANCVITTCLGNRSTKAPDRARVVEHWIEVARECRILKNFSSLYAILSALQSNSIHRLKKTWEDVSRDSFRIFQKLSEIFSDENNYSLSRELLIKEGTSKFATLEMNPKRAQKRPKETGIIQGTVPYLGTFLTDLVMLDTAMKDYLYGRLINFEKRRKEFEVIAQIKLLQSACNNYSIAPDEQFGAWFRAVERLSETESYNLSCELEPPSESASNTLRTKKNTAIVKRWSDRQAPSTELSTSGSSHSKSCDQLRCGPYLSSGDIADALSVHSAGSSSSDVEEINISFVPESPDGQEKKFWESASQSSPETSGISSASSSTSSSSASTTPVAATRTHKRSVSGLCNSSSALPLYNQQVGDCCIIRVSLDVDNGNMYKSILVTSQDKAPAVIRKAMDKHNLEEEEPEDYELLQILSDDRKLKIPENANVFYAMNSTANYDFVLKKRTFTKGVKVKHGASSTLPRMKQKGLKIAKGIF

SEQ ID NO: 60863 - protein, 309 aa, Homo sapiens [sequence omitted]

SEQ ID NO: 60864 - protein, 985 aa, Homo sapiens
MHRRRLALGLGFCLLAGTSLSVLWVYLENWLPVSYVPYYLPCPEILPMMMALSCLCHQQHEAALQEGEATPARGMVTVPSAQAAGAQAHTAADTHTLVGAHRLRGNLQPRASAAHLPATEPDHWGHGVCRGESSTQEIGEELINGVIYSISLRKVQLHHGGNKGQRWLGYENESALNLYETCKVRTVKAGTLEKLVEHLVPAFQGSDLSYVTIFLCTYRAFTTTQQVLDLLFKRYGRCDALTASSRYGCILPYSDEDGGPQDQLKNAISSILGTWLDQYSEDFCQPPDFPCLKQLVAYVQLNMPGSDLERRAHLLLAQLEHSEPIEAEPEALSPVPALKPTPELELALTPARAPSPVPAPAPEPEPAPTPAPGSELEVAPAPAPELQQAPEPAVGLESAPAPALELEPAPEQDPAPSQTLELEPAPAPVPSLQPSWPSPVVAENGLSEEKPHLLVFPPDLVAEQFTLMDAELFKKVVPYHCLGSIWSQRDKKGKEHLAPTIRATVTQFNSVANCVITTCLGNRSTKAPDRARVVEHWIEVARECRILKNFSSLYAILSALQSNSIHRLKKTWEDVSRDSFRIFQKLSEIFSDENNYSLSRELLIKEGTSKFATLEMNPKRAQKRPKETGIIQGTVPYLGTFLTDLVMLDTAMKDYLYGRLINFEKRRKEFEVIAQIKLLQSACNNYSIAPDEQFGAWFRAVERLSETESYNLSCELEPPSESASNTLRTKKNTAIVKRWSDRQAPSTELSTSGSSHSKSCDQLRCGPYLSSGDIADALSVHSAGSSSSDVEEINISFVPESPDGQEKKFWESASQSSPETSGISSASSSTSSSSASTTPVAATRTHKRSVSGLCNSSSALPLYNQQVGDCCIIRVSLDVDNGNMYKSILVTSQDKAPAVIRKAMDKHNLEEEEPEDYELLQILSDDRKLKIPENANVFYAMNSTANYDFVLKKRTFTKGVKVKHGASSTLPRMKQKGLKIAKGIF

SEQ ID NO: 60865 - protein, 803 aa, Homo sapiens
MEVKPVGEPTQEVSKFKLSTKVESTGHWLVEDHVRIWEVLKTEESSIQDWGEEVEEGAVYHVTLKRVQIQQAANKGARWLGVEGDQLPPGHTVSQYETCKIRTIKAGTLEKLVENLLTAFGDNDFTYISIFLSTYRGFASTKEVLELLLDRYGNLTSPNCEEDGSQSSSESKMVIRNAIASILRAWLDQCAEDFREPPHFPCLQKLLDYLTRMMPGSDPERRAQNLLEQFQKQEVETDNGLPNTISFSLEEEEELEGGESAEFTCFSEDLVAEQLTYMDAQLFKKVVPHHCLGCIWSRRDKKENKHLAPTIRATISQFNTLTKCVVSTILGGKELKTQQRAKIIEKWINIAHECRLLKNFSSLRAIVSALQSNSIYRLKKTWAAVPRDRMLMFEELSDIFSDHNNHLTSRELLMKEGTSKFANLDSSVKENQKRTQRRLQLQKDMGVMQGTVPYLGTFLTDLTMLDTALQDYIEGGLINFEKRRREFEVIAQIKLLQSACNSYCMTPDQKFIQWFQRQQLLTEEESYALSCEIEAAADASTTSPKPRKSMVKRLSLLFLGSDMITSPTPTKEQPKSTASGSSGESMDSVSVSSCESNHSEAEEGSITPMDTPDEPQKKLSESSSSCSSIHSMDTNSSGMSSLINPLSSPPSCNNNPKIHKRSVSVTSITSTVLPPVYNQQNEDTCIIRISVEDNNGNMYKSIMLTSQDKTPAVIQRAMLKHNLDSDPAEEYELVQVISEDKELVIPDSANVFYAMNSQVNFDFILRKKNSMEEQVKLRSRTSLTLPRTAKRGCWSNRHSKITL

SEQ ID NO: 60866 - protein, 768 aa, Homo sapiens
MKLLWQAKMSSIQDWGEEVEEGAVYHVTLKRVQIQQAANKGARWLGVEGDQLPPGHTVSQYETCKIRTIKAGTLEKLVENLLTAFGDNDFTYISIFLSTYRGFASTKEVLELLLDRYGNLTSPNCEEDGSQSSSESKMVIRNAIASILRAWLDQCAEDFREPPHFPCLQKLLDYLTRMMPGSDPERRAQNLLEQFQKQEVETDNGLPNTISFSLEEEEELEGGESAEFTCFSEDLVAEQLTYMDAQLFKKVVPHHCLGCIWSRRDKKENKHLAPTIRATISQFNTLTKCVVSTILGGKELKTQQRAKIIEKWINIAHECRLLKNFSSLRAIVSALQSNSIYRLKKTWAAVPRDRMLMFEELSDIFSDHNNHLTSRELLMKEGTSKFANLDSSVKENQKRTQRRLQLQKDMGVMQGTVPYLGTFLTDLTMLDTALQDYIEGGLINFEKRRREFEVIAQIKLLQSACNSYCMTPDQKFIQWFQRQQLLTEEESYALSCEIEAAADASTTSPKPRKSMVKRLSLLFLGSDMITSPTPTKEQPKSTASGSSGESMDSVSVSSCESNHSEAEEGSITPMDTPDEPQKKLSESSSSCSSIHSMDTNSSGMSSLINPLSSPPSCNNNPKIHKRSVSVTSITSTVLPPVYNQQNEDTCIIRISVEDNNGNMYKSIMLTSQDKTPAVIQRAMLKHNLDSDPAEEYELVQVISEDKELVIPDSANVFYAMNSQVNFDFILRKKNSMEEQVKLRSRTSLTLPRTAKRGCWSNRHSKITL

SEQ ID NO: 60867 - protein, 803 aa, Homo sapiens; identical to SEQ ID NO: 60865

SEQ ID NO: 60868 - protein, 766 aa, Homo sapiens
MEVKPVGEPTQEVSKFKLSTKVESTGHWLVEDHVRIWEVLKTEEVEGDQLPPGHTVSQYETCKIRTIKAGTLEKLVENLLTAFGDNDFTYISIFLSTYRGFASTKEVLELLLDRYGNLTSPNCEEDGSQSSSESKMVIRNAIASILRAWLDQCAEDFREPPHFPCLQKLLDYLTRMMPGSDPERRAQNLLEQFQKQEVETDNGLPNTISFSLEEEEELEGGESAEFTCFSEDLVAEQLTYMDAQLFKKVVPHHCLGCIWSRRDKKENKHLAPTIRATISQFNTLTKCVVSTILGGKELKTQQRAKIIEKWINIAHECRLLKNFSSLRAIVSALQSNSIYRLKKTWAAVPRDRMLMFEELSDIFSDHNNHLTSRELLMKEGTSKFANLDSSVKENQKRTQRRLQLQKDMGVMQGTVPYLGTFLTDLTMLDTALQDYIEGGLINFEKRRREFEVIAQIKLLQSACNSYCMTPDQKFIQWFQRQQLLTEEESYALSCEIEAAADASTTSPKPRKSMVKRLSLLFLGSDMITSPTPTKEQPKSTASGSSGESMDSVSVSSCESNHSEAEEGSITPMDTPDEPQKKLSESSSSCSSIHSMDTNSSGMSSLINPLSSPPSCNNNPKIHKRSVSVTSITSTVLPPVYNQQNEDTCIIRISVEDNNGNMYKSIMLTSQDKTPAVIQRAMLKHNLDSDPAEEYELVQVISEDKELVIPDSANVFYAMNSQVNFDFILRKKNSMEEQVKLRSRTSLTLPRTAKRGCWSNRHSKITL

SEQ ID NO: 60869 - protein, 739 aa, Homo sapiens
MKLLWQAKMSSIQDWGEEVEEGAVYHVTLKRVQIQQAANKGARWLGVEGDQLPPGHTVSQYETCKIRTIKAGTLEKLVENLLTAFGDNDFTYISIFLSTYRGFASTKEVLELLLDRYGNLTSPNCEEDGSQSSSESKMVIRNAIASILRAWLDQCAEDFREPPHFPCLQKLLDYLTRMMPGSDPERRAQNLLEQFQKQEVETDNGLPNTISFSLEEEEELEGGESAEFTCFSEDLVAEQLTYMDAQLFKKVVPHHCLGCIWSRRDKKENKHLAPTIRATISQFNTLTKCVVSTILGGKELKTQQRAKIIEKWINIAHECRLLKNFSSLRAIVSALQSNSIYRLKKTWAAVPRDRMLMFEELSDIFSDHNNHLTSRELLMKEGTSKFANLDSSVKENQKRTQRRLQLQKDMGGLINFEKRRREFEVIAQIKLLQSACNSYCMTPDQKFIQWFQRQQLLTEEESYALSCEIEAAADASTTSPKPRKSMVKRLSLLFLGSDMITSPTPTKEQPKSTASGSSGESMDSVSVSSCESNHSEAEEGSITPMDTPDEPQKKLSESSSSCSSIHSMDTNSSGMSSLINPLSSPPSCNNNPKIHKRSVSVTSITSTVLPPVYNQQNEDTCIIRISVEDNNGNMYKSIMLTSQDKTPAVIQRAMLKHNLDSDPAEEYELVQVISEDKELVIPDSANVFYAMNSQVNFDFILRKKNSMEEQVKLRSRTSLTLPRTAKRGCWSNRHSKITL

SEQ ID NO: 60870 - protein, 390 aa, Homo sapiens
MGSFKDRGDGLPNTISFSLEEEEELEGGESAEFTCFSEDLVAEQLTYMDAQLFKKVVPHHCLGCIWSRRDKKENKHLAPTIRATISQFNTLTKCVVSTILGGKELKTQQRAKIIEKWINIAHECRLLKNFSSLRAIVSALQSNSIYRLKKTWAAVPRDRMLMFEELSDIFSDHNNHLTSRELLMKEGTSKFANLDSSVKENQKRTQRRLQLQKDMGVMQGTVPYLGTFLTDLTMLDTALQDYIEGGLINFEKRRREFEVIAQIKLLQSACNSYCMTPDQKFIQWFQRQQLLTEEESYALSCEIEAAADASTTSPKPRKSMVKRLSLLFLGSDMITSPTPTKEQPKSTASGSSGESMDSVSVSSCESNHSEAEEGSITPMDTPDEPQKKAL

SEQ ID NO: 60871 - protein, 473 aa, Homo sapiens
MRKLLTNLPAAAVLSAQVYSAVLQGLWEENVCGTPGRTRVCTALLYGQVCPFQDSTDGLRTITSILFNWPPENTSVYYQPPQRSSFRIKLAFRNLSWPGLGLEDHQEIVLGQLVLPEPNEAKPDDPAPRPGQHALTMPALEPAPPLLADLGPALEPESPAALGPPGYLHSAPGPAPAPGEGPPPGTVLEPQSAPESSCPCRGSVKNQPSEELPDMTTFPPRLLAEQLTLMDAELFKKVVLHECLGCIWGQGHLKGNEHMAPTVRATIAHFNRLTNCITTSCLGDHSMRARDRARVVEHWIKVARECLSLNNFSSVHVIVSALCSNPIGQLHKTWAGVSSKSMKELKELCKKDTAVKRDLLIKAGSFKVATQERNPQRVQMRLRRQKKGVVPFLGDFLTELQRLDSAIPDDLDGNTNKRSKEVRVLQEMQLLQVAAMNYRLRPLEKFVTYFTRMEQLSDKESYKLSCQLEPENP

SEQ ID NO: 60872 - protein, 580 aa, Homo sapiens
MRKLLTNLPAAAVLSAQVYSAVLQGLWEENVCGTPGRTRVCTALLYGQVCPFQDSTDGLRTITSILFNWPPENTSVYYQPPQRSSFRIKLAFRNLSWPGLGLEDHQEIVLGQLVLPEPNEAKPDDPAPRPGQHALTMPALEPAPPLLADLGPALEPESPAALGPPGYLHSAPGPAPAPGEGPPPGTVLEPQSAPESSCPCRGSVKNQPSEELPDMTTFPPRLLAEQLTLMDAELFKKVVLHECLGCIWGQGHLKGNEHMAPTVRATIAHFNRLTNCITTSCLGDHSMRARDRARVVEHWIKVARECLSLNNFSSVHVIVSALCSNPIGQLHKTWAGVSSKSMKELKELCKKDTAVKRDLLIKAGSFKVATQERNPQRVQMRLRRQKKGVVPFLGDFLTELQRLDSAIPDDLDGNTNKRSKEVRVLQEMQLLQVAAMNYRLRPLEKFVTYFTRMEQLSDKERWGFTMMSRIVSNSWPQAIHPPQPPKVLTLQLQAVLPAGARKPVGWQHPAVAGNPPGCWPEHRLCTIPHPDRRHQGTTSRRLAAQLHLALDPHHQLLLLARIRPWDFCESGGRPFYVYFL

SEQ ID NO: 60873 - protein, 655 aa, Homo sapiens
MTECFLPPTSSPSEHRRVEHGSGLTRTPSSEEISPTKFPGLYRTGEPSPPHDILHEPPDVVSDDEKDHGKKKGKFKKKEKRTEGYAAFQEDSSGDEAESPSKMKRSKGIHVFKKPSFSKKKEKDFKIKEKPKEEKHKEEKHKEEKHKEKKSKDLTAADVVKQWKEKKKKKKPIQEPEVPQIDVPNLKPIFGIPLADAVERTMMYDGIRLPAVFRECIDYVEKYGMKCEGIYRVSGIKSKVDELKAAYDREESTNLEDYEPNTVASLLKQYLRDLPENLLTKELMPRFEEACGRTTETEKVQEFQRLLKELPECNYLLISWLIVHMDHVIAKELETKMNIQNISIVLSPTVQISNRVLYVFFTHVQELFGNVVLKQVMKPLRWSNMATMPTLPETQAGIKEEIRRQEFLLNCLHRDLQGGIKDLSKEERLWEVQRILTALKRKLREAKRQECETKIAQEIASLSKEDVSKEEMNENEEVINILLAQENEILTEQEELLAMEQFLRRQIASEKEEIERLRAEIAEIQSRQQHGRSETEEYSSESESESEDEEELQIILEDLQRQNEELEIKNNHLNQAIHEEREAIIELRVQLRLLQMQRAKAEQQAQEDEEPEWRGGAVQPPRDGVLEPKAAKEQPKAGKEPAKPSPSRDRKETSI

SEQ ID NO: 60874 - protein, 655 aa, Homo sapiens; identical to SEQ ID NO: 60873

SEQ ID NO: 60875 - protein, 347 aa, Homo sapiens
MTECFLPPTSSPSEHRRVEHGSGLTRTPSSEEISPTKFPGLYRTGEPSPPHDILHEPPDVVSDDEKDHGKKKGKFKKKEKRTEGYAAFQEDSSGDEAESPSKMKRSKGIHVFKKPSFSKKKEKDFKIKEKPKEEKHKEEKHKEEKHKEKKSKDLTAADVVKQWKEKKKKKKPIQEPEVPQIDVPNLKPIFGIPLADAVERTMMYDGIRLPAVFRECIDYVEKYGMKCEGIYRVSGIKSKVDELKAAYDREESTNLEDYEPNTVASLLKQYLRDLPENLLTKELMPRFEEACGRTTETEKVQSSGEEAARSCQFLTAGTSKGLLTGLVKGSHLGLVHPQRMLFKPEIF

SEQ ID NO: 60876 - protein, 659 aa, Homo sapiens
MEAAAAAAAAAAAAAAAGGGCGSGPPPLLLSEGEQQCYSELFARCAGAAGGGPGSGPPEAARVAPGTATAAAGPVADLFRASQLPAETLHQITELCGAKRVGYFGPTQFYIALKLIAAAQSGLPVRIESIKCELPLPRFMMSKNDGEIRFGNPAELHGTKVQIPYLTTEKNSFKRMDDEDKQETQSPTMSPLASPPSSPPHYQRVPLSHGYSKLRSSAEQMHPAPYEARQPLVQPEGSSSGGPGTKPLRHQASLIRSFSVERELQDNSSYPDEPWRITEEQREYYVNQFRSLQPDPSSFISGSVAKNFFTKSKLSIPELSYIWELSDADCDGALTLPEFCAAFHLIVARKNGYPLPEGLPPTLQPEYLQAAFPKPKWDCQLFDSYSESLPANQQPRDLNRMEKTSVKDMADLPVPNQDVTSDDKQALKSTINEALPKDVSEDPATPKDSNSLKARPRSRSYSSTSIEEAMKRGEDPPTPPPRPQKTHSRASSLDLNKVFQPSVPATKSGLLPPPPALPPRPCPSQSEQVSEAELLPQLSRAPSQAAESSPAKKDVLYSQPPSKPIRRKFRPENQATENQEPSTAASGPASAATMKPHPTVQKQSSKQKKAIQTAIRKNKEANAVLARLNSELQQQLKEVHQERIALENQLEQLRPVTVL

SEQ ID NO: 60877 - protein, 660 aa, Homo sapiens
MEAAAAAAAAAAAAAAAGGGCGSGPPPLLLSEGEQQCYSELFARCAGAAGGGPGSGPPEAARVAPGTATAAAGPVADLFRASQLPAETLHQITELCGAKRVGYFGPTQFYIALKLIAAAQSGLPVRIESIKCELPLPRFMMSKNDGEIRFGNPAELHGTKVQIPYLTTEKNSFKRMDDEDKQQETQSPTMSPLASPPSSPPHYQRVPLSHGYSKLRSSAEQMHPAPYEARQPLVQPEGSSSGGPGTKPLRHQASLIRSFSVERELQDNSSYPDEPWRITEEQREYYVNQFRSLQPDPSSFISGSVAKNFFTKSKLSIPELSYIWELSDADCDGALTLPEFCAAFHLIVARKNGYPLPEGLPPTLQPEYLQAAFPKPKWDCQLFDSYSESLPANQQPRDLNRMEKTSVKDMADLPVPNQDVTSDDKQALKSTINEALPKDVSEDPATPKDSNSLKARPRSRSYSSTSIEEAMKRGEDPPTPPPRPQKTHSRASSLDLNKVFQPSVPATKSGLLPPPPALPPRPCPSQSEQVSEAELLPQLSRAPSQAAESSPAKKDVLYSQPPSKPIRRKFRPENQATENQEPSTAASGPASAATMKPHPTVQKQSSKQKKAIQTAIRKNKEANAVLARLNSELQQQLKEVHQERIALENQLEQLRPVTVL

SEQ ID NO: 60878 - protein, 607 aa, Homo sapiens
MEAAAAAAAAAAAAAAAGGGCGSGPPPLLLSEGEQQCYSELFARCAGAAGGGPGSGPPEAARVAPGTATAAAGPVADLFRASQLPAETLHQITELCGAKRVGYFGPTQFYIALKLIAAAQSGLPVRIESIKCELPLPRFMMSKNDGEIRFGNPAELHGTKVQIPYLTTEKNSFKRMDDEDKQQETQSPTMSPLASPPSSPPHYQRVPLSHGYSKLRSSAEQMHPAPYEARQPLVQPEGSSSGGPGTKPLRHQASLIRSFSVERELQDNSSYPDEPWRITEEQREYYVNQFRSLQPDPSSFISGSVAKNFFTKSKLSIPELSYIWELSDADCDGALTLPEFCAAFHLIVARKNGYPLPEGLPPTLQPEYLQAAFPKPKWDCQLFDSYSESLPANQQPRDLNRMEKTSVKDMADLPVPNQDVTSDDKQALKSTINEALPKDVSEDPATPKDSNSLKARPRSRSYSSTSIEEAMKRGEDPPTPPPRPQKTHSRASSLDLNKVFQPSVPATKSGLLPPPPALPPRPCPSQSEQVSEAELLPQLSRAPSQAAESSPAKKDVLYSQPPSKPIRRKFRPVCGIQPLISIELRAFRTSRHLFNVSLVHWQALSIA

SEQ ID NO: 60879 - protein, 459 aa, Homo sapiens
MMSKNDGEIRFGNPAELHGTKVQIPYLTTEKNSFKRMDDEDKQETQSPTMSPLASPPSSPPHYQRVPLSHGYSKLRSSAEQMHPAPYEARQPLVQPEGSSSGGPGTKPLRHQASLIRSFSVERELQDNSSYPDEPWRITEEQREYYVNQFRSLQPDPSSFISGSVAKNFFTKSKLSIPELSYIWELSDADCDGALTLPEFCAAFHLIVARKNGYPLPEGLPPTLQPEYLQAAFPKPKWDCQLFDSYSESLPANQQPRDLNRMEKTSVKDMADLPVPNQDVTSDDKQALKSTINEALPKDVSEDPATKSGLLPPPPALPPRPCPSQSEQVSEAELLPQLSRAPSQAAESSPAKKDVLYSQPPSKPIRRKFRPENQATENQEPSTAASGPASAATMKPHPTVQKQSSKQKKAIQTAIRKNKEANAVLARLNSELQQQLKEVHQERIALENQLEQLRPVTVL

SEQ ID NO: 60880 - protein, 620 aa, Homo sapiens
MAAATADPGAGNPQPGDSSGGGAGGGLPSPGEQELSRRLQRLYPAVNQQETPLPRSWSPKDKYNYIGLSQGNLRVHYKGHGKNHKDAASVRATHPIPAACGIYYFEVKIVSKGRDGYMGIGLSAQGVNMNRLPGWDKHSYGYHGDDGHSFCSSGTGQPYGPTFTTGDVIGCCVNLINGTCFYTKNGHSLGIAFTDLPANLYPTVGLQTPGEIVDANFGQQPFLFDIEDYMREWRAKVQGTVHCFPISARLGEWQAVLQNMVSSYLVHHGYCATATAFARMTETPIQEEQASIKNRQKIQKLVLEGRVGEAIETTQRFYPGLLEHNPNLLFMLKCRQFVEMVNGTDSEVRSLSSRSPKSQDSYPGSPSLSPRHGPSSSHMHNTGADSPSCSNGVASTKSKQNHSKYPAPSSSSSSSSSSSSSSPSSVNYSESNSTDSTKSQHHSSTSNQETSDSEMEMEAEHYPNGVLGSMSTRIVNGAYKHEDLQTDESSMDDRHPRRQLCGGNQAATERIILFGRELQALSEQLGREYGKNLAHTEMLQDAFSLLAYSDPWSCPVGQQLDPIQREPVCAALNSAILESQNLPKQPPLMLALGQASECLRLMARAGLGSCSFARVDDYLH

SEQ ID NO: 60881 - protein, 533 aa, Homo sapiens
MGIGLSAQGVNMNRLPGWDKHSYGYHGDDGHSFCSSGTGQPYGPTFTTGDVIGCCVNLINGTCFYTKNGHSLGIAFTDLPANLYPTVGLQTPGEIVDANFGQQPFLFDIEDYMREWRAKVQGTVHCFPISARLGEWQAVLQNMVSSYLVHHGYCATATAFARMTETPIQEEQASIKNRQKIQKLVLEGRVGEAIETTQRFYPGLLEHNPNLLFMLKCRQFVEMVNGTDSEVRSLSSRSPKSQDSYPGSPSLSPRHGPSSSHMHNTGADSPSCSNGVASTKSKQNHSKYPAPSSSSSSSSSSSSSSPSSVNYSESNSTDSTKSQHHSSTSNQETSNPWLQLERRPNQAAPTTPPGPTPTSTPPHSDSEMEMEAEHYPNGVLGSMSTRIVNGAYKHEDLQTDESSMDDRHPRRQLCGGNQAATERIILFGRELQALSEQLGREYGKNLAHTEMLQDAFSLLAYSDPWSCPVGQQLDPIQREPVCAALNSAILESQNLPKQPPLMLALGQASECLRLMARAGLGSCSFARVDDYLH

SEQ ID NO: 60882 - protein, 179 aa, Homo sapiens
MGWDKHSYGYHGDDGHSFCSSGTGQPYGPTFTTGDVIGCCVNLINGTCFYTKNGHSLGIAFTDLPANLYPTVGLQTPGEIVDANFGQQPFLFDIEDYMREWRAKVQGTVHCFPISARLGEWQAVLQNMVSSYLVHHGYCATATAFARMTETPIQEEQASIKNRQSKVYSTFPFPFLTCP

SEQ ID NO: 60883 - protein, 594 aa, Homo sapiens
MAAATADPGAGNPQPGDSSGGGAGGGLPSPGEQELSRRLQRLYPAVNQQETPLPRSWSPKDKYNYIGLSQGNLRVHYKGHGKNHKDAASVRATHPIPAACGIYYFEVKIVSKGRDGYMGIGLSAQGVNMNRLPGIAFTDLPANLYPTVGLQTPGEIVDANFGQQPFLFDIEDYMREWRAKVQGTVHCFPISARLGEWQAVLQNMVSSYLVHHGYCATATAFARMTETPIQEEQASIKNRQKIQKLVLEGRVGEAIETTQRFYPGLLEHNPNLLFMLKCRQFVEMVNGTDSEVRSLSSRSPKSQDSYPGSPSLSPRHGPSSSHMHNTGADSPSCSNGVASTKSKQNHSKYPAPSSSSSSSSSSSSSSPSSVNYSESNSTDSTKSQHHSSTSNQETSNPWLQLERRPNQAAPTTPPGPTPTSTPPHSDSEMEMEAEHYPNGVLGSMSTRIVNGAYKHEDLQTDESSMDDRHPRRQLCGGNQAATERIILFGRELQALSEQLGREYGKNLAHTEMLQDAFSLLAYSDPWSCPVGQQLDPIQREPVCAALNSAILESQNLPKQPPLMLALGQASECLRLMARAGLGSCSFARVDDYLH

SEQ ID NO: 60884 - protein, 391 aa, Homo sapiens
MREWRAKVQGTVHCFPISARLGEWQAVLQNMVSSYLVHHGYCATATAFARMTETPIQEEQASIKNRQKIQKLVLEGRVGEAIETTQRFYPGLLEHNPNLLFMLKCRQFVEMVNGTDSEVRSLSSRSPKSQDSYPGSPSLSPRHGPSSSHMHNTGADSPSCSNGVASTKSKQNHSKYPAPSSSSSSSSSSSSSSPSSVNYSESNSTDSTKSQHHSSTSNQETSDSEMEMEAEHYPNGVLGSMSTRIVNGAYKHEDLQTDESSMDDRHPRRQLCGGNQAATERIILFGRELQALSEQLGREYGKNLAHTEMLQDAFSLLAYSDPWSCPVGQQLDPIQREPVCAALNSAILESQNLPKQPPLMLALGQASECLRLMARAGLGSCSFARVDDYLH

SEQ ID NO: 60885 - protein, 1088 aa, Homo sapiens
MALHFQSLAELEVLCTHLYIGTDLTQRIEAEKALLELIDSPECLSKCQLLLEQGTTSYAQLLAATCLSKLVSRVSPLPVEQRMDIRNYILNYVASQPKLAPFVIQALIQVIAKITKLGWFEVQKDQFVFREIIADVKKFLQGTVEHCIIGVIILSELTQEMNLVDYSRPSAKHRKIATSFRDTSLKDVLVLACSLLKEVFAKPLNLQDQCQQNLVMQVLKLVLNCLNFDFIGSSADESADDLCTVQIPTTWRTIFLEPETLDLFFNLYHSLPPLLSQLALSCLVQFASTRRSLFNSPERAKYLGNLIKGVKRILENPQGLSDPGNYHEFCRFLARLKTNYQLGELVMVKEYPEVIRLIANFTITSLQHWEFAPNSVHYLLTLWQRMVASVPFVKSTEPHLLDTYAPEITKAFITSRLDSVAIVVRDHLDDPLDDTATVFQQLEQLCTVSRCEYEKTCALLVQLFDQNAQNYQKLLHPYSGVTVDITIQEGRLAWLVYLVGTVVGGRLTYTSTDEHDAMDGELSCRVFQLISLMDTGLPRCCNEKIELAILWFLDQFRKTYVGDQLQRTSKVYARMSEVLGITDDNHVLETFMTKIVTNLKYWGRYEPVISRTLQFLNDLSVGYILLKKLVKIDAVKFMLKNHTSEHFPFLGISDNHSLSDFRCRTTFYTALTRLLMVDLGEDEDEFENFMLPLTVAFETVLQIFNNNFKQEDVKRMLIGLARDLRGIAFALNTKTSYTMLFDWMYPTYLPLLQNAVERWYGEPTCTTPILKLMAELMQNRSQRLNFDVSSPNGILLFREASKMVCTYGNQILSLGSLSKDQIYPMKLKGISICYSALKSALCGNYVSFGVFKLYGDNHFDNVLQAFVKMLLSVSHSDLLQYRKLSQSYYPLLECLTQDHMSFIINLEPPVLMYVLTSISEGLTTLDTVVSSSCCTSLDYIVTYLFKHIAKEGKKPLRCREATQAGQRLLHFMQQNPDVLQQMMSVLMNTIVFEDCRNQWSVSRPLLGLILLNEKYFSELRASLINSQPLPKQEVLAQCFRNLMEGVEQNLSVKNRDRFTQNLSVFRRDVAEALRSDGNTEPCSLDMMS

SEQ ID NO: 60886 - protein, 518 aa, Homo sapiens
VYARMSEVLGITDDNHVLETFMTKIVTNLKYWGRYEPVISRTLQFLNDLSVGYILLKKLVKIDAVKFMLKNHTSEHFPFLGISDNHSLSDFRCRTTFYTALTRLLMVDLGEDEDEFENFMLPLTVAFETVLQIFNNNFKQEDVKRMLIGLARDLRGIAFALNTKTSYTMLFDWMYPTYLPLLQNAVERWYGEPTCTTPILKLMAELMQNRSQRLNFDVSSPNGILLFREASKMVCTYGNQILSLGSLSKDQIYPMKLKGISICYSALKSALCGNYVSFGVFKLYGDNHFDNVLQAFVKMLLSVSHSDLLQYRKLSQSYYPLLECLTQDHMSFIINLEPPVLMYVLTSISEGLTTLDTVVSSSCCTSLDYIVTYLFKHIAKEGKKPLRCREATQAGQRLLHFMQQNPDVLQQMMSVLMNTIVFEDCRNQWSVSRPLLGLILLNEKYFSELRASLINSQPLPKQEVLAQCFRNLMEGVEQNLSVKNRDRFTQNLSVFRRDVAEALRSDGNTEPCSLDMMS

SEQ ID NO: 60887 - protein, 472 aa, Homo sapiens
MDIRNYILNYVASQPKLAPFVIQALIQVIAKITKLGWFEVQKDQFVFREIIADVKKFLQVDYSRPSAKHRKIATSFRDTSLKDVLVLACSLLKEVFAKPLNLQDQCQQNLVMQVLKLVLNCLNFDFIGSSADESADDLCTVQIPTTWRTIFLEPETLDLFFNLYHSLPPLLSQLALSCLVQFASTRRSLFNSPERAKYLGNLIKGVKRILENPQGLSDPGNYHEFCRFLARLKTNYQLGELVMVKEYPEVIRLIANFTITSLQHWEFAPNSVHYLLTLWQRMVASVPFVKSTEPHLLDTYAPEITKAFITSRLDSVAIVVRDHLDDPLDDTATVFQQLEQLCTVSRCEYEKTCALLVQLFDQNAQNYQKLLHPYSGVTVDITIQEGRLAWLVYLVGTVVGGRLTYTSTDEHDAMDGELSCRVFQLISLMDTGLPRCCNEKIELAILWFLDQFRKTYVGDQLQRTSKKTFIYL

SEQ ID NO: 60888 - protein, 3224 aa, Homo sapiens
MRRSKADVERYIASVQGSTPSPRQKSMKGFYFAKLYYEAKEYDLAKKYICTYINVQERDPKAHRFLGLLYELEENTDKAVECYRRSVELNPTQKDLVLKIAELLCKNDVTDGRAKYWLERAAKLFPGSPAIYKLKEQLLDCEGEDGWNKLFDLIQSELYVRPDDVHVNIRLVEVYRSTKRLKDAVAHCHEAERNIALRSSLEWNSCVVQTLKEYLESLQCLESDKSDWRATNTDLLLAYANLMLLTLSTRDVQESRELLQSFDSALQSVKSLGGNDELSATFLEMKGHFYMHAGSLLLKMGQHSSNVQWRALSELAALCYLIAFQVPRPKIKLIKGEAGQNLLEMMACDRLSQSGHMLLNLSRGKQDFLKEIVETFANKSGQSALYDALFSSQSPKDTSFLGSDDIGNIDVREPELEDLTRYDVGAIRAHNGSLQHLTWLGLQWNSLPALPGIRKWLKQLFHHLPHETSRLETNAPESICILDLEVFLLGVVYTSHLQLKEKCNSHHSSYQPLCLPLPVCKQLCTERQKSWWDAVCTLIHRKAVPGNVAKLRLLVQHEINTLRAQEKHGLQPALLVHWAECLQKTGSGLNSFYDQREYIGRSVHYWKKVLPLLKIIKKKNSIPEPIDPLFKHFHSVDIQASEIVEYEEDAHITFAILDAVNGNIEDAVTAFESIKSVVSYWNLALIFHRKAEDIENDALSPEEQEECKNYLRKTRDYLIKIIDDSDSNLSVVKKLPVPLESVKEMLNSVMQELEDYSEGGPLYKNGSLRNADSEIKHSTPSPTRYSLSPSKSYKYSPKTPPRWAEDQNSLLKMICQQVEAIKKEMQELKLNSSNSASPHRWPTENYGPDSVPDGYQGSQTFHGAPLTVATTGPSVYYSQSPAYNSQYLLRPAANVTPTKGPVYGMNRLPPQQHIYAYPQQMHTPPVQSSSACMFSQEMYGPPALRFESPATGILSPRGDDYFNYNVQQTSTNPPLPEPGYFTKPPIAAHASRSAESKTIEFGKTNFVQPMPGEGLRPSLPTQAHTTQPTPFKFNSNFKSNDGDFTFSSPQVVTQPPPAAYSNSESLLGLLTSDKPLQGDGYSGAKPIPGGQTIGPRNTFNFGSKNVSGISFTENMGSSQQKNSGFRRSDDMFTFHGPGKSVFGTPTLETANKNHETDGGSAHGDDDDDGPHFEPVVPLPDKIEVKTGEEDEEEFFCNRAKLFRFDVESKEWKERGIGNVKILRHKTSGKIRLLMRREQVLKICANHYISPDMKLTPNAGSDRSFVWHALDYADELPKPEQLAIRFKTPEEAALFKCKFEEAQSILKAPGTNVAMASNQAVRIVKEPTSHDNKDICKSDAGNLNFEFQVAKKEGSWWHCNSCSLKNASTAKKCVSCQNLNPSNKELVGPPLAETVFTPKTSPENVQDRFALVTPKKEGHWDCSICLVRNEPTVSRCIACQNTKSANKSGSSFVHQASFKFGQGDLPKPINSDFRSVFSTKEGQWDCSACLVQNEGSSTKCAACQNPRKQSLPATSIPTPASFKFGTSETSKTLKSGFEDMFAKKEGQWDCSSCLVRNEANATRCVACQNPDKPSPSTSVPAPASFKFGTSETSKAPKSGFEGMFTKKEGQWDCSVCLVRNEASATKCIACQNPGKQNQTTSAVSTPASSETSKAPKSGFEGMFTKKEGQWDCSVCLVRNEASATKCIACQNPGKQNQTTSAVSTPASSETSKAPKSGFEGMFTKKEGQWDCSVCLVRNEASATKCIACQCPSKQNQTTAISTPASSEISKAPKSGFEGMFIRKGQWDCSVCCVQNESSSLKCVACDASKPTHKPIAEAPSAFTLGSEMKLHDSSGSQVGTGFKSNFSEKASKFGNTEQGFKFGHVDQENSPSFMFQGSSNTEFKSTKEGFSIPVSADGFKFGISEPGNQEKKSEKPLENGTGFQAQDISGQKNGRGVIFGQTSSTFTFADLAKSTSGEGFQFGKKDPNFKGFSGAGEKLFSSQYGKMANKANTSGDFEKDDDAYKTEDSDDIHFEPVVQMPEKVELVTGEEDEKVLYSQRVKLFRFDAEVSQWKERGLGNLKILKNEVNGKLRMLMRREQVLKVCANHWITTTMNLKPLSGSDRAWMWLASDFSDGDAKLEQLAAKFKTPELAEEFKQKFEECQRLLLDIPLQTPHKLVDTGRAAKLIQRAEEMKSGLKDFKTFLTNDQTKVTEEENKGSGTGAAGASDTTIKPNPENTGPTLEWDNYDLREDALDDSVSSSSVHASPLASSPVRKNLFRFGESTTGFNFSFKSALSPSKSPAKLNQSGTSVGTDEESDVTQEEERDGQYFEPVVPLPDLVEVSSGEENEQVVFSHRAKLYRYDKDVGQWKERGIGDIKILQNYDNKQVRIVMRRDQVLKLCANHRITPDMTLQNMKGTERVWLWTACDFADGERKVEHLAVRFKLQDVADSFKKIFDEAKTAQEKDSLITPHVSRSSTPRESPCGKIAVAVLEETTRERTDVIQGDDVADATSEVEVSSTSETTPKAVVSPPKFVFGSESVKSIFSSEKSKPFAFGNSSATGSLFGFSFNAPLKSNNSETSSVAQSGSESKVEPKKCELSKNSDIEQSSDSKVKNLFASFPTEESSINYTFKTPEKAKEKKKPEDSPSDDDVLIVYELTPTAEQKALATKLKLPPTFFCYKNRPDYVSEEEEDDEDFETAVKKLNGKLYLDGSEKCRPLEENTADNEKECIIVWEKKPTVEEKAKADTLKLPPTFFCGVCSDTDEDNGNGEDFQSELQKVQEAQKSQTEEITSTTDSVYTGGTEVMVPSFCKSEEPDSITKSISSPSVSSETMDKPVDLSTRKEIDTDSTSQGESKIVSFGFGSSTGLSFADLASSNSGDFAFGSKDKNFQWANTGAAVFGTQSVGTQSAGKVGEDEDGSDEEVVHNEDIHFEPIVSLPEVEVKSGEEDEEILFKERAKLYRWDRDVSQWKERGVGDIKILWHTMKNYYRILMRRDQVFKVCANHVITKTMELKPLNVSNNALVWTASDYADGEAKVEQLAVRFKTKEVADCFKKTFEECQQNLMKLQKGHVSLAAELSKETNPVVFFDVCADGEPLGRITMELFSNIVPRTAENFRALCTGEKGFGFKNSIFHRVIPDFVCQGGDITKHDGTGGQSIYGDKFEDENFDVKHTGPGLLSMANQGQNTNNSQFVITLKKAEHLDFKHVVFGFVKDGMDTVKKIESFGSPKGSVCRRITITECGQI

SEQ ID NO: 60889 - protein, 499 aa, Homo sapiens
MADLANEEKPAIAPPVFVFQKDKGQKRSAGGSSPEGGEDSDREDGNYCPPVKRERTSSLTQFPPSQSEERSSGFRLKPPTLIHGQAPSAGLPSQKPKEQQRSVLRPAVLQAPQPKALSQTVPSSGTNGVSLPADCTGAVPAASPDTAAWRSPSEAADEVCALEEKEPQKNESSNASEEEACEKKDPATQQAFVFGQNLRDRVKLINESVDEADMENAGHPSADTPTATNYFLQYISSSLENSTNSADASSNKFVFGQNMSERVLSPPKLNEVSSDANRENAAAESGSESSSQEATPEKESLAESAAAYTKATARKCLLEKVEVITGEEAESNVLQMQCKLFVFDKTSQSWVERGRGLLRLNDMASTDDGTLQSRLVMRTQGSLRLILNTKLWAQMQIDKASEKSIRITAMDTEDQGVKVFLISASSKDTGQLYAALHHRILALRSRVEQEQEAKMPAPEPGAAPSNEEDDSDDDDVLAPSGATAAGAGDEGDGQTTGST

SEQ ID NO: 60890 - protein, 397 aa, Homo sapiens
ADVTKAEKPAIAPPVFVFQKDKGQKRSAGGSSPEGGEDSDREDGNYCPPVKRERTSSLTQFPPSQSEERSSGFRLKPPTLIHGQAPSAGLPSQKPKEQQRSVLRPAVLQAPQPKALSQTVPSSGTNGVSLPADCTGAVPAASPDTAAWRSPSEAADEVCALEEKEPQKNESSNASEEEACEKKDPATQQAFVFGQNLRDRVKLINESVDEADMENAGHPSADTPTATNYFLQYISSSLENSTNSADASSNKFVFGQNMSERVLSPPKLNEVSSDANRENAAAESGSESSSQEATPEKESLAESAAAYTKATARKCLLEKVEVITGEEAESNVLQMQCKLFVFDKTSQSWWLLRHPHPSHPAVGPCLCGEQPALCPCPGLPNYRPGTPAQLGGLLVRV

SEQ ID NO: 60891 - protein, 567 aa, Homo sapiens
MADLANEEKPAIAPPVFVFQKDKGQKSPAEQKNLSDSGEEPRGEAEAPHHGTGHPESAGEHALEPPAPAGASASTPPPPAPEAQLPPFPRELAGRSAGGSSPEGGEDSDREDGNYCPPVKRERTSSLTQFPPSQSEERSSGFRLKPPTLIHGQAPSAGLPSQKPKEQQRSVLRPAVLQAPQPKALSQTVPSSGTNGVSLPADCTGAVPAASPDTAAWRSPSEAADEVCALEEKEPQKNESSNASEEEACEKKDPATQQAFVFGQNLRDRVKLINESVDEADMENAGHPSADTPTATNYFLQYISSSLENSTNSADASSNKFVFGQNMSERVLSPPKLNEVSSDANRENAAAESGSESSSQEATPEKESLAESAAAYTKATARKCLLEKVEVITGEEAESNVLQMQCKLFVFDKTSQSWVERGRGLLRLNDMASTDDGTLQSRLVMRTQGSLRLILNTKLWAQMQIDKASEKSIRITAMDTEDQGVKVFLISASSKDTGQLYAALHHRILALRSRVEQEQEAKMPAPEPGAAPSNEEDDSDDDDVLAPSGATAAGAGDEGDGQTTGST

SEQ ID NO: 60892 - protein, 562 aa, Homo sapiens
MADLANEEKPAIAPPVFVFQKDKGQKSPAEQKNLSDSGEEPRGEAEAPHHGTGHPESAGEHALEPPAPAGASASTPPPPAPEAQLPPFPRELAGRSAGGSSPEGGEDSDREDGNYCPPVKRERTSSLTQFPPSQSEERSSGFRLKPPTLIHGQAPSAGLPSQKPKEQQRSVLRPAVLQAPQPKALSQTVPSSGTNGVSLPADCTGAVPAASPDTAAWRSPSEAADEEKEPQKNESSNASEEEACEKKDPATQQAFVFGQNLRDRVKLINESVDEADMENAGHPSADTPTATNYFLQYISSSLENSTNSADASSNKFVFGQNMSERVLSPPKLNEVSSDANRENAAAESGSESSSQEATPEKESLAESAAAYTKATARKCLLEKVEVITGEEAESNVLQMQCKLFVFDKTSQSWVERGRGLLRLNDMASTDDGTLQSRLVMRTQGSLRLILNTKLWAQMQIDKASEKSIRITAMDTEDQGVKVFLISASSKDTGQLYAALHHRILALRSRVEQEQEAKMPAPEPGAAPSNEEDDSDDDDVLAPSGATAAGAGDEGDGQTTGST

SEQ ID NO: 60893 - protein, 439 aa, Homo sapiens
MADLANEEERSSGFRLKPPTLIHGQAPSAGLPSQKPKEQQRSVLRPAVLQAPQPKALSQTVPSSGTNGVSLPADCTGAVPAASPDTAAWRSPSEAADEVCALEEKEPQKNESSNASEEEACEKKDPATQQAFVFGQNLRDRVKLINESVDEADMENAGHPSADTPTATNYFLQYISSSLENSTNSADASSNKFVFGQNMSERVLSPPKLNEVSSDANRENAAAESGSESSSQEATPEKESLAESAAAYTKATARKCLLEKVEVITGEEAESNVLQMQCKLFVFDKTSQSWVERGRGLLRLNDMASTDDGTLQSRLVMRTQGSLRLILNTKLWAQMQIDKASEKSIRITAMDTEDQGVKVFLISASSKDTGQLYAALHHRILALRSRVEQEQEAKMPAPEPGAAPSNEEDDSDDDDVLAPSGATAAGAGDEGDGQTTGST

SEQ ID NO: 60894 - protein, 729 aa, Homo sapiens
MSGQPPPPPPQQQQQQQQLSPPPPAALAPVSGVVLPAPPAVSAGSSPAGSPGGGAGGEGLGAAAAALLLHPPPPPPPATAAPPPPPPPPPPPASAAAPASGPPAPPGLAAGPGPAGGAPTPALVAGSSAAAPFPHGDSALNEQEKELQRRLKRLYPAVDEQETPLPRSWSPKDKFSYIGLSQNNLRVHYKGHGKTPKDAASVRATHPIPAACGIYYFEVKIVSKGRDGYMGIGLSAQGVNMNRLPGWDKHSYGYHGDDGHSFCSSGTGQPYGPTFTTGDVIGCCVNLINNTCFYTKNGHSLGIAFTDLPPNLYPTVGLQTPGEVVDANFGQHPFVFDIEDYMREWRTKIQAQIDRFPIGDREGEWQTMIQKMVSSYLVHHGYCATAEAFARSTDQTVLEELASIKNRQRIQKLVLAGRMGEAIETTQQLYPSLLERNPNLLFTLKVRQFIEMVNGTDSEVRCLGGRSPKSQDSYPVSPRPFSSPSMSPSHGMNIHNLASGKGSTAHFSGFESCSNGVISNKAHQSYCHSNKHQSSNLNVPELNSINMSRSQQVNNFTSNDVDMETDHYSNGVGETSSNGFLNGSSKHDHEMEDCDTEMEVDSSQLRRQLCGGSQAAIERMIHFGRELQAMSEQLRRDCGKNTANKKMLKDAFSLLAYSDPWNSPVGNQLDPIQREPVCSALNSAILETHNLPKQPPLALAMGQATQCLGLMARSGIGSCAFATVEDYLH

SEQ ID NO: 60895 - protein, 391 aa, Homo sapiens
MSGQPPPPPPQQQQQQQQLSPPPPAALAPVSGVVLPAPPAVSAGSSPAGSPGGGAGGEGLGAAAAALLLHPPPPPPPATAAPPPPPPPPPPPASAAAPASGPPAPPGLAAGPGPAGGAPTPALVAGSSAAAPFPHGDSALNEQEKELQRRLKRLYPAVDEQETPLPRSWSPKDKFSYIGLSQNNLRVHYKGHGKTPKDAASVRATHPIPAACGIYYFEVKIVSKGRDGYMGIGLSAQGVNMNRLPGWDKHSYGYHGDDGHSFCSSGTGQPYGPTFTTGDVIGCCVNLINNTCFYTKNGHSLGIAFTDLPPLDYPVSPRPFSSPSMSPSHGMNIHNLASGKGSTAHFSGFESCSNGVISNKAHQSYCHSNKHQSSNECTRTKQYKYVKITAS

SEQ ID NO: 60896 - protein, 500 aa, Homo sapiens
MGIGLSAQGVNMNRLPGWDKHSYGYHGDDGHSFCSSGTGQPYGPTFTTGDVIGCCVNLINNTCFYTKNGHSLGIAFTDLPPNLYPTVGLQTPGEVVDANFGQHPFVFDIEDYMREWRTKIQAQIDRFPIGDREGEWQTMIQKMVSSYLVHHGYCATAEAFARSTDQTVLEELASIKNRQRIQKLVLAGRMGEAIETTQQLYPSLLERNPNLLFTLKVRQFIEMVNGTDSEVRCLGGRSPKSQDSYPVSPRPFSSPSMSPSHGMNIHNLASGKGSTAHFSGFESCSNGVISNKAHQSYCHSNKHQSSNLNVPELNSINMSRSQQVNNFTSNDVDMETDHYSNGVGETSSNGFLNGSSKHDHEMEDCDTEMEVDSSQLRRQLCGGSQAAIERMIHFGRELQAMSEQLRRDCGKNTANKKMLKDAFSLLAYSDPWNSPVGNQLDPIQREPVCSALNSAILETHNLPKQPPLALAMGQATQCLGLMARSGIGSCAFATVEDYLH

SEQ ID NO: 60897 - protein, 128 aa, Homo sapiens
MFDVTSRVTYKNVPNWHRDLVRVCENIPIVLCGNKVDIKDRKVKAKSIVFHRKKNLQYYDISAKSNYNFEKPFLWLARKLIGDPNLEFVAMPALAPPEVVMDPALAAQYEHDLEVAQTTALPDEDDDL

SEQ ID NO: 60898 - protein, 233 aa, Homo sapiens
MAAQGEPQVQFKLVLVGDGGTGKTTFVKRHLTGEFEKKYVATLGVEVHPLVFHTNRGPIKFNVWDTAGQEKFGGLRDGYYIQEMGIHHVAHAGLELMSSAQCAIIMFDVTSRVTYKNVPNWHRDLVRVCENIPIVLCGNKVDIKDRKVKAKSIVFHRKKNLQYYDISAKSNYNFEKPFLWLARKLIGDPNLEFVAMPALAPPEVVMDPALAAQYEHDLEVAQTTALPDEDDDL

SEQ ID NO: 60899 - protein, 216 aa, Homo sapiens
MAAQGEPQVQFKLVLVGDGGTGKTTFVKRHLTGEFEKKYVATLGVEVHPLVFHTNRGPIKFNVWDTAGQEKFGGLRDGYYIQAQCAIIMFDVTSRVTYKNVPNWHRDLVRVCENIPIVLCGNKVDIKDRKVKAKSIVFHRKKNLQYYDISAKSNYNFEKPFLWLARKLIGDPNLEFVAMPALAPPEVVMDPALAAQYEHDLEVAQTTALPDEDDDL

SEQ ID NO: 60900 - protein, 234 aa, Homo sapiens
RRRRLRLRRLNCASAIFPASVGRARRRFWKLVLVGDGGTGKTTFVKRHLTGEFEKKYVATLGVEVHPLVFHTNRGPIKFNVWDTAGQEKFGGLRDGYYIQAQCAIIMFDVTSRVTYKNVPNWHRDLVRVCENIPIVLCGNKVDIKDRKVKAKSIVFHRKKNLQYYDISAKSNYNFEKPFLWLARKLIGDPNLEFVAMPALAPPEVVMDPALAAQYEHDLEVAQTTALPDEDDDL

SEQ ID NO: 60901 - protein, 128 aa, Homo sapiens; identical to SEQ ID NO: 60897

SEQ ID NO: 60902 - protein, 216 aa, Homo sapiens; identical to SEQ ID NO: 60899

SEQ ID NO: 60903 - protein, 1756 aa, Homo sapiens
MRRSKAYGERYLASVQGSAPSPGKKLRGFYFAKLYYEAKEYDLAKKYVCTYLSVQERDPRAHRFLGLLYELEENTEKAVECYRRSLELNPPQKDLVLKIAELLCKNDVTDGRAKYWVERAAKLFPGSPAIYKLKEHLLDCEGEDGWNKLFDWIQSELYVRPDDVHMNIRLVELYRSNKRLKDAVARCHEAERNIALRSSLEWNSCVVQTLKEYLESLQCLESDKSDWRATNTDLLLAYANLMLLTLSTRDVQESRELLESFDSALQSAKSSLGGNDELSATFLEMKGHFYMHAGSLLLKMGQHGNNVQWQALSELAALCYVIAFQVPRPKIKLIKGEAGQNLLEMMACDRLSQSGHMLLNLSRGKQDFLKEVVETFANKSGQSVLYNALFSSQSSKDTSFLGSDDIGNIDVQEPELEDLARYDVGAIQAHNGSLQHLTWLGLQWNSLPALPGIRKWLKQLFHHLPQETSRLETNAPESICILDLEVFLLGVVYTSHLQLKEKCNSHHSSYQPLCLPLPVCKRLCTERQKSWWDAVCTLIHRKAVPGNSAELRLVVQHEINTLRAQEKHGLQPALLVHWAKCLQKMGRGLNSSYDQQEYIGRSVHYWKKVLPLLKIIKKNSIPEPIDPLFKHFHSVDIQASEIVEYEEDAHITFAILDAVHGNIEDAVTAFESIKSVVSYWNLALIFHRKAEDIENDAVFPEEQEECKNYLRKTRDYLIKIIDDSDSNLSVVKKLPVPLESVKEMLKSVMQELEDYSEGGPLYKNGSLRNADSEIKHSTPSPTKYSLSPSKSYKYSPKTPPRWAEDQNSLRKMICQEVKAITKLNSSKSASRHRWPTENYGPDSVPDGYQGSQTFHGAPLTVATTGPSVYYSQSPAYNSQYLLRPAANVTPTKGSSNTEFKSTKEGFSIAVSADGFKFGISEPGNQEKKSEKPLENDTGFQAQDISGQKNGRGVIFGQTSSTFTFADVAKSTSGEGFQFGKKDPNFKGFSGAGEKLFSSQCGKMANKANTSGDFEKDDDACKTEDSDDIHFEPVVQMPEKVELVTGEEGEKVLYSQGVKLFRFDAEISQWKERGLGNLKILKNEVNGKPRMLMRRDQVLKVCANHWITTTMNLKPLSGSDRAWMWLASDFSDGDAKLERLAAQFKTPELAEEFKQKFEECQRLLLDIPLQTPHKLVDTGRAAKLIQRAEEMKSGLKDFKTFLTNDQTKVTEEENKGSGTGAAGASDTTIKPNPENTGPTLEWDNYDLREDALDDNVSSSSVHDSPLASSPVRKNIFRFDESTTGFNFSFKSALSLSKSPAKLNQSGTSVGTDEESDVTQEEERDGQYFEPVVPLPDLVEVSSGEENEQVVFSHRAELYRYDKDVGQWKERGIGDIKILQNYDNKQVRIVMRRDQVLKLCANHRITPDMSLQNMKGTERVWVWTACDFADGERKVEHLAVRFKLQDVADSFKKIFDEAKTAQEKDSLITPHVSRSSTPRESPCGKIAVAVLEETTRERTDVIQGDDVADAASEVEVSSTSETTTKAVVSPPKFVFGSESVKRIFSSEKSNPFAFGNSSATGSLFGFSFNAPLKSNDSETSSVAQSGSESKVEPKKCELSKNSDIEQSSDSKVKNLSASFPMEESSINYTFKTPEKEPPLWHAEFTKEELVQKLSSTTKSADQLNGLLRETEATSAVLMEQIKLLKSEIRRLERNQEESAANVEHLKNVLLQFIFLKPGSERESLLPVINTMLQLSPEEKGKLAAVAQGLQETSIPKKK

SEQ ID NO: 60904 - protein, 1748 aa, Homo sapiens
MNVMGFNTDRLAWTRNKLRGFYFAKLYYEAKEYDLAKKYVCTYLSVQERDPRAHRFLGLLYELEENTEKAVECYRRSLELNPPQKDLVLKIAELLCKNDVTDGRAKYWVERAAKLFPGSPAIYKLKEHLLDCEGEDGWNKLFDWIQSELYVRPDDVHMNIRLVELYRSNKRLKDAVARCHEAERNIALRSSLEWNSCVVQTLKEYLESLQCLESDKSDWRATNTDLLLAYANLMLLTLSTRDVQESRELLESFDSALQSAKSSLGGNDELSATFLEMKGHFYMHAGSLLLKMGQHGNNVQWQALSELAALCYVIAFQVPRPKIKLIKGEAGQNLLEMMACDRLSQSGHMLLNLSRGKQDFLKEVVETFANKSGQSVLYNALFSSQSSKDTSFLGSDDIGNIDVQEPELEDLARYDVGAIQAHNGSLQHLTWLGLQWNSLPALPGIRKWLKQLFHHLPQETSRLETNAPESICILDLEVFLLGVVYTSHLQLKEKCNSHHSSYQPLCLPLPVCKRLCTERQKSWWDAVCTLIHRKAVPGNSAELRLVVQHEINTLRAQEKHGLQPALLVHWAKCLQKMGRGLNSSYDQQEYIGRSVHYWKKVLPLLKIIKKNSIPEPIDPLFKHFHSVDIQASEIVEYEEDAHITFAILDAVHGNIEDAVTAFESIKSVVSYWNLALIFHRKAEDIENDAVFPEEQEECKNYLRKTRDYLIKIIDDSDSNLSVVKKLPVPLESVKEMLKSVMQELEDYSEGGPLYKNGSLRNADSEIKHSTPSPTKYSLSPSKSYKYSPKTPPRWAEDQNSLRKMICQEVKAITKLNSSKSASRHRWPTENYGPDSVPDGYQGSQTFHGAPLTVATTGPSVYYSQSPAYNSQYLLRPAANVTPTKGSSNTEFKSTKEGFSIAVSADGFKFGISEPGNQEKKSEKPLENDTGFQAQDISGQKNGRGVIFGQTSSTFTFADVAKSTSGEGFQFGKKDPNFKGFSGAGEKLFSSQCGKMANKANTSGDFEKDDDACKTEDSDDIHFEPVVQMPEKVELVTGEEGEKVLYSQGVKLFRFDAEISQWKERGLGNLKILKNEVNGKPRMLMRRDQVLKVCANHWITTTMNLKPLSGSDRAWMWLASDFSDGDAKLERLAAQFKTPELAEEFKQKFEECQRLLLDIPLQTPHKLVDTGRAAKLIQRAEEMKSGLKDFKTFLTNDQTKVTEEENKGSGTGAAGASDTTIKPNPENTGPTLEWDNYDLREDALDDNVSSSSVHDSPLASSPVRKNIFRFDESTTGFNFSFKSALSLSKSPAKLNQSGTSVGTDEESDVTQEEERDGQYFEPVVPLPDLVEVSSGEENEQVVFSHRAELYRYDKDVGQWKERGIGDIKILQNYDNKQVRIVMRRDQVLKLCANHRITPDMSLQNMKGTERVWVWTACDFADGERKVEHLAVRFKLQDVADSFKKIFDEAKTAQEKDSLITPHVSRSSTPRESPCGKIAVAVLEETTRERTDVIQGDDVADAASEVEVSSTSETTTKAVVSPPKFVFGSESVKRIFSSEKSNPFAFGNSSATGSLFGFSFNAPLKSNDSETSSVAQSGSESKVEPKKCELSKNSDIEQSSDSKVKNLSASFPMEESSINYTFKTPEKEPPLWHAEFTKEELVQKLSSTTKSADQLNGLLRETEATSAVLMEQIKLLKSEIRRLERNQEESAANVEHLKNVLLQFIFLKPGSERESLLPVINTMLQLSPEEKGKLAAVAQGLQETSIPKKK

SEQ ID NO: 60905 - protein, 644 aa, Homo sapiens
MLMRRDQVLKVCANHWITTTMNLKPLSGSDRAWMWLASDFSDGDAKLERLAAQFKTPELAEEFKQKFEECQRLLLDIPLQTPHKLVDTGRAAKLIQRAEEMKSGLKDFKTFLTNDQTKVTEEENKGSGTGAAGASDTTIKPNPENTGPTLEWDNYDLREDALDDNVSSSSVHDSPLASSPVRKNIFRFDESTTGFNFSFKSALSLSKSPAKLNQSGTSVGTDEESDVTQEEERDGQYFEPVVPLPDLVEVSSGEENEQVVFSHRAELYRYDKDVGQWKERGIGDIKILQNYDNKQVRIVMRRDQVLKLCANHRITPDMSLQNMKGTERVWVWTACDFADGERKVEHLAVRFKLQDVADSFKKIFDEAKTAQEKDSLITPHVSRSSTPRESPCGKIAVAVLEETTRERTDVIQGDDVADAASEVEVSSTSETTTKAVVSPPKFVFGSESVKRIFSSEKSNPFAFGNSSATGSLFGFSFNAPLKSNDSETSSVAQSGSESKVEPKKCELSKNSDIEQSSDSKVKNLSASFPMEESSINYTFKTPEKEPPLWHAEFTKEELVQKLSSTTKSADQLNGLLRETEATSAVLMEQIKLLKSEIRRLERNQEESAANVEHLKNVLLQFIFLKPGSEREPSSCYKYDVAAQP

SEQ ID NO: 60906 - protein, 1748 aa, Homo sapiens; identical to SEQ ID NO: 60904

SEQ ID NO: 60907 - protein, 1013 aa, Homo sapiens
MLKSVMQELEDYSEGGPLYKNGSLRNADSEIKHSTPSPTKYSLSPSKSYKYSPKTPPRWAEDQNSLRKMICQEVKAITKLNSSKSASRHRWPTENYGPDSVPDGYQGSQTFHGAPLTVATTGPSVYYSQSPAYNSQYLLRPAANVTPTKGSSNTEFKSTKEGFSIAVSADGFKFGISEPGNQEKKSEKPLENDTGFQAQDISGQKNGRGVIFGQTSSTFTFADVAKSTSGEGFQFGKKDPNFKGFSGAGEKLFSSQCGKMANKANTSGDFEKDDDACKTEDSDDIHFEPVVQMPEKVELVTGEEGEKVLYSQGVKLFRFDAEISQWKERGLGNLKILKNEVNGKPRMLMRRDQVLKVCANHWITTTMNLKPLSGSDRAWMWLASDFSDGDAKLERLAAQFKTPELAEEFKQKFEECQRLLLDIPLQTPHKLVDTGRAAKLIQRAEEMKSGLKDFKTFLTNDQTKVTEEENKGSGTGAAGASDTTIKPNPENTGPTLEWDNYDLREDALDDNVSSSSVHDSPLASSPVRKNIFRFDESTTGFNFSFKSALSLSKSPAKLNQSGTSVGTDEESDVTQEEERDGQYFEPVVPLPDLVEVSSGEENEQVVFSHMAELYRYDKDVGQWKERGIGDIKILQNYDNKQVRIVMRRDQVLKLCANHRITPDMSLQNMKGTERVWVWTACDFADGERKVEHLAVRFKLQDVADSFKKIFDEAKTAQEKDSLITPHVSRSSTPRESPCGKIAVAVLEETTRERTDVIQGDDVADAASEVEVSSTSETTTKAVVSPPKFVFGSESVKRIFSSEKSNPFAFGNSSATGSLFGFSFNAPLKSNDSETSSVAQSGSESKVEPKKCELSKNSDIEQSSDSKVKNLSASFPMEESSINYTFKTPEKEPPLWHAEFTKEELVQKLSSTTKSADQLNGLLRETEATSAVLMEQIKLLKSEIRRLERNQEESAANVEHLKNVLLQFIFLKPGSERESLLPVINTMLQLSPEEKGKLAAVAQGLQETSIPKKK

SEQ ID NO: 60908 - protein, 1756 aa, Homo sapiens
MRRSKAYGERYLASVQGSAPSPGKKLRGFYFAKLYYEAKEYDLAKKYVCTYLSVQERDPRAHRFLGLLYELEENTEKAVECYRRSLELNPPQKDLVLKIAELLCKNDVTDGRAKYWVERAAKLFPGSPAIYKLKEHLLDCEGEDGWNKLFDWIQSELYVRPDDVHMNIRLVELYRSNKRLKDAVARCHEAERNIALRSSLEWNSCVVQTLKEYLESLQCLESDKSDWRATNTDLLLAYANLMLLTLSTRDVQESRELLESFDSALQSAKSSLGGNDELSATFLEMKGHFYMHAGSLLLKMGQHGNNVQWQALSELAALCYVIAFQVPRPKIKLIKGEAGQNLLEMMACDRLSQSGHMLLNLSRGKQDFLKEVVETFANKSGQSVLYNALFSSQSSKDTSFLGSDDIGNIDVQEPELEDLARYDVGAIQAHNGSLQHLTWLGLQWNSLPALPGIRKWLKQLFHHLPQETSRLETNAPESICILDLEVFLLGVVYTSHLQLKEKCNSHHSSYQPLCLPLPVCKRLCTERQKSWWDAVCTLIHRKAVPGNSAELRLVVQHEINTLRAQEKHGLQPALLVHWAKCLQKMGRGLNSSYDQQEYIGRSVHYWKKVLPLLKIIKKNSIPEPIDPLFKHFHSVDIQASEIVEYEEDAHITFAILDAVHGNIEDAVTAFESIKSVVSYWNLALIFHRKAEDIENDAVFPEEQEECKNYLRKTRDYLIKIIDDSDSNLSVVKKLPVPLESVKEMLKSVMQELEDYSEGGPLYKNGSLRNADSEIKHSTPSPTKYSLSPSKSYKYSPKTPPRWAEDQNSLRKMICQEVKAITKLNSSKSASRHRWPTENYGPDSVPDGYQGSQTFHGAPLTVATTGPSVYYSQSPAYNSQYLLRPAANVTPTKGSSNTEFKSTKEGFSIAVSADGFKFGISEPGNQEKKSEKPLENDTGFQAQDISGQKNGRGVIFGQTSSTFTFADVAKSTSGEGFQFGKKDPNFKGFSGAGEKLFSSQCGKMANKANTSGDFEKDDDACKTEDSDDIHFEPVVQMPEKVELVTGEEGEKVLYSQGVKLFRFDAEISQWKERGLGNLKILKNEVNGKPRMLMRRDQVLKVCANHWITTTMNLKPLSGSDRAWMWLASDFSDGDAKLERLAAQFKTPELAEEFKQKFEECQRLLLDIPLQTPHKLVDTGRAAKLIQRAEEMKSGLKDFKTFLTNDQTKVTEEENKGSGTGAAGASDTTIKPNPENTGPTLEWDNYDLREDALDDNVSSSSVHDSPLASSPVRKNIFRFDESTTGFNFSFKSALSLSKSPAKLNQSGTSVGTDEESDVTQEEERDGQYFEPVVPLPDLVEVSSGEENEQVVFSHMAELYRYDKDVGQWKERGIGDIKILQNYDNKQVRIVMRRDQVLKLCANHRITPDMSLQNMKGTERVWVWTACDFADGERKVEHLAVRFKLQDVADSFKKIFDEAKTAQEKDSLITPHVSRSSTPRESPCGKIAVAVLEETTRERTDVIQGDDVADAASEVEVSSTSETTTKAVVSPPKFVFGSESVKRIFSSEKSNPFAFGNSSATGSLFGFSFNAPLKSNDSETSSVAQSGSESKVEPKKCELSKNSDIEQSSDSKVKNLSASFPMEESSINYTFKTPEKEPPLWHAEFTKEELVQKLSSTTKSADQLNGLLRETEATSAVLMEQIKLLKSEIRRLERNQEESAANVEHLKNVLLQFIFLKPGSERESLLPVINTMLQLSPEEKGKLAAVAQGLQETSIPKKK

SEQ ID NO: 60909 - protein, 1748 aa, Homo sapiens
MNVMGFNTDRLAWTRNKLRGFYFAKLYYEAKEYDLAKKYVCTYLSVQERDPRAHRFLGLLYELEENTEKAVECYRRSLELNPPQKDLVLKIAELLCKNDVTDGRAKYWVERAAKLFPGSPAIYKLKEHLLDCEGEDGWNKLFDWIQSELYVRPDDVHMNIRLVELYRSNKRLKDAVARCHEAERNIALRSSLEWNSCVVQTLKEYLESLQCLESDKSDWRATNTDLLLAYANLMLLTLSTRDVQESRELLESFDSALQSAKSSLGGNDELSATFLEMKGHFYMHAGSLLLKMGQHGNNVQWQALSELAALCYVIAFQVPRPKIKLIKGEAGQNLLEMMACDRLSQSGHMLLNLSRGKQDFLKEVVETFANKSGQSVLYNALFSSQSSKDTSFLGSDDIGNIDVQEPELEDLARYDVGAIQAHNGSLQHLTWLGLQWNSLPALPGIRKWLKQLFHHLPQETSRLETNAPESICILDLEVFLLGVVYTSHLQLKEKCNSHHSSYQPLCLPLPVCKRLCTERQKSWWDAVCTLIHRKAVPGNSAELRLVVQHEINTLRAQEKHGLQPALLVHWAKCLQKMGRGLNSSYDQQEYIGRSVHYWKKVLPLLKIIKKNSIPEPIDPLFKHFHSVDIQASEIVEYEEDAHITFAILDAVHGNIEDAVTAFESIKSVVSYWNLALIFHRKAEDIENDAVFPEEQEECKNYLRKTRDYLIKIIDDSDSNLSVVKKLPVPLESVKEMLKSVMQELEDYSEGGPLYKNGSLRNADSEIKHSTPSPTKYSLSPSKSYKYSPKTPPRWAEDQNSLRKMICQEVKAITKLNSSKSASRHRWPTENYGPDSVPDGYQGSQTFHGAPLTVATTGPSVYYSQSPAYNSQYLLRPAANVTPTKGSSNTEFKSTKEGFSIAVSADGFKFGISEPGNQEKKSEKPLENDTGFQAQDISGQKNGRGVIFGQTSSTFTFADVAKSTSGEGFQFGKKDPNFKGFSGAGEKLFSSQCGKMANKANTSGDFEKDDDACKTEDSDDIHFEPVVQMPEKVELVTGEEGEKVLYSQGVKLFRFDAEISQWKERGLGNLKILKNEVNGKPRMLMRRDQVLKVCANHWITTTMNLKPLSGSDRAWMWLASDFSDGDAKLERLAAQFKTPELAEEFKQKFEECQRLLLDIPLQTPHKLVDTGRAAKLIQRAEEMKSGLKDFKTFLTNDQTKVTEEENKGSGTGAAGASDTTIKPNPENTGPTLEWDNYDLREDALDDNVSSSSVHDSPLASSPVRKNIFRFDESTTGFNFSFKSALSLSKSPAKLNQSGTSVGTDEESDVTQEEERDGQYFEPVVPLPDLVEVSSGEENEQVVFSHMAELYRYDKDVGQWKERGIGDIKILQNYDNKQVRIVMRRDQVLKLCANHRITPDMSLQNMKGTERVWVWTACDFADGERKVEHLAVRFKLQDVADSFKKIFDEAKTAQEKDSLITPHVSRSSTPRESPCGKIAVAVLEETTRERTDVIQGDDVADAASEVEVSSTSETTTKAVVSPPKFVFGSESVKRIFSSEKSNPFAFGNSSATGSLFGFSFNAPLKSNDSETSSVAQSGSESKVEPKKCELSKNSDIEQSSDSKVKNLSASFPMEESSINYTFKTPEKEPPLWHAEFTKEELVQKLSSTTKSADQLNGLLRETEATSAVLMEQIKLLKSEIRRLERNQEESAANVEHLKNVLLQFIFLKPGSERESLLPVINTMLQLSPEEKGKLAAVAQGLQETSIPKKK

SEQ ID NO: 60910 - protein, 644 aa, Homo sapiens
MLMRRDQVLKVCANHWITTTMNLKPLSGSDRAWMWLASDFSDGDAKLERLAAQFKTPELAEEFKQKFEECQRLLLDIPLQTPHKLVDTGRAAKLIQRAEEMKSGLKDFKTFLTNDQTKVTEEENKGSGTGAAGASDTTIKPNPENTGPTLEWDNYDLREDALDDNVSSSSVHDSPLASSPVRKNIFRFDESTTGFNFSFKSALSLSKSPAKLNQSGTSVGTDEESDVTQEEERDGQYFEPVVPLPDLVEVSSGEENEQVVFSHMAELYRYDKDVGQWKERGIGDIKILQNYDNKQVRIVMRRDQVLKLCANHRITPDMSLQNMKGTERVWVWTACDFADGERKVEHLAVRFKLQDVADSFKKIFDEAKTAQEKDSLITPHVSRSSTPRESPCGKIAVAVLEETTRERTDVIQGDDVADAASEVEVSSTSETTTKAVVSPPKFVFGSESVKRIFSSEKSNPFAFGNSSATGSLFGFSFNAPLKSNDSETSSVAQSGSESKVEPKKCELSKNSDIEQSSDSKVKNLSASFPMEESSINYTFKTPEKEPPLWHAEFTKEELVQKLSSTTKSADQLNGLLRETEATSAVLMEQIKLLKSEIRRLERNQEESAANVEHLKNVLLQFIFLKPGSEREPSSCYKYDVAAQP

SEQ ID NO: 60911 - protein, 1766 aa, Homo sapiens
MSCSKAYGERYVASVQGSAPSPRKKSTRGFYFAKLYYEAKEYDLAKKYICTYINVREMDPRAHRFLGLLYELEENTEKAVECYRRSVELNPTQKDLVLKIAELLCKNDVTDGRAEYWVERAAKLFPGSPAIYKLKEQLLDCEGEDGWNKLFDLIQSELYVRPDDVHVNIRLVELYRSTKRLKDAVARCHEAERNIALRSSLEWNSCVVQTLKEYLESLQCLESDKSDWRATNTDLLLAYANLMLLTLSTRDVQESRELLESFDSALQSAKSSLGGNDELSATFLEMKGHFYMHAGSLLLKMGQHGNNVQWRALSELAALCYLIAFQVPRPKIKLIKGEAGQNLLEMMACDRLSQSGHMLLNLSRGKQDFLKVVVETFANKSGQSALYDALFSSQSPKDTSFLGSDDIGNIDVQEPELEDLARYDVGAIRAHNGSLQHLTWLGLQWNSLPALPGIRKWLKQLFHHLPQETSRLETNAPESICILDLEVFLLGVVYTSHLQLKEKCNSHHSSYQPLCLPLPVCKQLCTERQKSWWDAVCTLIHRKAVPGNSAKLRLLVQHEINTLRAQEKHGLQPALLVHWAKCLQKMGSGLNSFYDQREYIGRSVHYWKKVLPLLKIIKKKNSIPEPIDPLFKHFHSVDIQASEIVEYEEDAHVTFAILDAVNGNIEDAMTAFESIKSVVSYWNLALIFHRKAEDIANDALSPEEQEECKNYLRKTRGYLIKILDDSDSNLSVVKKLPVPLESVKEMLKSVMQELENYSEGGPLYKNGSLRNADSEIKHSTPSPTKYSLSPSKSYKYSPKTPPRWAEDQNSLLKMIRQEVKAIKEEMQELKLNSSKSASHHRWPTENYGPDSVPDGYQGSQTFHGAPLTVATTGPSVYYSQSPAYNSQYLLRPAANVTPTKGSSNTEFKSTKEGFSIPVSADGFKFGISEPGNQEKKSEKPLENDTGLQAQDISGRKKGRGVIFGQTSSTFTFADVAKSTSGEGFQFGKKDLNFKGFSGAGEKLFSSQYGKMANKANTSGDFEKDDDAYKTEDSDDIHFEPVVQMPEKVELVTGEEGEKVLYSQGVKLFRFDAEVSQWKERGLGNLKILKNEVNGKVRMLMQREQVLKVCANHWITTTMNLKPLSGSDRAWMWSASDFSDGDAKLERLAAKFKTPELAEEFKQKFEECQRLLLDIPLQTPHKLVDTGRAAKLIQRAEEMKSGLKDFKTFLTNDQTKVAEEENKGSGTGAAGASDTTIKPNAENTGPTLEWDNYDLREDALDDSVSSSSVHASPLASSPVRKNLFHFDESTTGSNFSFKSALSLSKSPAKLNQSGTSVGTDEESDVTQEEERDGQYFEPVVPLPDLVEVSSGEENEQVVFSHRAEFYRYDKDVGQWKERGIGDIKILQNYDNKHVRILMRRDQVLKLCANHRITPDMSLQNMKGTERVWVWTACDFADGERKVEHLAVRFKLQDVADSFKKIFDEAKTAQEKDSLITPHVSRSSTPRESPCGKIAVAVLEETTRERTDVIQGDDVADAASEVEVSSTSETTTKAVVSPPKFVFGSESVKRIFSSEKSKPFAFGNSSATGSLFGFSFNAPLKSNNSETSSVAQSGSESKVEPKKCELSKNSDIEQSSDSKVKNLSASFPTEESSINYTFKTPEKEPPLWYAEFTKEELVQKLSSTTKSADHLNGLLREIEATNAVLMEQIKLLKSEIRRLERNQEQEVSAANVEHLKNVLLQFIFLKPGSERERLLPVINTMLQLSLEEKGKLAAVAQAERGFVLNSTF

SEQ ID NO: 60912 - protein, 156 aa, Homo sapiens
MDPRAHRFLGLLYELEENTEKAVECYRRSVELNPTQKDLVLKIAELLCKNDVTDGRAEYWVERAAKLFPGSPAIYKLKEQLLDCEGEDGWNKLFDLIQSELYVRPDDVHVNIRLVELYRSTKRLKDAVARCHEAERNIALRSSLEWNSCVVQTLKF

SEQ ID NO: 60913 - protein, 1125 aa, Homo sapiens
MLLTLSTRDVQESRELLESFDSALQSAKSSLGGNDELSATFLEMKGHFYMHAGSLLLKMGQHGNNVQWRALSELAALCYLIAFQVPRPKIKLIKGEAGQNLLEMMACDRLSQSGHMLLNLSRGKQDFLKVVVETFANKSGQSALYDALFSSQSPKDTSFLGSDDIGNIDVQEPELEDLARYDVGAIRAHNGSLQHLTWLGLQWNSLPALPGIRKWLKQLFHHLPQETSRLETNAPESICILDLEVFLLGVVYTSHLQLKEKCNSHHSSYQPLCLPLPVCKQLCTERQKSWWDAVCTLIHRKAVPGNSAKLRLLVQHEINTLRAQEKHGLQPALLVHWAKCLQKMGSGLNSFYDQREYIGRSVHYWKKVLPLLKIIKKKNSIPEPIDPLFKHFHSVDIQASEIVEYEEDAHVTFAILDAVNGNIEDAMTAFESIKSVVSYWNLALIFHRKAEDIANDALSPEEQEECKNYLRKTRGYLIKILDDSDSNLSVVKKLPVPLESVKEMLKSVMQELENYSEGGPLYKNGSLRNADSEIKHSTPSPTKYSLSPSKSYKYSPKTPPRWAEDQNSLLKMIRQEVKAIKEEMQELKLNSSKSASHHRWPTENYGPDSVPDGYQGSQTFHGAPLTVATTGPSVYYSQSPAYNSQYLLRPAANVTPTKGSSNTEFKSTKEGFSIPVSADGFKFGISEPGNQEKKSEKPLENDTGLQAQDISGRKKGRGVIFGQTSSTFTFADVAKSTSGEGFQFGKKDLNFKGFSGAGEKLFSSQYGKMANKANTSGDFEKDDDAYKTEDSDDIHFEPVVQMPEKVELVTGEEGEKVLYSQGVKLFRFDAEVSQWKERGLGNLKILKNEVNGKVRMLMQREQVLKVCANHWITTTMNLKPLSGSDRAWMWSASDFSDGDAKLERLAAKFKTPELAEEFKQKFEECQRLLLDIPLQTPHKLVDTGRAAKLIQRAEEMKSGSESKVEPKKCELSKNSDIEQSSDSKVKNLSASFPTEESSINYTFKTPEKEPPLWYAEFTKEELVQKLSSTTKSADHLNGLLREIEATNAVLMEQIKLLKSEIRRLERNQEQEVSAANVEHLKNVLLQFIFLKPGSERERLLPVINTMLQLSLEEKGKLAAVAQGEE

SEQ ID NO: 60914 - protein, 140 aa, Homo sapiens
TEESSINYTFKTPEKEPPLWYAEFTKEELVQKLSSTTKSADHLNGLLREIEATNAVLMEQIKLLKSEIRRLERNQEQEVSAANVEHLKNVLLQFIFLKPGSERERLLPVINTMLQLSLEEKGKLAAVAQGLQETSIPKKK

SEQ ID NO: 60915 - protein, 1758 aa, Homo sapiens
MSCSKAYGERYVASVQGSAPSPRKKSTRGFYFAKLYYEAKEYDLAKKYICTYINVREMDPRAHRFLGLLYELEENTEKAVECYRRSVELNPTQKDLVLKIAELLCKNDVTDGRAEYWVERAAKLFPGSPAIYKLKEQLLDCEGEDGWNKLFDLIQSELYVRPDDVHVNIRLVELYRSTKRLKDAVARCHEAERNIALRSSLEWNSCVVQTLKEYLESLQCLESDKSDWRATNTDLLLAYANLMLLTLSTRDVQESRELLESFDSALQSAKSSLGGNDELSATFLEMKGHFYMHAGSLLLKMGQHGNNVQWRALSELAALCYLIAFQVPRPKIKLIKGEAGQNLLEMMACDRLSQSGHMLLNLSRGKQDFLKVVVETFANKSGQSALYDALFSSQSPKDTSFLGSDDIGNIDVQEPELEDLARYDVGAIRAHNGSLQHLTWLGLQWNSLPALPGIRKWLKQLFHHLPQETSRLETNAPESICILDLEVFLLGVVYTSHLQLKEKCNSHHSSYQPLCLPLPVCKQLCTERQKSWWDAVCTLIHRKAVPGNSAKLRLLVQHEINTLRAQEKHGLQPALLVHWAKCLQKMGSGLNSFYDQREYIGRSVHYWKKVLPLLKIIKKKNSIPEPIDPLFKHFHSVDIQASEIVEYEEDAHVTFAILDAVNGNIEDAMTAFESIKSVVSYWNLALIFHRKAEDIANDALSPEEQEECKNYLRKTRGYLIKILDDSDSNLSVVKKLPVPLESVKEMLKSVMQELENYSEGGPLYKNGSLRNADSEIKHSTPSPTKYSLSPSKSYKYSPKTPPRWAEDQNSLLKMIRQEVKAIKEEMQELKLNSSKSASHHRWPTENYGPDSVPDGYQGSQTFHGAPLTVATTGPSVYYSQSPAYNSQYLLRPAANVTPTKGSSNTEFKSTKEGFSIPVSADGFKFGISEPGNQEKKSEKPLENDTGLQAQDISGRKKGRGVIFGQTSSTFTFADVAKSTSGEGFQFGKKDLNFKGFSGAGEKLFSSQYGKMANKANTSGDFEKDDDAYKTEDSDDIHFEPVVQMPEKVELVTGEEGEKVLYSQGVKLFRFDAEVSQWKERGLGNLKILKNEVNGKVRMLMQREQVLKVCANHWITTTMNLKPLSGSDRAWMWSASDFSDGDAKLERLAAKFKTPELAEEFKQKFEECQRLLLDIPLQTPHKLVDTGRAAKLIQRAEEMKSGLKDFKTFLTNDQTKVAEEENKGSGTGAAGASDTTIKPNAENTGPTLEWDNYDLREDALDDSVSSSSVHASPLASSPVRKNLFHFDESTTGSNFSFKSALSLSKSPAKLNQSGTSVGTDEESDVTQEEERDGQYFEPVVPLPDLVEVSSGEENEQVVFSHRAEFYRYDKDVGQWKERGIGDIKILQNYDNKHVRILMRRDQVLKLCANHRITPDMSLQNMKGTERVWVWTACDFADGERKVEHLAVRFKLQDVADSFKKIFDEAKTAQEKDSLITPHVSRSSTPRESPCGKIAVAVLEETTRERTDVIQGDDVADAASEVEVSSTSETTTKAVVSPPKFVFGSESVKRIFSSEKSKPFAFGNSSATGSLFGFSFNAPLKSNNSETSSVAQSGSESKVEPKKCELSKNSDIEQSSDSKVKNLSASFPTEESSINYTFKTPEKEPPLWYAEFTKEELVQKLSSTTKSADHLNGLLREIEATNAVLMEQIKLLKSEIRRLERNQEQEVSAANVEHLKNVLLQFIFLKPGSERERLLPVINTMLQLSLEEKGKLAAVAQGEE

SEQ ID NO: 60916 - protein, 1766 aa, Homo sapiens
MSCSKAYGERYVASVQGSAPSPRKKSTRGFYFAKLYYEAKEYDLAKKYICTYINVREMDPRAHRFLGLLYELEENTEKAVECYRRSVELNPTQKDLVLKIAELLCKNDVTDGRAKYWVERAAKLFPGSPAIYKLKEQLLDCEGEDGWNKLFDLIQSELYVRPDDVHVNIRLVELYRSTKRLKDAVARCHEAERNIALRSSLEWNSCVVQTLKEYLESLQCLESDKSDWRATNTDLLLAYANLMLLTLSTRDVQESRELLESFDSALQSAKSSLGGNDELSATFLEMKGHFYMHAGSLLLKMGQHGNNVQWRALSELAALCYLIAFQVPRPKIKLIKGEAGQNLLEMMACDRLSQSGHMLLNLSRGKQDFLKVVVETFANKSGQSALYDALFSSQSPKDTSFLGSDDIGNIDVQEPELEDLARYDVGAIRAHNGSLQHLTWLGLQWNSLPALPGIRKWLKQLFHHLPQETSRLETNAPESICILDLEVFLLGVVYTSHLQLKEKCNSHHSSYQPLCLPLPVCKQLCTERQKSWWDAVCTLIHRKAVPGNSAKLRLLVQHEINTLRAQEKHGLQPALLVHWAKCLQKMGSGLNSFYDQREYIGRSVHYWKKVLPLLKIIKKKNSIPEPIDPLFKHFHSVDIQASEIVEYEEDAHVTFAILDAVNGNIEDAMTAFESIKSVVSYWNLALIFHRKAEDIANDALSPEEQEECKNYLRKTRGYLIKILDDSDSNLSVVKKLPVPLESVKEMLKSVMQELENYSEGDPLYKNGSLRNADSEIKHSTPSPTKYSLSPSKSYKYSPKTPPRWAEDQNSLLKMIRQEVKAIKEEMQELKLNSSKSASHHRWPTENYGPDSVPDGYQGSQTFHGAPLTVATTGPSVYYSQSPAYNSQYLLRPAANVTPTKGSSNTEFKSTKEGFSIPVSADGFKFGISEPGNQEKESEKPLENDTGFQAQDISGQKNGRGVIFGQTSSTFTFADVAKSTSGEGFQFGKKDPNFKGFSGAGEKLFSSQCGKMANKANTSGDFEKDDDAYKTEDSDDIHFEPVVQMPEKVELVIGEEGEKVLYSQGVKLFRFDAEVRQWKERGLGNLKILKNEVNGKPRMLMRREQVLKVCANHWITTTMNLKPLSGSDRAWMWSASDFSDGDAKLERLAAKFKTPELAEEFKQKFEECQQLLLDIPLQTPHKLVDTGRAAKLIQRAEEMKSGLKDFKTFLTNDQTKVTEEENKGSGTGAAGASDTTIKPNPENTGPTLEWDNCDLREDALDDSVSSSSVHASPLASSPVRKNLFHFGESTTGSNFSFKSALSPSKSPAKLNQSGTSVGTDEESDVTQEEERDGQYFEPVVPLPDLVEVSSGEENEKVVFSHRAELYRYDKDVGQWKERGIGDIKILQNYDNKQVRIVMRRDQVLKLCANHTITPDMSLQNMKGTERVWVWTACDFADGERKVEHLAVRFKLQDVADSFKKIFDEAKTAQEKDSLITPHVSRSSTPRESPCGKIAVAVLEETTRERTDVIQGDDVADAASEVEVSSTSETTTKAVVSPPKFVFGSESVKRIFSSEKSKPFAFGNSSATGSLFGFSFNASLKSNNSETSSVAQSGSESKVEPKKCELSKNSDIEQSSDSKVKNLSASFPMEESSINYTFKTPEKEPPLWHAEFTKEELVQKLSSTTKSADHLNGLLREAEATSAVLMEQIKLLKSEIRRLERNQEQEESAANVEHLKNVLLQFIFLKPGSERERLLPVINTMLQLSPEEKGKLAAVAQAERGFVLNSTF

SEQ ID NO: 60917 - protein, 1125 aa, Homo sapiens
MLLTLSTRDVQESRELLESFDSALQSAKSSLGGNDELSATFLEMKGHFYMHAGSLLLKMGQHGNNVQWRALSELAALCYLIAFQVPRPKIKLIKGEAGQNLLEMMACDRLSQSGHMLLNLSRGKQDFLKVVVETFANKSGQSALYDALFSSQSPKDTSFLGSDDIGNIDVQEPELEDLARYDVGAIRAHNGSLQHLTWLGLQWNSLPALPGIRKWLKQLFHHLPQETSRLETNAPESICILDLEVFLLGVVYTSHLQLKEKCNSHHSSYQPLCLPLPVCKQLCTERQKSWWDAVCTLIHRKAVPGNSAKLRLLVQHEINTLRAQEKHGLQPALLVHWAKCLQKMGSGLNSFYDQREYIGRSVHYWKKVLPLLKIIKKKNSIPEPIDPLFKHFHSVDIQASEIVEYEEDAHVTFAILDAVNGNIEDAMTAFESIKSVVSYWNLALIFHRKAEDIANDALSPEEQEECKNYLRKTRGYLIKILDDSDSNLSVVKKLPVPLESVKEMLKSVMQELENYSEGDPLYKNGSLRNADSEIKHSTPSPTKYSLSPSKSYKYSPKTPPRWAEDQNSLLKMIRQEVKAIKEEMQELKLNSSKSASHHRWPTENYGPDSVPDGYQGSQTFHGAPLTVATTGPSVYYSQSPAYNSQYLLRPAANVTPTKGSSNTEFKSTKEGFSIPVSADGFKFGISEPGNQEKESEKPLENDTGFQAQDISGQKNGRGVIFGQTSSTFTFADVAKSTSGEGFQFGKKDPNFKGFSGAGEKLFSSQCGKMANKANTSGDFEKDDDAYKTEDSDDIHFEPVVQMPEKVELVIGEEGEKVLYSQGVKLFRFDAEVRQWKERGLGNLKILKNEVNGKPRMLMRREQVLKVCANHWITTTMNLKPLSGSDRAWMWSASDFSDGDAKLERLAAKFKTPELAEEFKQKFEECQQLLLDIPLQTPHKLVDTGRAAKLIQRAEEMKSGSESKVEPKKCELSKNSDIEQSSDSKVKNLSASFPMEESSINYTFKTPEKEPPLWHAEFTKEELVQKLSSTTKSADHLNGLLREAEATSAVLMEQIKLLKSEIRRLERNQEQEESAANVEHLKNVLLQFIFLKPGSERERLLPVINTMLQLSPEEKGKLAAVAQGEE

SEQ ID NO: 60918 - protein, 156 aa, Homo sapiens
MDPRAHRFLGLLYELEENTEKAVECYRRSVELNPTQKDLVLKIAELLCKNDVTDGRAKYWVERAAKLFPGSPAIYKLKEQLLDCEGEDGWNKLFDLIQSELYVRPDDVHVNIRLVELYRSTKRLKDAVARCHEAERNIALRSSLEWNSCVVQTLKF

SEQ ID NO: 60919 - protein, 1758 aa, Homo sapiens
MSCSKAYGERYVASVQGSAPSPRKKSTRGFYFAKLYYEAKEYDLAKKYICTYINVREMDPRAHRFLGLLYELEENTEKAVECYRRSVELNPTQKDLVLKIAELLCKNDVTDGRAKYWVERAAKLFPGSPAIYKLKEQLLDCEGEDGWNKLFDLIQSELYVRPDDVHVNIRLVELYRSTKRLKDAVARCHEAERNIALRSSLEWNSCVVQTLKEYLESLQCLESDKSDWRATNTDLLLAYANLMLLTLSTRDVQESRELLESFDSALQSAKSSLGGNDELSATFLEMKGHFYMHAGSLLLKMGQHGNNVQWRALSELAALCYLIAFQVPRPKIKLIKGEAGQNLLEMMACDRLSQSGHMLLNLSRGKQDFLKVVVETFANKSGQSALYDALFSSQSPKDTSFLGSDDIGNIDVQEPELEDLARYDVGAIRAHNGSLQHLTWLGLQWNSLPALPGIRKWLKQLFHHLPQETSRLETNAPESICILDLEVFLLGVVYTSHLQLKEKCNSHHSSYQPLCLPLPVCKQLCTERQKSWWDAVCTLIHRKAVPGNSAKLRLLVQHEINTLRAQEKHGLQPALLVHWAKCLQKMGSGLNSFYDQREYIGRSVHYWKKVLPLLKIIKKKNSIPEPIDPLFKHFHSVDIQASEIVEYEEDAHVTFAILDAVNGNIEDAMTAFESIKSVVSYWNLALIFHRKAEDIANDALSPEEQEECKNYLRKTRGYLIKILDDSDSNLSVVKKLPVPLESVKEMLKSVMQELENYSEGDPLYKNGSLRNADSEIKHSTPSPTKYSLSPSKSYKYSPKTPPRWAEDQNSLLKMIRQEVKAIKEEMQELKLNSSKSASHHRWPTENYGPDSVPDGYQGSQTFHGAPLTVATTGPSVYYSQSPAYNSQYLLRPAANVTPTKGSSNTEFKSTKEGFSIPVSADGFKFGISEPGNQEKESEKPLENDTGFQAQDISGQKNGRGVIFGQTSSTFTFADVAKSTSGEGFQFGKKDPNFKGFSGAGEKLFSSQCGKMANKANTSGDFEKDDDAYKTEDSDDIHFEPVVQMPEKVELVIGEEGEKVLYSQGVKLFRFDAEVRQWKERGLGNLKILKNEVNGKPRMLMRREQVLKVCANHWITTTMNLKPLSGSDRAWMWSASDFSDGDAKLERLAAKFKTPELAEEFKQKFEECQQLLLDIPLQTPHKLVDTGRAAKLIQRAEEMKSGLKDFKTFLTNDQTKVTEEENKGSGTGAAGASDTTIKPNPENTGPTLEWDNCDLREDALDDSVSSSSVHASPLASSPVRKNLFHFGESTTGSNFSFKSALSPSKSPAKLNQSGTSVGTDEESDVTQEEERDGQYFEPVVPLPDLVEVSSGEENEKVVFSHRAELYRYDKDVGQWKERGIGDIKILQNYDNKQVRIVMRRDQVLKLCANHTITPDMSLQNMKGTERVWVWTACDFADGERKVEHLAVRFKLQDVADSFKKIFDEAKTAQEKDSLITPHVSRSSTPRESPCGKIAVAVLEETTRERTDVIQGDDVADAASEVEVSSTSETTTKAVVSPPKFVFGSESVKRIFSSEKSKPFAFGNSSATGSLFGFSFNASLKSNNSETSSVAQSGSESKVEPKKCELSKNSDIEQSSDSKVKNLSASFPMEESSINYTFKTPEKEPPLWHAEFTKEELVQKLSSTTKSADHLNGLLREAEATSAVLMEQIKLLKSEIRRLERNQEQEESAANVEHLKNVLLQFIFLKPGSERERLLPVINTMLQLSPEEKGKLAAVAQGEE

SEQ ID NO: 60920 - protein, 1765 aa, Homo sapiens
MRRSKADVERYVASVLGLTPSPRQKSMKGFYFAKLYYEAKEYDLAKKYICTYINVQERDPKAHRFLGLLYELEENTEKAVECYRRSVELNPTQKDLVLKIAELLCKNDVTDGRAKYWVERAAKLFPGSPAIYKLKEQLLDCEGEDGWNKLFDLIQSELYVRPDDVHVNIRLVELYRSTKRLKDAVAHCHEAERNIALRSSLEWNSCVVQTLKEYLESLQCLESDKSDWQATNTDLLLAYANLMLLTLSTRDVQENRELLESFDSALQSAKSSLGGNDELSATFLEMKGHFYMYAGSLLLKMGQHGNNVQWRALSELAALCYLIAFQVPRPKIKLREGKAGQNLLEMMACDRLSQSGHMLLSLSRGKQDFLKEVVETFANKIGQSALYDALFSSQSPKDTSFLGSDDIGKIDVQEPELEDLARYDVGAIRAHNGSLQHLTWLGLQWNSLPALPGIRKWLKQLFHRLPHETSRLETNAPESICILDLEVFLLGVVYTSHLQLKEKCNSHHSSYQPLCLPFPVCKQLCTERQKSWWDAVCTLIHRKAVPGNLAKLRLLVQHEINTLRAQEKHGLQPALLVHWAKYLQKTGSGLNSFYGQLEYIGRSVHYWKKVLPLLKIIKKNSIPEPIDPLFKHFHSVDIQASEIVEYEEDAHITFAMLDAVNGNIEDAVTAFESIKSVVSYWNLALIFHRKAEDIENDALSPEEQEECRNYLTKTRDYLIKIIDDGDSNLSVVKKLPVPLESVKQMLNSVMQELEDYSEGGPLYKNGSLRNADSEIKHSTPSPTKYSLSPSKSYKYSPETPPRWTEDRNSLLNMICQQVEAIKKEMQELKLNSSKSASRHRWPTENYGPDSVPDGYQGSQTFHGAPLTVATTGPSVYYSQSPAYNSQYLLRPAANVTPTKGSSNTEFKSTKEGFSIPVSADGFKFGISEPGNQEKKREKPLENDTGFQAQDISGRKKGRGVIFGQTSSTFTFADVAKSTSGEGFQFGKKDLNFKGFSGAGEKLFSSRYGKMANKANTSGDFEKDDDAYKTEDSDDIHFEPVVQMPEKVELVTGEEGEKVLYSQGVKLFRFDAEVRQWKERGLGNLKILKNEVNGKLRMLMRREQVLKVCANHWITTTMNLKPLSGSDRAWMWSASDFSDGDAKLERLAAKFKTPELAEEFKQKFEECQRLLLDIPLQTPHKLVDTGRAAKLIQRAEEMKSGLKDFKTFLTNDQTKVTEEENKGSGTGAAGASDTTIKPNAENTGPTLEWDNYDLREDALDDSVSSSSVHASPLASSPVRKNLFRFDESTTGSNFSFKSALSLSKSPAKLNQSGTSVGTDEESVVTQEEERDGQYFEPVVPLPDLVEVSSGEENEQVVFSHRAEIYRYDKDVGQWKERGIGDIKILQNYDNKQVRIVMRRDQVLKLCANHRITPDMSLQNMKGTERVWVWTACDFADGERKVEHLAVRFKLQDVADSFKKIFDEAKTAQEKDSLITPHVSRSSTPRESPCGKIAVAILEETTRERTDVIQGDDVADAASEVEVSSTSETTTKAVVSPPKFVFVSESVKRIFSSEKSKPFVFGNSSATGSLFGFSFNAPLKSNNSETSSVAQSGSESKVEPKKCELSKNSDIEQSSDSKVKNLSASFPTEESSINYTFKTPEKEPPLWHAEFTKEELVQKLRSTTKSADHLNGLLREIEATNAVLMEQIKLLKSEIRRLERNQEREKSAANLEYLKNVLLQFIFLKPGSERERLLPVINTMLQLSPEEKGKLAAVAQDEEENASRSSG

SEQ ID NO: 60921 - protein, 904 aa, Homo sapiens
MRRSKADVERYVASVLGLTPSPRQKSMKGFYFAKLYYEAKEYDLAKKYICTYINVQERDPKAHRFLGLLYELEENTEKAVECYRRSVELNPTQKDLVLKIAELLCKNDVTDGRAKYWVERAAKLFPGSPAIYKLKEQLLDCEGEDGWNKLFDLIQSELYVRPDDVHVNIRLVELYRSTKRLKDAVAHCHEAERNIALRSSLEWNSCVVQTLKEYLESLQCLESDKSDWQATNTDLLLAYANLMLLTLSTRDVQENRELLESFDSALQSAKSSLGGNDELSATFLEMKGHFYMYAGSLLLKMGQHGNNVQWRALSELAALCYLIAFQVPRPKIKLREGKAGQNLLEMMACDRLSQSGHMLLSLSRGKQDFLKEVVETFANKIGQSALYDALFSSQSPKDTSFLGSDDIGKIDVQEPELEDLARYDVGAIRAHNGSLQHLTWLGLQWNSLPALPGIRKWLKQLFHRLPHETSRLETNAPESICILDLEVFLLGVVYTSHLQLKEKCNSHHSSYQPLCLPFPVCKQLCTERQKSWWDAVCTLIHRKAVPGNLAKLRLLVQHEINTLRAQEKHGLQPALLVHWAKYLQKTGSGLNSFYGQLEYIGRSVHYWKKVLPLLKIIKKNSIPEPIDPLFKHFHSVDIQASEIVEYEEDAHITFAMLDAVNGNIEDAVTAFESIKSVVSYWNLALIFHRKAEDIENDALSPEEQEECRNYLTKTRDYLIKIIDDGDSNLSVVKKLPVPLESVKQMLNSVMQELEDYSEGGPLYKNGSLRNADSEIKHSTPSPTKYSLSPSKSYKYSPETPPRWTEDRNSLLNMICQQVEAIKKEMQELKLNSSKSASRHRWPTENYGPDSVPDGYQGSQTFHGAPLTEAAHRHFTIEKHGDSKWIIYRFTKQLCGTERARAKIS

SEQ ID NO: 60922 - protein, 152 aa, Homo sapiens
MWSGTSPRCWVSPRRLDRYICTYINVQERDPKAHRFLGLLYELEENTEKAVECYRRSVELNPTQKDLVLKIAELLCKNDVTDGRAKYWVERAAKLFPGSPAIYKLKEQLLDCEGEDGWNKLFDLIQSELYVRPDDVHVNIRLVELYRSTKRL

SEQ ID NO: 60923 - protein, 904 aa, Homo sapiens; identical to SEQ ID NO: 60921

SEQ ID NO: 60924 - protein, 1765 aa, Homo sapiens; identical to SEQ ID NO: 60920

SEQ ID NO: 60925 - protein, 904 aa, Homo sapiens; identical to SEQ ID NO: 60921

SEQ ID NO: 60926 - protein, 1765 aa, Homo sapiens
MRRSKADVERYVASVLGLTPSPRQKSMKGFYFAKLYYEAKEYDLAKKYICTYINVQERDPKAHRFLGLLYELEENTEKAVECYRRSVELNPTQKDLVLKIAELLCKNDVTDGRAKYWVERAAKLFPGSPAIYKLKEQLLDCEGEDGWNKLFDLIQSELYVRPDDVHVNIRLVELYRSTKRLKDAVAHCHEAERNIALRSSLEWNSCVVQTLKEYLESLQCLESDKSDWRATNTDLLLAYANLMLLTLSTRDVQENRELLESFDSALQSAKSSLGGNDELSATFLEMKGHFYMYAGSLLLKMGQHGNNVQWRALSELAALCYLIAFQVPRPKIKLREGKAGQNLLEMMACDRLSQSGHMLLSLSRGKQDFLKEVVETFANKIGQSALYDALFSSQSPKDTSFLGSDDIGKIDVQEPELEDLARYDVGAIRAHNGSLQHLTWLGLQWNSLPALPGIRKWLKQLFHRLPHETSRLETNAPESICILDLEVFLLGVVYTSHLQLKEKCNSHHSSYQPLCLPFPVCKQLCTERQKSWWDAVCTLIHRKAVPGNLAKLRLLVQHEINTLRAQEKHGLQPALLVHWAKYLQKTGSGLNSFYGQLEYIGRSVHYWKKVLPLLKIIKKNSIPEPIDPLFKHFHSVDIQASEIVEYEEDAHITFAILDAVNGNIEDAVTAFESIKSVVSYWNLALIFHRKAEDIENDALSPEEQEECRNYLTKTRDYLIKIIDDGDSNLSVVKKLPVPLESVKQMLNSVMQELEDYSEGGPLYKNGSLRNADSEIKHSTPSPTKYSLSPSKSYKYSPETPPRWTEDRNSLLNMICQQVEAIKKEMQELKLNSSKSASRHRWPTENYGPDSVPDGYQGSQTFHGAPLTVATTGPSVYYSQSPAYNSQYLLRPAANVTPTKGSSNTEFKSTKEGFSIPVSADGFKFGISEPGNQEKKREKPLENDTGLQAQDIRGRKKGRGVIFGQTSSTFTFADVAKSTSGEGFQFGKKDLNFKGFSGAGEKLFSSRYGKMANKANTSGDFEKDDDAYKTEDSDDIHFEPVVQMPEKVELVTGEEGEKVLYSQGVKLFRFDAEVRQWKERGLGNLKILKNEVNGKLRMLMRREQVLKVCANHWITTTMNLKPLSGSDRAWMWSASDFSDGDAKLERLAAKFKTPELAEEFKQKFEECQRLLLDIPLQTPHKLVDTGRAAKLIQRAEEMKSGLKDFKTFLTNDQTKVTEEENKGSGTGVAGASDTTIKPNAENTGPTLEWDNYDLREDALDDSVSSSSVHASPLASSPVRKNLFRFDESTTGSNFSFKSALSLSKSPAKLNQSGTSVGTDEESVVTQEEERDGQYFEPVVPLPDLVEVSSGEENEQVVFSHRAEIYRYDKDVGQWKERGIGDIKILQNYDNKQVRIVMRRDQVLKLCANHRITPDMSLQNMKGTERVWVWTACDFADGERKVEHLAVRFKLQDVADSFKKIFDEAKTAQEKDSLITPHVSRSSTPRESPCGKIAVAVLEEITRERTDVIQGDDVADAASEVEVSSTSETTTKAVVSPPKFVFVSESVKRIFSSEKSKPFAFGNSSATGSLFGFSFNAPLKSNNSETSSVAQSGSESKVEPKKCELSKNSDIEQSSDSKVKNLSASFPTEESSINYTFKTPEKEPPLWHAEFTKEELVQKLRSTTKSADHLNGLLREIEATNAVLMEQIKLLKSEIRRLERNQEREKSAANLEYLKNVLLQFIFLKPGSERERLLPVINTMLQLSPEEKGKLAAVAQDEEENPSRSSG

SEQ ID NO: 60927 - protein, 468 aa, Homo sapiens
MGTATPDGREDQERLWVSVEDAQMHTVTIWLTVRPDMTVASLKDMVFLDYGFPPVLQQWVIGQRLARDQETLHSHGVRQNGDSAYLYLLSARNTSLNPQELQRERQLRMLEDLGFKDLTLQPRGPLEPGPPKPGVPQEPGRGQPDAVPEPPPVGWQCPGCTFINKPTRPGCEMCCRARPEAYQVPASYQPDEEERARLAGEEEALRQYQQRKQQQQEGNYLQHVQLDQRSLVLNTEPAECPVCYSVLAPGEAVVLRECLHTFCRECLQGTIRNSQEAEVSCPFIDNTYSCSGKLLEREIKALLTPEDYQRFLDLGISIAENRSAFSYHCKTPDCKGWCFFEDDVNEFTCPVCFHVNCLLCKAIHEQMNCKEYQEDLALRAQNDVAARQTTEMLKVMLQQGEAMRCPQCQIVVQKKDGCDWIRCTVCHTEICWVTKGPRWGPGGPGDTSGGCRCRVNGIPCHPSCQNCH

SEQ ID NO: 60928 - protein, 510 aa, Homo sapiens
MDEKTKKAEEMALSLTRAVAGGDEQVAMKCAIWLAEQRVPLSVQLKPEVSPTQDIRLWVSVEDAQMHTVTIWLTVRPDMTVASLKDMVFLDYGFPPVLQQWVIGQRLARDQETLHSHGVRQNGDSAYLYLLSARNTSLNPQELQRERQLRMLEDLGFKDLTLQPRGPLEPGPPKPGVPQEPGRGQPDAVPEPPPVGWQCPGCTFINKPTRPGCEMCCRARPEAYQVPASYQPDEEERARLAGEEEALRQYQQRKQQQQEGNYLQHVQLDQRSLVLNTEPAECPVCYSVLAPGEAVVLRECLHTFCRECLQGTIRNSQEAEVSCPFIDNTYSCSGKLLEREIKALLTPEDYQRFLDLGISIAENRSAFSYHCKTPDCKGWCFFEDDVNEFTCPVCFHVNCLLCKAIHEQMNCKEYQEDLALRAQNDVAARQTTEMLKVMLQQGEAMRCPQCQIVVQKKDGCDWIRCTVCHTEICWVTKGPRWGPGGPGDTSGGCRCRVNGIPCHPSCQNCH

SEQ ID NO: 60929 - protein, 336 aa, Homo sapiens
MDEKTKKAEEMALSLTRAVAGGDEQVAMKCAIWLAEQRVPLSVQLKPEVSPTQDIRLWVSVEDAQMHTVTIWLTVRPDMTVASLKDMVFLDYGFPPVLQQWVIGQRLARDQETLHSHGVRQNGDSAYLYLLSARNTSLNPQELQRERQLRMLEDLGFKDLTLQPRGPLEPGPPKPGVPQEPGRGQPDAVPEPPPVGWQCPGCTFINKPTRPGCEMCCRARPEAYQVPASYQPDEEERARLAGEEEALRQYQQRKQQQQEGNYLQHVQLDQRSLVLNTEPAECPVCYSVLAPGEAVVLRSACRAPSATARRRRSPAPSLTTPTRARASCWRGRSRRS

SEQ ID NO: 60930 - protein, 263 aa, Homo sapiens
MDEKTKKAEEMALSLTRAVAGGDEQVAMKCAIWLAEQRVPLSVQLKPEVSPTQDIRSRGEKTEEVGEVREVPDHGGPRVLPRVDSKSSVEPLEGPNWLWVSVEDAQMHTVTIWLTVRPDMTVASLKDMVFLDYGFPPVLQQWVIGQRLARDQETLHSHGVRQNGDSAYLYLLSARNTSLNPQELQRERQLRMLEDLGFKDLTLQPRGPLEPGPPKPGVPQEPGRGQPDAVPEPPPVGWQCPGCTFINKPTRPGCEMCCRARPE

SEQ ID NO: 60931 - protein, 272 aa, Homo sapiens
MDEKTKKAEEMALSLTRAVAGGDEQVAMKCAIWLAEQRVPLSVQLKPEVSPTQDIRLWVSVEDAQMHTVTIWLTVRPDMTVASLKDMVFLDYGFPPVLQQWVIGQRLARDQETLHSHGVRQNGDSAYLYLLSARNTSLNPQELQRERQLRMLEDLGFKDLTLQPRGPLEPGPPKPGVPQEPGRGQPDAVPEPPPVGWQCPGCTFINKPTRPGCEMCCRARPEAYQVPASYQPDEEERARLAGEEEALRQYQQGVPAGHHPQQPGGGGLLPLH

SEQ ID NO: 60932 - protein, 117 aa, Homo sapiens
MDEKTKKAEEMALSLTRAVAGGDEQVAMKCAIWLAEQRVPLSVQLKPEVSPTQDIRLWVSVEDAQMHTVTIWLTVRPDMTVASLKDMVFLDYGFPPVLQQWVIGQRLARDQETLHSH

SEQ ID NO: 60933 - protein, 255 aa, Homo sapiens
  VARIANT 1: note = MOD_RES - Any amino acid
XEMALSLTRAVAGGDEQVAMKCAIWLAEQRVPLSVQLKPEVSPTQDIRSRGEKTEEVGEVREVPDHGGPRVLPRVDSKSSVEPLEGPNWLWVSVEDAQMHTVTIWLTVRPDMTVASLKDMVFLDYGFPPVLQQWVIGQRLARDQETLHSHGVRQNGDSAYLYLLSARNTSLNPQELQRERQLRMLEDLGFKDLTLQPRGPLEPGPPKPGVPQEPGRGQPDAVPEPPPVGWQCPGCTFINKPTRPGCEMCCRARPE

SEQ ID NO: 60934 - protein, 272 aa, Homo sapiens; identical to SEQ ID NO: 60931

SEQ ID NO: 60935 - protein, 1609 aa, Homo sapiens
MNSPVDPGARQALRKKPPERTPEDLNTIYSYLHGMEILSNLREHQLRLMSARARYERYSGNQVLFCSETIARCWYILLSGSVLVKGSMVLPPCSFGKQFGGKRGCDCLVLEPSEMIVVENAKDNEDSILQREIPARQSRRRFRKINYKGERQTITDDVEVNSYLSLPADLTKMHLTENPHPQVTHVSSSQSGCSIASDSGSSSLSDIYQATESEVGDVDLTRLPEGPVDSEDDEEEDEEIDRTDPLQGRDLVRECLEKEPADKTDDDIEQLLEFMHQLPAFANMTMSVRRELCSVMIFEVVEQAGAIILEDGQELDSWYVILNGTVEISHPDGKVENLFMGNSFGITPTLDKQYMHGIVRTKVDDCQFVCIAQQDYWRILNHVEKNTHKVEEEGEIVMVHEHRELDRSGTRKGHIVIKATPERLIMHLIEEHSIVDPTYIEDFLLTYRTFLESPLDVGIKLLEWFKIDSLRDKVTRIVLLWVNNHFNDFEGDPAMTRFLEEFEKNLEDTKMNGHLRLLNIACAAKAKWRQVVLQKASRESPLQFSLNGGSEKGFGIFVEGVEPGSKAADSGLKRGDQIMEVNGQNFENITFMKAVEILRNNTHLALTVKTNIFVFKELLFRTEQEKSGVPHIPKIAEKKSNRHSIQHVPGDIEQTSQEKGSKKVKANTVSGGRNKIRKILDKTRFSILPPKLFSDGGLSQSQDDSIVGTRHCRHSLAIMPIPGTLSSSSPDLLQPTTSMLDFSNPSDIPDQVIRVFKVDQQSCYIIISKDTTAKEVVFHAVHEFGLTGASDTYSLCEVSVTPEGVIKQRRLPDQFSKLADRIQLNGRYYLKNNMETETLCSDEDAQELVKESQLSMLQLSTIEVATQLSMRDFDLFRNIEPTEYIDDLFKLNSKTGNTHLKRFEDIVNQETFWVASEILTEANQLKRMKIIKHFIKIALHCRECKNFNSMFAIISGLNLASVARLRGTWEKLPSKYEKHLQDLQDIFDPSRNMAKYRNILSSQSMQPPIIPLFPVVKKDMTFLHEGNDSKVDGLVNFEKLRMISKEIRQVVRMTSANMDPAMMFRQRKKRWRSLGSLSQGSTNSNMLDVQGGAHKKRARRSSLLNAKKLYEDAQMARKVKQYLSSLDVETDEEKFQMMSLQWEPAYGTLTKNLSEKRSAKSSEMSPVPMRSAGQTTKAHLHQPHRVSQVLQVPAVNLHPIRKKGQTKDPALNTSLPQKVLGTTEEISGKKHTEDTISVASSLHSSPPASPQGSPHKGYTLIPSAKSDNLSDSSHSEISSRSSIVSNCSVDSMSAALQDERCSSQALAVPESTGALEKTEHASGIGDHSQHGPGWTLLKPSLIKCLAVSSSVSNEEISQEHIIIEAADSGRGSWTSCSSSSHDNFQSLPNPKSWDFLNSYRHTHLDDPIAEVEPTDSEPYSCSKSCSRTCGQCKGSLERKSWTSSSSLSDTYEPNYGTVKQRVLESTPAESSEGLDPKDATDPVYKTVTSSTEKGLIVYCVTSPKKDDRYREPPPTPPGYLGISLADLKEGPHTHLKPPDYSVAVQRSKMMHNSLSRLPPASLSSNLVACVPSKIVTQPQRHNLQPFHPKLGDVTDADSEADENEQVSAV

SEQ ID NO: 60936 - protein, 1509 aa, Homo sapiens
MNSPVDPGARQALRKKPPERTPEDLNTIYSYLHGMEILSNLREHQLRLMSARARYERYSGNQVLFCSETIARCWYILLSGSVLVKGSMVLPPCSFGKQFGGKRGCDCLVLEPSEMIVVENAKDNEDSILQREIPARQSRRRFRKINYKGERQTITDDVEVNSYLSLPADLTKMHLTENPHPQVTHVSSSQSGCSIASDSGSSSLSDIYQATESEVGDVDLTRLPEGPVDSEDDEEEDEEIDRTDPLQGRDLVRECLEKEPADKTDDDIEQLLEFMHQLPAFANMTMSVRRELCSVMIFEVVEQAGAIILEDGQELDSWYVILNGTVEISHPDGKVENLFMGNSFGITPTLDKQYMHGIVRTKVDDCQFVCIAQQDYWRILNHVEKNTHKVEEEGEIVMVHEHRELDRSGTRKGHIVIKATPERLIMHLIEEHSIVDPTYIEDFLLTYRTFLESPLDVGIKLLEWFKIDSLRDKVTRIVLLWVNNHFNDFEGDPAMTRFLEEFEKNLEDTKMNGHLRLLNIACAAKAKWRQVVLQKASRESPLQFSLNGGSEKGFGIFVEGVEPGSKAADSGLKRGDQIMEVNGQNFENITFMKAVEILRNNTHLALTVKTNIFVFKELLFRTEQEKSGVPHIPKIAEKKSNRHSIQHVPGDIEQTSQEKGSKKVKANTVSGGRNKIRKILDKTRFSILPPKLFSDGGLSQSQDDSIVGTRHCRHSLAIMPIPGTLSSSSPDLLQPTTSMLDFSNPSAVGFYYIPDQVIRVFKVDQQSCYIIISKDTTAKEVVFHAVHEFGLTGASDTYSLCEVSVTPEGVIKQRRLPDQFSKLADRIQLNGRYYLKNNMETETLCSDEDAQELVKESQLSMLQLSTIEVATQLSMRDFDLFRNIEPTEYIDDLFKLNSKTGNTHLKRFEDIVNQETFWVASEILTEANQLKRMKIIKHFIKIALHCRECKNFNSMFAIISGLNLASVARLRGTWEKLPSKYEKHLQDLQDIFDPSRNMAKYRNILSSQSMQPPIIPLFPVVKKDMTFLHEGNDSKVDGLVNFEKLRMISKEIRQVVRMTSANMDPAMMFRQRKKRWRSLGSLSQGSTNSNMLDVQGGAHKKRARRSSLLNAKKLYEDAQMARKVKQYLSSLDVETDEEKFQMMSLQWEPAYGTLTKNLSEKRSAKSSEMSPVPMRSAGQTTKAHLHQPHRVSQVLQVPAVNLHPIRKKGQTKDPALNTSLPQKVLGTTEEISGKKHTEDTISVASSLHSSPPASPQGSPHKGYTLIPSAKSDNLSDSSHSEISSRSSIVSNCSVDSMSAALQDERCSSQALAVPESTGALEKTEHASGIGDHSQHGPGWTLLKPSLIKCLAVSSSVSNEEISQEHIIIEAADSGRGSWTSCSSSSHDNFQSLPNPKSWDFLNSYRHTHLDDPIAEVEPTDSEPYSCSKSCSRTCGQCKGSLERKSWTSSSSLSDTYEPNYGTVKQRVLESTPAESSEGLDPKDATDPVYKTVTSSTEKGLIENEQVSAV

SEQ ID NO: 60937 - protein, 1509 aa, Homo sapiens
MNSPVDPGARQALRKKPPERTPEDLNTIYSYLHGMEILSNLREHQLRLMSARARYERYSGNQVLFCSETIARCWYILLSGSVLVKGSMVLPPCSFGKQFGGKRGCDCLVLEPSEMIVVENAKDNEDSILQREIPARQSRRRFRKINYKGERQTITDDVEVNSYLSLPADLTKMHLTENPHPQVTHVSSSQSGCSIASDSGSSSLSDIYQATESEVGDVDLTRLPEGPVDSEDDEEEDEEIDRTDPLQGRDLVRECLEKEPADKTDDDIEQLLEFMHQLPAFANMTMSVRRELCSVMIFEVVEQAGAIILEDGQELDSWYVILNGTVEISHPDGKVENLFMGNSFGITPTLDKQYMHGIVRTKVDDCQFVCIAQQDYWRILNHVEKNTHKVEEEGEIVMVHEHRELDRSGTRKGHIVIKATPERLIMHLIEEHSIVDPTYIEDFLLTYRTFLESPLDVGIKLLEWFKIDSLRDKVTRIVLLWVNNHFNDFEGDPAMTRFLEEFEKNLEDTKMNGHLRLLNIACAAKAKWRQVVLQKASRESPLQFSLNGGSEKGFGIFVEGVEPGSKAADSGLKRGDQIMEVNGQNFENITFMKAVEILRNNTHLALTVKTNIFVFKELLFRTEQEKSGVPHIPKIAEKKSNRHSIQHVPGDIEQTSQEKGSKKVKANTVSGGRNKIRKILDKTRFSILPPKLFSDGGLSQSQDDSIVGTRHCRHSLAIMPIPGTLSSSSPDLLQPTTSMLDFSNPSAKGFKNIPDQVIRVFKVDQQSCYIIISKDTTAKEVVFHAVHEFGLTGASDTYSLCEVSVTPEGVIKQRRLPDQFSKLADRIQLNGRYYLKNNMETETLCSDEDAQELVKESQLSMLQLSTIEVATQLSMRDFDLFRNIEPTEYIDDLFKLNSKTGNTHLKRFEDIVNQETFWVASEILTEANQLKRMKIIKHFIKIALHCRECKNFNSMFAIISGLNLASVARLRGTWEKLPSKYEKHLQDLQDIFDPSRNMAKYRNILSSQSMQPPIIPLFPVVKKDMTFLHEGNDSKVDGLVNFEKLRMISKEIRQVVRMTSANMDPAMMFRQRKKRWRSLGSLSQGSTNSNMLDVQGGAHKKRARRSSLLNAKKLYEDAQMARKVKQYLSSLDVETDEEKFQMMSLQWEPAYGTLTKNLSEKRSAKSSEMSPVPMRSAGQTTKAHLHQPHRVSQVLQVPAVNLHPIRKKGQTKDPALNTSLPQKVLGTTEEISGKKHTEDTISVASSLHSSPPASPQGSPHKGYTLIPSAKSDNLSDSSHSEISSRSSIVSNCSVDSMSAALQDERCSSQALAVPESTGALEKTEHASGIGDHSQHGPGWTLLKPSLIKCLAVSSSVSNEEISQEHIIIEAADSGRGSWTSCSSSSHDNFQSLPNPKSWDFLNSYRHTHLDDPIAEVEPTDSEPYSCSKSCSRTCGQCKGSLERKSWTSSSSLSDTYEPNYGTVKQRVLESTPAESSEGLDPKDATDPVYKTVTSSTEKGLIGKKQTSYF

SEQ ID NO: 60938 - protein, 1504 aa, Homo sapiens
MNSPVDPGARQALRKKPPERTPEDLNTIYSYLHGMEILSNLREHQLRLMSARARYERYSGNQVLFCSETIARCWYILLSGSVLVKGSMVLPPCSFGKQFGGKRGCDCLVLEPSEMIVVENAKDNEDSILQREIPARQSRRRFRKINYKGERQTITDDVEVNSYLSLPADLTKMHLTENPHPQVTHVSSSQSGCSIASDSGSSSLSDIYQATESEVGDVDLTRLPEGPVDSEDDEEEDEEIDRTDPLQGRDLVRECLEKEPADKTDDDIEQLLEFMHQLPAFANMTMSVRRELCSVMIFEVVEQAGAIILEDGQELDSWYVILNGTVEISHPDGKVENLFMGNSFGITPTLDKQYMHGIVRTKVDDCQFVCIAQQDYWRILNHVEKNTHKVEEEGEIVMVHEHRELDRSGTRKGHIVIKATPERLIMHLIEEHSIVDPTYIEDFLLTYRTFLESPLDVGIKLLEWFKIDSLRDKVTRIVLLWVNNHFNDFEGDPAMTRFLEEFEKNLEDTKMNGHLRLLNIACAAKAKWRQVVLQKASRESPLQFSLNGGSEKGFGIFVEGVEPGSKAADSGLKRGDQIMEVNGQNFENITFMKAVEILRNNTHLALTVKTNIFVFKELLFRTEQEKSGVPHIPKIAEKKSNRHSIQHVPGDIEQTSQEKGSKKVKANTVSGGRNKIRKILDKTRFSILPPKLFSDGGLSQSQDDSIVGTRHCRHSLAIMPIPGTLSSSSPDLLQPTTSMLDFSNPSDIPDQVIRVFKVDQQSCYIIISKDTTAKEVVFHAVHEFGLTGASDTYSLCEVSVTPEGVIKQRRLPDQFSKLADRIQLNGRYYLKNNMETETLCSDEDAQELVKESQLSMLQLSTIEVATQLSMRDFDLFRNIEPTEYIDDLFKLNSKTGNTHLKRFEDIVNQETFWVASEILTEANQLKRMKIIKHFIKIALHCRECKNFNSMFAIISGLNLASVARLRGTWEKLPSKYEKHLQDLQDIFDPSRNMAKYRNILSSQSMQPPIIPLFPVVKKDMTFLHEGNDSKVDGLVNFEKLRMISKEIRQVVRMTSANMDPAMMFRQRKKRWRSLGSLSQGSTNSNMLDVQGGAHKKRARRSSLLNAKKLYEDAQMARKVKQYLSSLDVETDEEKFQMMSLQWEPAYGTLTKNLSEKRSAKSSEMSPVPMRSAGQTTKAHLHQPHRVSQVLQVPAVNLHPIRKKGQTKDPALNTSLPQKVLGTTEEISGKKHTEDTISVASSLHSSPPASPQGSPHKGYTLIPSAKSDNLSDSSHSEISSRSSIVSNCSVDSMSAALQDERCSSQALAVPESTGALEKTEHASGIGDHSQHGPGWTLLKPSLIKCLAVSSSVSNEEISQEHIIIEAADSGRGSWTSCSSSSHDNFQSLPNPKSWDFLNSYRHTHLDDPIAEVEPTDSEPYSCSKSCSRTCGQCKGSLERKSWTSSSSLSDTYEPNYGTVKQRVLESTPAESSEGLDPKDATDPVYKTVTSSTEKGLIENEQVSAV

SEQ ID NO: 60939 - protein, 1601 aa, Homo sapiens
MNSPVDPGARQALRKKPPERTPEDLNTIYSYLHGMEILSNLREHQLRLMSARARYERYSGNQVLFCSETIARCWYILLSGSVLVKGSMVLPPCSFGKQFGGKRGCDCLVLEPSEMIVVENAKDNEDSILQREIPARQSRRRFRKINYKGERQTITDDVEVNSYLSLPADLTKMHLTENPHPQVTHVSSSQSGCSIASDSGSSSLSDIYQATESEVGDVDLTRLPEGPVDSEDDEEEDEEIDRTDPLQGRDLVRECLEKEPADKTDDDIEQLLEFMHQLPAFANMTMSVRRELCSVMIFEVVEQAGAIILEDGQELDSWYVILNGTVEISHPDGKVENLFMGNSFGITPTLDKQYMHGIVRTKVDDCQFVCIAQQDYWRILNHVEKNTHKVEEEGEIVMVHEHRELDRSGTRKGHIVIKATPERLIMHLIEEHSIVDPTYIEDFLLTYRTFLESPLDVGIKLLEWFKIDSLRDKVTRIVLLWVNNHFNDFEGDPAMTRFLEEFEKNLEDTKMNGHLRLLNIACAAKAKWRQVVLQKASRESPLQFSLNGGSEKGFGIFVEGVEPGSKAADSGLKRGDQIMEVNGQNFENITFMKAVEILRNNTHLALTVKTNIFVFKELLFRTEQEKSGVPHIPKIAEKKSNRHSIQHVPGDIEQTSQEKGSKKVKANTVSGGRNKIRKILDKTRFSILPPKLFSDGGLSQSQDDSIVGTRHCRHSLAIMPIPGTLSSSSPDLLQPTTSMLDFSNPSDIPDQVIRVFKVDQQSCYIIISKDTTAKEVVFHAVHEFGLTGASDTYSLCEVSVTPEGVIKQRRLPDQFSKLADRIQLNGRYYLKNNMETETLCSDEDAQELVKESQLSMLQLSTIEVATQLSMRDFDLFRNIEPTEYIDDLFKLNSKTGNTHLKRFEDIVNQETFWVASEILTEANQLKRMKIIKHFIKIALHCRECKNFNSMFAIISGLNLASVARLRGTWEKLPSKYEKHLQDLQDIFDPSRNMAKYRNILSSQSMQPPIIPLFPVVKKDMTFLHEGNDSKVDGLVNFEKLRMISKEIRQVVRMTSANMDPAMMFRQRSLSQGSTNSNMLDVQGGAHKKRARRSSLLNAKKLYEDAQMARKVKQYLSSLDVETDEEKFQMMSLQWEPAYGTLTKNLSEKRSAKSSEMSPVPMRSAGQTTKAHLHQPHRVSQVLQVPAVNLHPIRKKGQTKDPALNTSLPQKVLGTTEEISGKKHTEDTISVASSLHSSPPASPQGSPHKGYTLIPSAKSDNLSDSSHSEISSRSSIVSNCSVDSMSAALQDERCSSQALAVPESTGALEKTEHASGIGDHSQHGPGWTLLKPSLIKCLAVSSSVSNEEISQEHIIIEAADSGRGSWTSCSSSSHDNFQSLPNPKSWDFLNSYRHTHLDDPIAEVEPTDSEPYSCSKSCSRTCGQCKGSLERKSWTSSSSLSDTYEPNYGTVKQRVLESTPAESSEGLDPKDATDPVYKTVTSSTEKGLIVYCVTSPKKDDRYREPPPTPPGYLGISLADLKEGPHTHLKPPDYSVAVQRSKMMHNSLSRLPPASLSSNLVACVPSKIVTQPQRHNLQPFHPKLGDVTDADSEADENEQVSAV

SEQ ID NO: 60940 - protein, 1204 aa, Homo sapiens
MNSPVDPGARQALRKKPPERTPEDLNTIYSYLHGMEILSNLREHQLRLMSARARYERYSGNQVLFCSETIARCWYILLSGSVLVKGSMVLPPCSFGKQFGGKRGCDCLVLEPSEMIVVENAKDNEDSILQREIPARQSRRRFRKINYKGERQTITDDVEVNSYLSLPADLTKMHLTENPHPQVTHVSSSQSGCSIASDSGSSSLSDIYQATESEVGDVDLTRLPEGPVDSEDDEEEDEEIDRTDPLQGRDLVRECLEKEPADKTDDDIEQLLEFMHQLPAFANMTMSVRRELCSVMIFEVVEQAGAIILEDGQELDSWYVILNGTVEISHPDGKVENLFMGNSFGITPTLDKQYMHGIVRTKVDDCQFVCIAQQDYWRILNHVEKNTHKVEEEGEIVMVHEHRELDRSGTRKGHIVIKATPERLIMHLIEEHSIVDPTYIEDFLLTYRTFLESPLDVGIKLLEWFKIDSLRDKVTRIVLLWVNNHFNDFEGDPAMTRFLEEFEKNLEDTKMNGHLRLLNIACAAKAKWRQVVLQKASRESPLQFSLNGGSEKGFGIFVEGVEPGSKAADSGLKRGDQIMEVNGQNFENITFMKAVEILRNNTHLALTVKTNIFVFKELLFRTEQEKSGVPHIPKIAEKKSNRHSIQHVPGDIEQTSQEKGSKKVKANTVSGGRNKIRKILDKTRFSILPPKLFSDGGLSQSQDDSIVGTRHCRHSLAIMPIPGTLSSSSPDLLQPTTSMLDFSNPSDIPDQVIRVFKVDQQSCYIIISKDTTAKEVVFHAVHEFGLTGASDTYSLCEVSVTPEGVIKQRRLPDQFSKLADRIQLNGRYYLKNNMETETLCSDEDAQELVKESQLSMLQLSTIEVATQLSMRDFDLFRNIEPTEYIDDLFKLNSKTGNTHLKRFEDIVNQETFWVASEILTEANQLKRMKIIKHFIKIALHCRECKNFNSMFAIISGLNLASVARLRGTWEKLPSKYEKHLQDLQDIFDPSRNMAKYRNILSSQSMQPPIIPLFPVVKKDMTFLHEGNDSKVDGLVNFEKLRMISKEIRQVVRMTSANMDPAMMFRQRSLSQGSTNSNMLDVQGGAHKKRARRSSLLNAKKLYEDAQMARKVKQYLSSLDVETDEEKFQMMSLQWEPAYGTLTKNLSEKRSAKSSEMSPVPMRSAGQTTKAHLHQPHRVSQVLQVPAVNLHPIRKKGQTKDPALM

SEQ ID NO: 60941 - protein, 1391 aa, Homo sapiens
MNSPVDPGARQALRKKPPERTPEDLNTIYSYLHGMEILSNLREHQLRLMSARARYERYSGNQVLFCSETIARCWYILLSGSVLVKGSMVLPPCSFGKQFGGKRGCDCLVLEPSEMIVVENAKDNEDSILQREIPARQSRRRFRKINYKGERQTITDDVEVNSYLSLPADLTKMHLTENPHPQVTHVSSSQSGCSIASDSGSSSLSDIYQATESEVGDVDLTRLPEGPVDSEDDEEEDEEIDRTDPLQGRDLVRECLEKEPADKTDDDIEQLLEFMHQLPAFANMTMSVRRELCSVMIFEVVEQAGAIILEDGQELDSWYVILNGTVEISHPDGKVENLFMGNSFGITPTLDKQYMHGIVRTKVDDCQFVCIAQQDYWRILNHVEKNTHKVEEEGEIVMVHEHRELDRSGTRKGHIVIKATPERLIMHLIEEHSIVDPTYIEDFLLTYRTFLESPLDVGIKLLEWFKIDSLRDKVTRIVLLWVNNHFNDFEGDPAMTRFLEEFEKNLEDTKMNGHLRLLNIACAAKAKWRQVVLQKASRESPLQFSLNGGSEKGFGIFVEGVEPGSKAADSGLKRGDQIMEVNGQNFENITFMKAVEILRNNTHLALTVKTNIFVFKELLFRTEQEKSGVPHIPKIAEKKSNRHSIQHVPGDIEQTSQEKGSKKVKANTVSGGRNKIRKILDKTRFSILPPKLFSDGGLSQSQDDSIVGTRHCRHSLAIMPIPGTLSSSSPDLLQPTTSMLDFSNPSDIPDQVIRVFKVDQQSCYIIISKDTTAKEVVFHAVHEFGLTGASDTYSLCEVSVTPEGVIKQRRLPDQFSKLADRIQLNGRYYLKNNMETETLCSDEDAQELVKESQLSMLQLSTIEVATQLSMRDFDLFRNIEPTEYIDDLFKLNSKTGNTHLKRFEDIVNQETFWVASEILTEANQLKRMKIIKHFIKIALHCRECKNFNSMFAIISGLNLASVARLRGTWEKLPSKYEKHLQDLQDIFDPSRNMAKYRNILSSQSMQPPIIPLFPVVKKDMTFLHEGNDSKVDGLVNFEKLRMISKEIRQVVRMTSANMDPAMMFRQRSLSQGSTNSNMLDVQGGAHKKRARRSSLLNAKKLYEDAQMARKVKQYLSSLDVETDEEKFQMMSLQWEPAYGTLTKNLSEKRSAKSSEMSPVPMRSAGQTTKAHLHQPHRVSQVLQVPAVNLHPIRKKGQTKDPALNTSLPQKVLGTTEEISGKKHTEDTISVASSLHSSPPASPQGSPHKVGSIISDHSSKISGQSCPGIGGAYLQKKILQITRSTAKRTDSTEKATEENRDRTSCENTTRKRMTSPFRRLRERMLSRERLVNSQKEDTDHNQATESCEKVKDVGSNIKDEKGSAIFNSNSQGNSNTLNCFYTRFKSKRRKTL

SEQ ID NO: 60942 - protein, 827 aa, Homo sapiens
MNSPVDPGARQALRKKPPERTPEDLNTIYSYLHGMEILSNLREHQLRLMSARARYERYSGNQVLFCSETIARCWYILLSGSVLVKGSMVLPPCSFGKQFGGKRGCDCLVLEPSEMIVVENAKDNEDSILQREIPARQSRRRFRKINYKGERQTITDDVEVNSYLSLPADLTKMHLTENPHPQVTHVSSSQSGCSIASDSGSSSLSDIYQATESEVGDVDLTRLPEGPVDSEDDEEEDEEIDRTDPLQGRDLVRECLEKEPADKTDDDIEQLLEFMHQLPAFANMTMSVRRELCSVMIFEVVEQAGAIILEDGQELDSWYVILNGTVEISHPDGKVENLFMGNSFGITPTLDKQYMHGIVRTKVDDCQFVCIAQQDYWRILNHVEKNTHKVEEEGEIVMVHEHRELDRSGTRKGHIVIKATPERLIMHLIEEHSIVDPTYIEDFLLTYRTFLESPLDVGIKLLEWFKIDSLRDKVTRIVLLWVNNHFNDFEGDPAMTRFLEEFEKNLEDTKMNGHLRLLNIACAAKAKWRQVVLQKASRESPLQFSLNGGSEKGFGIFVEGVEPGSKAADSGLKRGDQIMEVNGQNFENITFMKAVEILRNNTHLALTVKTNIFVFKELLFRTEQEKSGVPHIPKIAEKKSNRHSIQHVPGDIEQTSQEKGSKKVKANTVSGGRNKIRKILDKTRFSILPPKLFSDGGLSQSQDDSIVGTRHCRHSLAIMPIPGTLSSSSPDLLQPTTSMLDFSNPSDIPDQVIRVFKVDQQSCYIIISKDTTAKEVVFHAVHEFGLTGASDTYSLCEVSVTPEGVIKQRRLPDQFSKLADRIQLNGR

SEQ ID NO: 60943 - protein, 516 aa, Homo sapiens
MADNLSDTLKKLKITAVDKTEDSLEGCLDCLLQALAQNNTETSEKIQASGILQLFASLLTPQSSCKAKVANIIAEVAKNEFMRIPCVDAGLISPLVQLLNSKDQEVLLQTGRALGNICYDSQSSKEQFASTNIAEELVKLFKKQIEHDKREMIFEVLAPLAENDAIKLQLVEAGLVECLLEIVQQKVDSDKEDDITELKTGSDLMVLLLLGDESMQKLFEGGKGSVFQRVLSWIPSNNHQLQLAGALAIANFARNDANCIHMVDNGIVEKLMDLLDRHVEDGNVTVQHAALSALRNLAIPVINKAKMLSAGVTEAVLKFLKSEMPPVQFKLLGTLRMLIDAQAEAAEQLGKNVKLVERLVEWCEAKDHAGVMGESNRLLSALIRHSKSKDVIKTIVQSGGIKHLVTMATSEHVIMQNEALVALALIAALELGTAEKDLESAKLVQILHRLLADERSAPEIKYNSMVLICALMGSECLHKEVQDLAFLDVVSKLRSHENKSVAQQASLTEQRLTVES

SEQ ID NO: 60944 - protein, 608 aa, Homo sapiens
MADNLSDTLKKLKITAVDKTEDSLEGCLDCLLQALAQNNTETSEKIQASGILQLFASLLTPQSSCKAKVANIIAEVAKNEFMRIPCVDAGLISPLVQLLNSKDQEVLLQTGRALGNICYDSHEGRSAVDQAGGAQIVIDHLRSLCSITDPANEKLLTVFCGMLMNYSNENDSLQAQLINMGVIPTLVKLLGIHCQNAALTEMCLVAFGNLAELESSKEQFASTNIAEELVKLFKKQIEHDKREMIFEVLAPLAENDAIKLQLVEAGLVECLLEIVQQKVDSDKEDDITELKTGSDLMVLLLLGDESMQKLFEGGKGSVFQRVLSWIPSNNHQLQLAGALAIANFARNDANCIHMVDNGIVEKLMDLLDRHVEDGNVTVQHAALSALRNLAIPVINKAKMLSAGVTEAVLKFLKSEMPPVQFKLLGTLRMLIDAQAEAAEQLGKNVKLVERLVEWCEAKDHAGVMGESNRLLSALIRHSKSKDVIKTIVQSGGIKHLVTMATSEHVIMQNEALVALALIAALELGTAEKDLESAKLVQILHRLLADERSAPEIKYNSMVLICALMGSECLHKEVQDLAFLDVVSKLRSHENKSVAQQASLTEQRLTVES

SEQ ID NO: 60945 - protein, 559 aa, Homo sapiens
MADNLSDTLKKLKITAVDKTEDSLEGCLDCLLQALAQNNTETSEKIQASGILQLFASLLTPQSSCKAKVANIIAEVAKNEFMRIPCVDAGLISPLVQLLNSKDQEVLLQTGRALGNICYDSHSLQAQLINMGVIPTLVKLLGIHCQNAALTEMCLVAFGNLAELESSKEQFASTNIAEELVKLFKKQIEHDKREMIFEVLAPLAENDAIKLQLVEAGLVECLLEIVQQKVDSDKEDDITELKTGSDLMVLLLLGDESMQKLFEGGKGSVFQRVLSWIPSNNHQLQLAGALAIANFARNDANCIHMVDNGIVEKLMDLLDRHVEDGNVTVQHAALSALRNLAIPVINKAKMLSAGVTEAVLKFLKSEMPPVQFKLLGTLRMLIDAQAEAAEQLGKNVKLVERLVEWCEAKDHAGVMGESNRLLSALIRHSKSKDVIKTIVQSGGIKHLVTMATSEHVIMQNEALVALALIAALELGTAEKDLESAKLVQILHRLLADERSAPEIKYNSMVLICALMGSECLHKEVQDLAFLDVVSKLRSHENKSVAQQASLTEQRLTVES

SEQ ID NO: 60946 - protein, 558 aa, Homo sapiens
MDNLSDTLKKLKITAVDKTEDSLEGCLDCLLQALAQNNTETSEKIQASGILQLFASLLTPQSSCKAKVANIIAEVAKNEFMRIPCVDAGLISPLVQLLNSKDQEVLLQTGRALGNICYDSHSLQAQLINMGVIPTLVKLLGIHCQNAALTEMCLVAFGNLAELESSKEQFASTNIAEELVKLFKKQIEHDKREMIFEVLAPLAENDAIKLQLVEAGLVECLLEIVQQKVDSDKEDDITELKTGSDLMVLLLLGDESMQKLFEGGKGSVFQRVLSWIPSNNHQLQLAGALAIANFARNDANCIHMVDNGIVEKLMDLLDRHVEDGNVTVQHAALSALRNLAIPVINKAKMLSAGVTEAVLKFLKSEMPPVQFKLLGTLRMLIDAQAEAAEQLGKNVKLVERLVEWCEAKDHAGVMGESNRLLSALIRHSKSKDVIKTIVQSGGIKHLVTMATSEHVIMQNEALVALALIAALELGTAEKDLESAKLVQILHRLLADERSAPEIKYNSMVLICALMGSECLHKEVQDLAFLDVVSKLRSHENKSVAQQASLTEQRLTVES

SEQ ID NO: 60947 - protein, 607 aa, Homo sapiens
MDNLSDTLKKLKITAVDKTEDSLEGCLDCLLQALAQNNTETSEKIQASGILQLFASLLTPQSSCKAKVANIIAEVAKNEFMRIPCVDAGLISPLVQLLNSKDQEVLLQTGRALGNICYDSHEGRSAVDQAGGAQIVIDHLRSLCSITDPANEKLLTVFCGMLMNYSNENDSLQAQLINMGVIPTLVKLLGIHCQNAALTEMCLVAFGNLAELESSKEQFASTNIAEELVKLFKKQIEHDKREMIFEVLAPLAENDAIKLQLVEAGLVECLLEIVQQKVDSDKEDDITELKTGSDLMVLLLLGDESMQKLFEGGKGSVFQRVLSWIPSNNHQLQLAGALAIANFARNDANCIHMVDNGIVEKLMDLLDRHVEDGNVTVQHAALSALRNLAIPVINKAKMLSAGVTEAVLKFLKSEMPPVQFKLLGTLRMLIDAQAEAAEQLGKNVKLVERLVEWCEAKDHAGVMGESNRLLSALIRHSKSKDVIKTIVQSGGIKHLVTMATSEHVIMQNEALVALALIAALELGTAEKDLESAKLVQILHRLLADERSAPEIKYNSMVLICALMGSECLHKEVQDLAFLDVVSKLRSHENKSVAQQASLTEQRLTVES

SEQ ID NO: 60948 - protein, 607 aa, Homo sapiens
MADNLSDTLKKLKITAVDKTEDSLEGCLDCLLQALAQNNTETSEKIQASGILQLFASLLTPQSSCKAKVANIIAEVAKNEFMRIPCVDAGLISPLVQLLNSKDQEVLLQTGRALGNICYDSHEGRSAVDQAGGAQIVIDHLRSLCSITDPANEKLLTVFCGMLMNYSNENDSLQAQLINMGVIPTLVKLLGIHCQNAALTEMCLVAFGNLAELESSKEQFASTNIAEELVKLFKKQIEHDKREMIFEVLAPLAENDAIKLQLVEAGLVECLLEIVQQKVDSDKEDDITELKTGSDLMVLLLLGDESMQKLFEGGKGSVFQRVLSWIPSNNHQLQLAGALAIANFARNDANCIHMVDNGIVEKLMDLLDRHVEDGNVTVQHAALSALRNLAIPVINKAKMLSAGVTEAVLKFLKSEMPPVQFKLLGTLRMLIDAQEAAEQLGKNVKLVERLVEWCEAKDHAGVMGESNRLLSALIRHSKSKDVIKTIVQSGGIKHLVTMATSEHVIMQNEALVALALIAALELGTAEKDLESAKLVQILHRLLADERSAPEIKYNSMVLICALMGSECLHKEVQDLAFLDVVSKLRSHENKSVAQQASLTEQRLTVES

SEQ ID NO: 60949 - protein, 184 aa, Homo sapiens
MREYKLVVLGSGGVGKSALTVQFVQGIFVEKYDPTIEDSYRKQVEVDAQQCMLEILDTAGTEQFTAMRDLYMKNGQGFALVYSITAQSTFNDLQDLREQILRVKDTDDVPMILVGNKCDLEDERVVGKEQGQNLARQWNNCAFLESSAKSKINVNEIFYDLVRQINRKTPVPGKARKKSSCQLL

SEQ ID NO: 60950 - protein, 184 aa, Homo sapiens; identical to SEQ ID NO: 60949

SEQ ID NO: 60951 - protein, 118 aa, Homo sapiens
MRDLYMKNGQGFALVYSITAQSTFNDLQDLREQILRVKDTDDVPMILVGNKCDLEDERVVGKEQGQNLARQWNNCAFLESSAKSKINVNEIFYDLVRQINRKTPVPGKARKKSSCQLL

SEQ ID NO: 60952 - protein, 184 aa, Homo sapiens; identical to SEQ ID NO: 60949

SEQ ID NO: 60953 - protein, 32 aa, Homo sapiens
MREYKLVVLGSGGVGKSALTVQFVQGIFVEKY

SEQ ID NO: 60954 - protein, 142 aa, Homo sapiens
MREYKLVVLGSGGVGKSALEQFTAMRDLYMKNGQGFALVYSITAQSTFNDLQDLREQILRVKDTDDVPMILVGNKCDLEDERVVGKEQGQNLARQWNNCAFLESSAKSKINVNEIFYDLVRQINRKTPVPGKARKKSSCQLL

SEQ ID NO: 60955 - protein, 127 aa, Homo sapiens
MREYKLVVLGSGGVGKSALTVQFVQGIFVEKYDPTIEDSYRKQVEVDAQQCMLEILDTAGTEQFTAMRDLYMKNGQGFALVYSITAQSTFNDLQDLREQILRVKDTDDVPMILVGNKCDLEDERVVG

SEQ ID NO: 60956 - protein, 142 aa, Homo sapiens
MREYKLVVLGSGGVGKSALTVQFVQGIFVEKYDPTIEDSYRKQVEVDAQQCMLEILDTAGTEQFTAMRDLYMKNGQGFALVYSITAQSTFNDLQDLREQILRVKDTDDVPMILVGNKCDLEDERVVGKEQGQNLDNGTTVHS

SEQ ID NO: 60957 - protein, 48 aa, Homo sapiens
MREYKLVVLGSGGVGKSALTVQFVQGIFVEKYDPTIEDSYRKQVEVDA

SEQ ID NO: 60958 - protein, 11 aa, Homo sapiens
MREYKLVVLGS

SEQ ID NO: 60959 - protein, 87 aa, Homo sapiens
MREYKLVVLGSGGVGKSALTVQFVQGIFVEKYDPTIEDSYRKQVEVDAQQCMLEILDTAGTEQFTAMRDLYMKNGQGFALVYSITAQ

SEQ ID NO: 60960 - protein, 184 aa, Homo sapiens; identical to SEQ ID NO: 60949

SEQ ID NO: 60961 - protein, 101 aa, Homo sapiens
MREYKLVVLGSGGVGKSALTVQFVQGIFVEKYDPTIEDSYRKQVEVDAQQCMLEILDTAGTEQFTAMRDLYMKNGQGFALVYSITAQSTFNDLQDLREQIL

SEQ ID NO: 60962 - protein, 53 aa, Homo sapiens
MREYKLVVLGSGGVGKSALTVQFVQGIFVEKYDPTIEDSYRKQVEVDAQQCML

SEQ ID NO: 60963 - protein, 142 aa, Homo sapiens; identical to SEQ ID NO: 60954

SEQ ID NO: 60964 - protein, 165 aa, Homo sapiens
MREYKLVVLGSGGVGKSALTVQFVQGIFVEKYDPTIEDSYRKEQFTAMRDLYMKNGQGFALVYSITAQSTFNDLQDLREQILRVKDTDDVPMILVGNKCDLEDERVVGKEQGQNLARQWNNCAFLESSAKSKINVNEIFYDLVRQINRKTPVPGKARKKSSCQLL

SEQ ID NO: 60965 - protein, 139 aa, Homo sapiens
MREYKLVVLGSGGVGKSALTVQFVQGIFVEKYDPTIEDSYRKQVEVDAQQCMLEILDTAGTEQFTAMRDLYMKNGQGFALVYSITAQSTFNDLQDLREQILRVKDTDDVPMILVGNKCDLEDERVVGKEQGQNLARQWN

SEQ ID NO: 60966 - protein, 93 aa, Homo sapiens
MREYKLVVLGSGGVGKSALTVQFVQGIFVEKYDPTIEDSYRKQVEVDAQQCMLEILDTAGTEQFTAMRDLYMKNGQGFALVYSITAQSTFNDL

SEQ ID NO: 60967 - protein, 11 aa, Homo sapiens
MREYKLVVLGS

SEQ ID NO: 60968 - protein, 98 aa, Homo sapiens
MREYKLVVLGSGGVGKSALTVQFVQGIFVEKYDPTIEDSYRKQVEVDAQQCMLEILDTAGTEQFTAMRDLYMKNGQGFALVYSITAQSTFNDLQDLRE

SEQ ID NO: 60969 - protein, 137 aa, Homo sapiens
MREYKLVVLGSGGVGKSALTVQFVQGIFVEKYDPTIEDSYRKQVEVDAQQCMLEILDTAGTVPMILVGNKCDLEDERVVGKEQGQNLARQWNNCAFLESSAKSKINVNEIFYDLVRQINRKTPVPGKARKKSSCQLL

SEQ ID NO: 60970 - protein, 118 aa, Homo sapiens; identical to SEQ ID NO: 60951

SEQ ID NO: 60971 - protein, 122 aa, Homo sapiens
MREYKLVVLGSGGVGKSALTVQFVQGIFVEKYDPTIEDSYRKQVEVDAQQCMLEILDTAGTEQFTAMRDLYMKNGQGFALVYSITAQSTFNDLQDLREQILRVKDTDDVPMILVGNKCDLED

SEQ ID NO: 60972 - protein, 85 aa, Homo sapiens
MREYKLVVLGSGGVGKSALTVQFVQGIFVEKYDPTIEDSYRKQVEVDAQQCMLEILDTAGTEQFTAMRDLYMKNGQGFALVYSIT

SEQ ID NO: 60973 - protein, 183 aa, Homo sapiens
MREYKVVVLGSGGVGKSALTVQFVTGTFIEKYDPTIEDFYRKEIEVDSSPSVLEILDTAGTEQFASMRDLYIKNGQGFILVYSLVNQQSFQDIKPMRDQIIRVKRYEKVPVILVGNKVDLESEREVSSSEGRALAEEWGCPFMETSAKSKTMVDELFAEIVRQMNYAAQPDKDDPCCSACNIQ

SEQ ID NO: 60974 - protein, 556 aa, Homo sapiens
MNEGAPGDSDLETEARVPWSIMGHCLRTGQARMSATPTPAGEGARRDELFGILQILHQCILSSGDAFVLTGVCCSWRQNGKPPYSQKEDKEVQTGYMNAQIEIIPCKICGDKSSGIHYGVITCEGCKGFFRRSQQSNATYSCPRQKNCLIDRTSRNRCQHCRLQKCLAVGMSRDAVKFGRMSKKQRDSLYAEVQKHRMQQQQRDHQQQPGEAEPLTPTYNISANGLTELHDDLSNYIDGHTPEGSKADSAVSSFYLDIQPSPDQSGLDINGIKPEPICDYTPASGFFPYCSFTNGETSPTVSMAELEHLAQNISKSHLETCQYLREELQQITWQTFLQEEIENYQNKQREVMWQLCAIKITEAIQYVVEFAKRIDGFMELCQNDQIVLLKAGSLEVVFIRMCRAFDSQNNTVYFDGKYASPDVFKSLGCEDFISFVFEFGKSLCSMHLTEDEIALFSAFVLMSADRSWLQEKVKIEKLQQKIQLALQHVLQKNHREDGILTKLICKVSTLRALCGRHTEKLMAFKAIYPDIVRLHFPPLYKELFTSEFEPAMQIDG

SEQ ID NO: 60975 - protein, 548 aa, Homo sapiens
MNEGAPGDSDLETEARVPWSIMGHCLRTGQARMSATPTPAGEGARSSSTCSSLSRLFWSQLEHINWDGATAKNFINLREFFSFLLPALRKAQIEIIPCKICGDKSSGIHYGVITCEGCKGFFRRSQQSNATYSCPRQKNCLIDRTSRNRCQHCRLQKCLAVGMSRDAVKFGRMSKKQRDSLYAEVQKHRMQQQQRDHQQQPGEAEPLTPTYNISANGLTELHDDLSNYIDGHTPEGSKADSAVSSFYLDIQPSPDQSGLDINGIKPEPICDYTPASGFFPYCSFTNGETSPTVSMAELEHLAQNISKSHLETCQYLREELQQITWQTFLQEEIENYQNKQREVMWQLCAIKITEAIQYVVEFAKRIDGFMELCQNDQIVLLKAGSLEVVFIRMCRAFDSQNNTVYFDGKYASPDVFKSLGCEDFISFVFEFGKSLCSMHLTEDEIALFSAFVLMSADRSWLQEKVKIEKLQQKIQLALQHVLQKNHREDGILTKLICKVSTLRALCGRHTEKLMAFKAIYPDIVRLHFPPLYKELFTSEFEPAMQIDG

SEQ ID NO: 60976 - protein, 523 aa, Homo sapiens
MESAPAAPDPAASEPGSSGADAAAGSRETPLNQESARKSEPPAPVRRQSYSSTSRGISVTKKTHTSQIEIIPCKICGDKSSGIHYGVITCEGCKGFFRRSQQSNATYSCPRQKNCLIDRTSRNRCQHCRLQKCLAVGMSRDAVKFGRMSKKQRDSLYAEVQKHRMQQQQRDHQQQPGEAEPLTPTYNISANGLTELHDDLSNYIDGHTPEGSKADSAVSSFYLDIQPSPDQSGLDINGIKPEPICDYTPASGFFPYCSFTNGETSPTVSMAELEHLAQNISKSHLETCQYLREELQQITWQTFLQEEIENYQNKQREVMWQLCAIKITEAIQYVVEFAKRIDGFMELCQNDQIVLLKAGSLEVVFIRMCRAFDSQNNTVYFDGKYASPDVFKSLGCEDFISFVFEFGKSLCSMHLTEDEIALFSAFVLMSADRSWLQEKVKIEKLQQKIQLALQHVLQKNHREDGILTKLICKVSTLRALCGRHTEKLMAFKAIYPDIVRLHFPPLYKELFTSEFEPAMQIDG

SEQ ID NO: 60977 - protein, 468 aa, Homo sapiens
MMYFVIAAMKAQIEIIPCKICGDKSSGIHYGVITCEGCKGFFRRSQQSNATYSCPRQKNCLIDRTSRNRCQHCRLQKCLAVGMSRDAVKFGRMSKKQRDSLYAEVQKHRMQQQQRDHQQQPGEAEPLTPTYNISANGLTELHDDLSNYIDGHTPEGSKADSAVSSFYLDIQPSPDQSGLDINGIKPEPICDYTPASGFFPYCSFTNGETSPTVSMAELEHLAQNISKSHLETCQYLREELQQITWQTFLQEEIENYQNKQREVMWQLCAIKITEAIQYVVEFAKRIDGFMELCQNDQIVLLKAGSLEVVFIRMCRAFDSQNNTVYFDGKYASPDVFKSLGCEDFISFVFEFGKSLCSMHLTEDEIALFSAFVLMSADRSWLQEKVKIEKLQQKIQLALQHVLQKNHREDGILTKLICKVSTLRALCGRHTEKLMAFKAIYPDIVRLHFPPLYKELFTSEFEPAMQIDG

SEQ ID NO: 60978 - protein, 518 aa, Homo sapiens
MDRAPQRQHRASRELLAAKKTHTSQIEVIPCKICGDKSSGIHYGVITCEGCKGFFRRSQRCNAAYSCTRQQNCPIDRTSRNRCQHCRLQKCLALGMSRDAVKFGRMSKKQRDSLHAEVQKQLQQRQQQQQEPVVKTPPAGAQGADTLTYTLGLPDGQLPLGSSPDLPEASACPPGLLKASGSGPSYSNNLAKAGLNGASCHLEYSPERGKAEGRESFYSTGSQLTPDRCGLRFEEHRHPGLGELGQGPDSYGSPSFRSTPEAPYASLTEIEHLVQSVCKSYRETCQLRLEDLLRQRSNIFSREEVTGYQRKSMWEMWERCAHHLTEAIQYVVEFAKRLSGFMELCQNDQIVLLKAGAMEVVLVRMCRAYNADNRTVFFEGKYGGMELFRALGCSELISSIFDFSHSLSALHFSEDEIALYTALVLINAHRPGLQEKRKVEQLQYNLELAFHHHLCKTHRQSILAKLPPKGKLRSLCSQHVERLQIFQHLHPIVVQAAFPPLYKELFSTETESPVGLSK

SEQ ID NO: 60979 - protein, 497 aa, Homo sapiens
MRTQIEVIPCKICGDKSSGIHYGVITCEGCKGFFRRSQRCNAAYSCTRQQNCPIDRTSRNRCQHCRLQKCLALGMSRDAVKFGRMSKKQRDSLHAEVQKQLQQRQQQQQEPVVKTPPAGAQGADTLTYTLGLPDGQLPLGSSPDLPEASACPPGLLKASGSGPSYSNNLAKAGLNGASCHLEYSPERGKAEGRESFYSTGSQLTPDRCGLRFEEHRHPGLGELGQGPDSYGSPSFRSTPEAPYASLTEIEHLVQSVCKSYRETCQLRLEDLLRQRSNIFSREEVTGYQRKSMWEMWERCAHHLTEAIQYVVEFAKRLSGFMELCQNDQIVLLKAGAMEVVLVRMCRAYNADNRTVFFEGKYGGMELFRALGCSELISSIFDFSHSLSALHFSEDEIALYTALVLINAHRPGLQEKRKVEQLQYNLELAFHHHLCKTHRQSILAKLPPKGKLRSLCSQHVERLQIFQHLHPIVVQAAFPPLYKELFSTETESPVGLSK

SEQ ID NO: 60980 - protein, 572 aa, Homo sapiens
MWGTGPSAGKDRMSGRPWPHPWSKSGTPSEQDRRATGLVSCEHGGGKFEGQSHQAPGPPGGGRTGCLELLAAKKTHTSQIEVIPCKICGDKSSGIHYGVITCEGCKGFFRRSQRCNAAYSCTRQQNCPIDRTSRNRCQHCRLQKCLALGMSRDAVKFGRMSKKQRDSLHAEVQKQLQQRQQQQQEPVVKTPPAGAQGADTLTYTLGLPDGQLPLGSSPDLPEASACPPGLLKASGSGPSYSNNLAKAGLNGASCHLEYSPERGKAEGRESFYSTGSQLTPDRCGLRFEEHRHPGLGELGQGPDSYGSPSFRSTPEAPYASLTEIEHLVQSVCKSYRETCQLRLEDLLRQRSNIFSREEVTGYQRKSMWEMWERCAHHLTEAIQYVVEFAKRLSGFMELCQNDQIVLLKAGAMEVVLVRMCRAYNADNRTVFFEGKYGGMELFRALGCSELISSIFDFSHSLSALHFSEDEIALYTALVLINAHRPGLQEKRKVEQLQYNLELAFHHHLCKTHRQSILAKLPPKGKLRSLCSQHVERLQIFQHLHPIVVQAAFPPLYKELFSTETESPVGLSK

SEQ ID NO: 60981 - protein, 944 aa, Homo sapiens
MLDSFSQESTLPFREARKRTSFQPVQVWRNFTASQTTESPACSGASLGEMTAWTMGARGLDKRGSFFKLIDTIASEIGELKQEMVRTDVNLENGLEPAETHSMVRHKDGGYSEEEDVKTCARDSGYDSLSNRLSILDRLLHTHPIWLQLSLSEEEAAEVLQAQPPGIFLVHKSTKMQKKVLSLRLPCEFGAPLKEFAIKESTYTFSLEGSGISFADLFRLIAFYCISRDVLPFTLKLPYAISTAKSEAQLEELAQMGLNFWSSPADSKPPNLPPPHRPLSSDGVCPASLRQLCLINGVHSIKTRTPSELECSQTNGALCFINPLFLKVHSQDLSGGLKRPSTRTPNANGTERTRSPPPRPPPPAINSLHTSPRLARTETQTSMPETVNHNKHGNVALPGTKPTPIPPPRLKKQASFLEAEGGAKTLSGGRPGAGPELELGTAGSPGGAPPEAAPGDCTRAPPPSSESRPPCHGGRQRLSDMSISTSSSDSLEFDRSMPLFGYEADTNSSLEDYEGESDQETMAPPIKSKKKRSSSFVLPKLVKSQLQKVSGVFSSFMTPEKRMVRRIAELSRDKCTYFGCLVQDYVSFLQENKECHVSSTDMLQTIRQFMTQVKNYLSQSSELDPPIESLIPEDQIDVVLEKAMHKCILKPLKGHVEAMLKDFHMADGSWKQLKENLQLVRQRNPQELGVFAPTPDFVDVEKIKVKFMTMQKMYSPEKKVMLLLRVCKLIYTVMENNSGRMYGADDFLPVLTYVIAQCDMLELDTEIEYMMELLDPSLLHGEGGYYLTSAYGALSLIKNFQEEQAARLLSSETRDTLRQWHKRRTTNRTIPSVDDFQNYLRVAFQEVNSGCTGKTLLVRPYITTEDVCQICAEKFKVGDPEEYSLFLFVDETWQQLAEDTYPQKIKAELHSRPQPHIFHFVYKRIKNDPYGIIFQNGEEDLTTS

SEQ ID NO: 60982 - protein, 462 aa, Homo sapiens
MTAWTMGARGLDKRGSFFKLIDTIASEIGELKQEMVRTDVNLENGLEPAETHSMVRHKDGGYSEEEDVKTCARDSGYDSLSNRLSILDRLLHTHPIWLQLSLSEEEAAEVLQAQPPGIFLVHKSTKMQKKVLSLRLPCEFGAPLKEFAIKESTYNVVLEKAMHKCILKPLKGHVEAMLKDFHMADGSWKQLKENLQLVRQRNPQELGVFAPTPDFVDVEKIKVKFMTMQKMYSPEKKVMLLLRVCKLIYTVMENNSGRMYGADDFLPVLTYVIAQCDMLELDTEIEYMMELLDPSLLHGEGGYYLTSAYGALSLIKNFQEEQAARLLSSETRDTLRQWHKRRTTNRTIPSVDDFQNYLRVAFQEVNSGCTGKTLLVRPYITTEDVCQICAEKFKVGDPEEYSLFLFVDETWQQLAEDTYPQKIKAELHSRPQPHIFHFVYKRIKNDPYGIIFQNGEEDLTTS

SEQ ID NO: 60983 - protein, 238 aa, Homo sapiens
MSSGYSSLEEDAEDFFFTARTSFFRRAPQGKPRSGQQDVEKEKETHSYLSKEEIKEKVHKYNLAVTDKLKMTLNSNGIYTGFIKVQMELCKPPQTSPNSGKLSPSSNGCMNTLHISSTNTVGEVIEALLKKFLVTESPAKFALYKRCHREDQVYACKLSDREHPLYLRLVAGPRTDTLSFVLREHEIGEWEAFSLPELQNFLRILDKEEDEQLQNLKRRYTAYRQKLEEALREVWKPD

SEQ ID NO: 60984 - protein, 168 aa, Homo sapiens
MTLNSNGIYTGFIKVQMELCKPPQTSPNSGKLSPSSNGCMNTLHISSTNTVGEVIEALLKKFLVTESPAKFALYKRCHREDQVYACKLSDREHPLYLRLVAGPRTDTLSFVLREHEIGEWEAFSLPELQNFLRILDKEEDEQLQNLKRRYTAYRQKLEEALREVWKPD

SEQ ID NO: 60985 - protein, 238 aa, Homo sapiens; identical to SEQ ID NO: 60983

SEQ ID NO: 60986 - protein, 337 aa, Homo sapiens
MTMMAHQYPSWIFINEKTFITREQLNSLLKTYNIFYENQKNLHILYGETEDGKLIVEGMLDIFWGVKRPIQLKIQDEKPFSSFTSMKSSDVFSSKGMTRWGEFDDLYRISELDRTQIPMSEKRNSQEDYLSYHSNTLKPHAKDEPDSPVLYRTMSEAALVRKRMKPLMMDRKERQKNRASINGHFYNHETSIFIPAFESETKVRVNSNMRTEEVIKQLLQKFKIENSPQDFALHIIFATGEQRRLKKTDIPLLQRLLQGPSEKNARIFLMDKDAEEISSDVAQYINFHFSLLESILQRLNEEEKREIQRIVTKFNKEKAIILKCLQNKLVIKTETTV

SEQ ID NO: 60987 - protein, 325 aa, Homo sapiens
MLWEETGAAPAPARASDLPYRIHFLSSGLILVTRQLTEDGKLIVEGMLDIFWGVKRPIQLKIQDEKPFSSFTSMKSSDVFSSKGMTRWGEFDDLYRISELDRTQIPMSEKRNSQEDYLSYHSNTLKPHAKDEPDSPVLYRTMSEAALVRKRMKPLMMDRKERQKNRASINGHFYNHETSIFIPAFESETKVRVNSNMRTEEVIKQLLQKFKIENSPQDFALHIIFATGEQRRLKKTDIPLLQRLLQGPSEKNARIFLMDKDAEEISSDVAQYINFHFSLLESILQRLNEEEKREIQRIVTKFNKEKAIILKCLQNKLVIKTETTV

SEQ ID NO: 60988 - protein, 369 aa, Homo sapiens
MLWEETGAAPAPARASDLPYRISSDHLKKEEKMTMMAHQYPSWIFINEKTFITREQLNSLLKTYNIFYENQKNLHILYGETEDGKLIVEGMLDIFWGVKRPIQLKIQDEKPFSSFTSMKSSDVFSSKGMTRWGEFDDLYRISELDRTQIPMSEKRNSQEDYLSYHSNTLKPHAKDEPDSPVLYRTMSEAALVRKRMKPLMMDRKERQKNRASINGHFYNHETSIFIPAFESETKVRVNSNMRTEEVIKQLLQKFKIENSPQDFALHIIFATGEQRRLKKTDIPLLQRLLQGPSEKNARIFLMDKDAEEISSDVAQYINFHFSLLESILQRLNEEEKREIQRIVTKFNKEKAIILKCLQNKLVIKTETTV

SEQ ID NO: 60989 - protein, 303 aa, Homo sapiens
MTMMAHQYPSWIFINEKTFITREQLNSLLKTYNIFYENQKNLHILYGETEDGKLIVEGMLDIFWGVKRPIQLKIQDEKPFSSFTSMKSSDVFSSKGMTRWGEFDDLYRISELDRTQIPMSEKRNSQEDYLSYHSNTLKPHAKDEPDSPVLYRTMSEAALVRKRMKPLMMDRKERQKNRASINGHFYNHEIENSPQDFALHIIFATGEQRRLKKTDIPLLQRLLQGPSEKNARIFLMDKDAEEISSDVAQYINFHFSLLESILQRLNEEEKREIQRIVTKFNKEKAIILKCLQNKLVIKTETTV

SEQ ID NO: 60990 - protein, 1046 aa, Homo sapiens
MLSRTLSYKYRDLDSTFSSLGASDDPAELSTQLSAPGVLKVFGDSVCTGTHYKSVLATGTSSARELVKEALERYALDPRQAGQYVLCDVVGQAGDAGQRWQARCFRVFGDSEKPLLIQELWKPREGLSRRFELRKRSDVEELAAKEVDTITAGINAQARRLQRSRAKGTPTPALGDARSSPPPRLRRTVSETSLSPVNALPAAAQGPEEPGPDAMRYSLYQSPHLLLLQGYSQQHPGVCAQPGPAHGGPADPSKPSISLSAPDILPLHCTIRRQPLPDSGQAAGRLVLEPIPGAHISVNFSEVGHRTVVLHHGDLLSLGLYYLLLFKDPAQAQPLPARALARLRAVPQSCRLCGAALGARGAASPTQAALPRRQQLLLEFEPHLEDTLLQRIMTLIEPGGDDHKLTPAFLLCLCIQHSATHFQPGTFGQLLLKIARLIRETVWEKTKELAEKQAQLQEPISLASCAMADLVPDLQPILFWMSNSIELLYFIQQKCPLYMQSMEEQLDITGSKESLFSCTLTASEEAMAVLEEVVLYAFQQCVYYVSKSLYICLPALLECPPFQTERRESWSSAPELPEELRRVVSVYQAALDLLRQLQVHPEVASQMLAYLFFFSGTLLLNQLLDRGPSLSCFHWPRGVQACARLQQLLEWMRSAGFGAAGEHFFQKLSCTLNLLATPRAQLIQMSWTALRAAFPALSPAQLHRLLTHYQLASAMGPMSTWEPGAQDSPEAFRSEDVLESYENPPPIVLPSDGFQVDLEANCLDDSIYQHLLYVRHFLWGLRSRASPGSPGRPGSGASQPVCPEGMHHVVLDGHLEAPSCPLAPRDPGPAAREVAPERTLPLRGAPWAQAPPGRQPSRGGSQAGPPHTDSSCLLTPPSTPLGPEPGDPDWPESGGPCGKALPERQRNGLSGLRGAAPEGDSAALAEESPPAPSSRSSSTEDFCYVFTVELERGPSGLGMGLIDGMHTHLGAPGLYIQTLLPGSPAAADGRLSLGDRILEVNGSSLLGLGYLRAVDLIRHGGKKMRFLVAKSDVETAKKIHFRTPPL

SEQ ID NO: 60991 - protein, 1075 aa, Homo sapiens
MFYGTHFIMSPPTKSKLKRQSQLLSSMLSRTLSYKYRDLDSTFSSLGASDDPAELSTQLSAPGVLKVFGDSVCTGTHYKSVLATGTSSARELVKEALERYALDPRQAGQYVLCDVVGQAGDAGQRWQARCFRVFGDSEKPLLIQELWKPREGLSRRFELRKRSDVEELAAKEVDTITAGINAQARRLQRSRAKGTPTPALGDARSSPPPRLRRTVSETSLSPVNALPAAAQGPEEPGPDAMRYSLYQSPHLLLLQGYSQQHDSLVYVLNRDRHTVGQRTPSSKPSISLSAPDILPLHCTIRRQPLPDSGQAAGRLVLEPIPGAHISVNFSEVGHRTVVLHHGDLLSLGLYYLLLFKDPAQAQPLPARALARLRAVPQSCRLCGAALGARGAASPTQAALPRRQQLLLEFEPHLEDTLLQRIMTLIEPGGDDHKLTPAFLLCLCIQHSATHFQPGTFGQLLLKIARLIRETVWEKTKELAEKQAQLQEPISLASCAMADLVPDLQPILFWMSNSIELLYFIQQKCPLYMQSMEEQLDITGSKESLFSCTLTASEEAMAVLEEVVLYAFQQCVYYVSKSLYICLPALLECPPFQTERRESWSSAPELPEELRRVVSVYQAALDLLRQLQVHPEVASQMLAYLFFFSGTLLLNQLLDRGPSLSCFHWPRGVQACARLQQLLEWMRSAGFGAAGEHFFQKLSCTLNLLATPRAQLIQMSWTALRAAFPALSPAQLHRLLTHYQLASAMGPMSTWEPGAQDSPEAFRSEDVLESYENPPPIVLPSDGFQVDLEANCLDDSIYQHLLYVRHFLWGLRSRASPGSPGRPGSGASQPVCPEGMHHVVLDGHLEAPSCPLAPRDPGPAAREVAPERTLPLRGAPWAQAPPGRQPSRGGSQAGPPHTDSSCLLTPPSTPLGPEPGDPDWPESGGPCGKALPERQRNGLSGLRGAAPEGDSAALAEESPPAPSSRSSSTEDFCYVFTVELERGPSGLGMGLIDGMHTHLGAPGLYIQTLLPGSPAAADGRLSLGDRILEVNGSSLLGLGYLRAVDLIRHGGKKMRFLVAKSDVETAKKIHFRTPPL

SEQ ID NO: 60992 - protein, 134 aa, Homo sapiens
MFYGTHFIMSPPTKSKLKRQSQLLSSMLSRTLSYKYRDLDSTFSSLGASDDPAELSTQLSAPGVLKVFGDSVCTGTHYKSVLATGTSSARELVKEALERYALDPRQAGQYVLCDVVGQAGDAGQRWQARCFRVF

SEQ ID NO: 60993 - protein, 542 aa, Homo sapiens
MFYGTHFIMSPPTKSKLKRQSQLLSSMLSRTLSYKYRDLDSTFSSLGASDDPAELSTQLSAPGVLKVFGDSVCTGTHYKSVLATGTSSARELVKEALERYALDPRQAGQYVLCDVVGQAGDAGQRWQARCFRVFGDSEKPLLIQELWKPREGLSRRFELRKRSDVEELAAKEVDTITAGINAQARRLQRSRAKGTPTPALGDARSSPPPRLRRTVSETSLSPVNALPAAAQGPEEPGPDAMRYSLYQSPHLLLLQGYSQQHDSLVYVLNRDRHTVGQRTPSSKPSISLSAPDILPLHCTIRRQPLPDSGQAAGRLVLEPIPGAHISVNFSEVGHRTVVLHHGDLLSLGLYYLLLFKDPAQAQPLPARALARLRAVPQSCRLCGAALGARGAASPTQAALPRRQQLLLEFEPHLEDTLLQRIMTLIEPGGDDHKLTPAFLLCLCIQHSATHFQPGTFGQLLLKIARLIRETVWEKTKELAEKQAQLLEGIAVLLHADGQRGGHGGAGGGGAVRLPAVRLLCLQVPVHLPPGTPGVPAIPDGAP

SEQ ID NO: 60994 - protein, 835 aa, Homo sapiens
MRYSLYQSPHLLLLQGYSQQHDSLVYVLNRDRHTVGQRTPSSKPSISLSAPDILPLHCTIRRQPLPDSGQAAGRLVLEPIPGAHISVNFSEVGHRTVVLHHGDLLSLGLYYLLLFKDPAQAQPLPARALARLRAVPQSCRLCGAALGARGAASPTQAALPRRQQLLLEFEPHLEDTLLQRIMTLIEPGGDDHKLTPAFLLCLCIQHSATHFQPGTFGQLLLKIARLIRETVWEKTKELAEKQAQLQEPISLASCAMADLVPDLQPILFWMSNSIELLYFIQQKCPLYMQSMEEQLDITGSKESLFSCTLTASEEAMAVLEEVVLYAFQQCVYYVSKSLYICLPALLECPPFQTERRESWSSAPELPEELRRVVSVYQAALDLLRQLQVHPEVASQMLAYLFFFSGTLLLNQLLDRGPSLSCFHWPRGVQACARLQQLLEWMRSAGFGAAGEHFFQKLSCTLNLLATPRAQLIQMSWTALRAAFPALSPAQLHRLLTHYQLASAMGPMSTWEPGAQDSPEAFRSEDVLESYENPPPIVLPSDGFQVDLEANCLDDSIYQHLLYVRHFLWGLRSRASPGSPGRPGSGASQPVCPEGMHHVVLDGHLEAPSCPLAPRDPGPAAREVAPERTLPLRGAPWAQAPPGRQPSRGGSQAGPPHTDSSCLLTPPSTPLGPEPGDPDWPESGGPCGKALPERQRNGLSGLRGAAPEGDSAALAEESPPAPSSRSSSTEDFCYVFTVELERGPSGLGMGLIDGMHTHLGAPGLYIQTLLPGSPAAADGRLSLGDRILEVNGSSLLGLGYLRAVDLIRHGGKKMRFLVAKSDVETAKKIHFRTPPL

SEQ ID NO: 60995 - protein, 694 aa, Homo sapiens
MCSTGTGTRWASGPPPASPASASQPPTSCLYTAPSAGNRSRTAARPRGGWLEPIPGAHISVNFSEVGHRTVVLHHGDLLSLGLYYLLLFKDPAQAQPLPARALARLRAVPQSCRLCGAALGARGAASPTQAALPRRQQLLLEFEPHLEDTLLQRIMTLIEPGGDDHKLTPAFLLCLCIQHSATHFQPGTFGQLLLKIARLIRETVWEKTKELAEKQAQLQEPISLASCAMADLVPDLQPILFWMSNSIELLYFIQQKCPLYMQSMEEQLDITGSKESLFSCTLTASEEAMAVLEEVVLYAFQQCVYYVSKSLYICLPALLECPPFQTERRESWSSAPELPEELRRVVSVYQAALDLLRQLQVHPEVASQMLAYLFFFSGTLLLNQLLDRGPSLSCFHWPRGVQACARLQQLLEWMRSAGFGAAGEHFFQKLSCTLNLLATPRAQLIQMSWTALRAAFPALSPAQLHRLLTHYQLASAMGPMSTWEPGAQDSPEAFRSEDVLESYENPPPIVLPSDGFQVDLEANCLDDSIYQHLLYVRHFLWGLRSRASPGSPGRPGSGASQPVCPEGMHHVVLDGHLEAPSCPLAPRDPGPAAREVAPERTLPLRGAPWAQAPPGRQPPGLYIQTLLPGSPAAADGRLSLGDRILEVNGSSLLGLGYLRAVDLIRHGGKKMRFLVAKSDVETAKKIHFRTPPL

SEQ ID NO: 60996 - protein, 122 aa, Homo sapiens
MKLAAMIKKMCPSDSELSIPAKNCYRMVILGSSKVGKTAIVSRFLTGRFEDAYTPTIEDFHRKFYSIRGEVYQLDILDTSGNHPFPAMRRLSILTDPRHQVLPQEQNQGERGRAPGHLRQQG

SEQ ID NO: 60997 - protein, 797 aa, Homo sapiens
MGTLGKAREAPRKPSHGCRAASKARLEAKPANSPFPSHPSLAHITQFRMMVSLGHLAKGASLDDLIDSCIQSFDADGNLCRSNQLLQVMLTMHRIVISSAELLQKVITLYKDALAKNSPGLCLKICYFVRYWITEFWVMFKMDASLTDTMEEFQELVKAKGEELHCRLIDTTQINARDWSRKLTQRIKSNTSKKRKVSLLFDHLEPEELSEHLTYLEFKSFRRISFSDYQNYLVNSCVKENPTMERSIALCNGISQWVQLMVLSRPTPQLRAEVFIKFIQVAQKLHQLQNFNTLMAVIGGLCHSSISRLKETSSHVPHEINKVLGEMTELLSSSRNYDNYRRAYGECTDFKIPILGVHLKDLISLYEAMPDYLEDGKVNVHKLLALYNHISELVQLQEVAPPLEANKDLVHLLTLSLDLYYTEDEIYELSYAREPRNHRAPPLTPSKPPVVVDWASGVSPKPDPKTISKHVQRMVDSVFKNYDHDQDGYISQEEFEKIAASFPFSFCVMDKDREGLISRDEITAYFMRASSIYSKLGLGFPHNFQETTYLKPTFCDNCAGFLWGVIKQGYRCKDCGMNCHKQCKDLVVFECKKRAKNPVAPTENNTSVGPVSNLCSLGAKDLLHAPEEGPFTFPNGEAVEHGEESKDRTIMLMGVSSQKISLRLKRAVAHKATQTESQPWIGSEGPSGPFVLSSPRKTAQDTLYVLPSPTSPCPSPVLVRKRAFVKWENKDSLIKSKEELRHLRLPTYQELEQEINTLKADNDALKIQLKYAQKKIESLQLEKSNHVLAQMEQGDCS

SEQ ID NO: 60998 - protein, 597 aa, Homo sapiens
MGTLGKAREAPRKPSHGCRAASKARLEAKPANSPFPSHPSLAHITQFRMMVSLGHLAKGASLDDLIDSCIQSFDADGNLCRSNQLLQVMLTMHRIVISSAELLQKVITLYPDALAKNSPGLCLKICYFVRYWITEFWVMFKMDASLTDTMEEFQELVKAKGEELHCRLIDTTQINARDWSRKLTQRIKSNTSKKRKVSLLFDHLEPEELSEHLTYLEFKSFRRISFSDYQNYLVNSCVKENPTMERSIALCNGISQWVQLMVLSRPTPQLRAEVFIKFIQVAQKLHQLQNFNTLMAVIGGLCHSSISRLKETSSHVPHEINKVLGEMTELLSSSRNYDNYRRAYGECTDFKIPILGVHLKDLISLYEAMPDYLEDGKVNVHKLLALYNHISELVQLQEVAPPLEANKDLVHLLTLSLDLYYTEDEIYELSYAREPRNHRAPSVFKNYDHDQDGYISQEEFEKIAASFPFSFCVMDKDREGLISRDEITAYFMRASSIYSKLGLGFPHNFQETTYLKPTFCDNCAGFLWGVIKQGYRCKDCGMNCHKQCKDLVVFECKKRAKNPVAPTENNTSVGPVSNLCSLGAKDLLHGNKYSESR

SEQ ID NO: 60999 - protein, 546 aa, Homo sapiens
MGTLGKAREAPRKPSHGCRAASKARLEAKPANSPFPSHPSLAHITQFRMMVSLGHLAKGASLDDLIDSCIQSFDADGNLCRSNQLLQVMLTMHRIVISSAELLQKVITLYPDALAKNSPGLCLKICYFVRYWITEFWVMFKMDASLTDTMEEFQELVKAKGEELHCRLIDTTQINARDWSRKLTQRIKSNTSKKRKVSLLFDHLEPEELSEHLTYLEFKSFRRISFSDYQNYLVNSCVKENPTMERSIALCNGISQWVQLMVLSRPTPQLRAEVFIKFIQVAQKLHQLQNFNTLMAVIGGLCHSSISRLKETSSHVPHEINKVLGEMTELLSSSRNYDNYRRAYGECTDFKIPILGVHLKDLISLYEAMPDYLEDGKVNVHKLLALYNHISELVQLQEVAPPLEANKDLVHLLTLSLDLYYTEDEIYELSYAREPRNHRAPSVFKNYDHDQDGYISQEEFEKIAASFPFSFCVMDKDREGLISRDEITAYFMRASSIYSKLGLGFPHNFQETTYLKPTFCDNCAGFLWGVIKQGYRCKGNKYSESR

SEQ ID NO: 61000 - protein, 762 aa, Homo sapiens
MGTLGKAREAPRKPSHGCRAASKARLEAKPANSPFPSHPSLAHITQFRMMVSLGHLAKGASLDDLIDSCIQSFDADGNLCRSNQLLQVMLTMHRIVISSAELLQKVITLYKDALAKNSPGLCLKICYFVRYWITEFWVMFKMDASLTDTMEEFQELVKAKGEELHCRLIDTTQINARDWSRKLTQRIKSNTSKKRKVSLLFDHLEPEELSEHLTYLEFKSFRRISFSDYQNYLVNSCVKENPTMERSIALCNGISQWVQLMVLSRPTPQLRAEVFIKFIQVAQKLHQLQNFNTLMAVIGGLCHSSISRLKETSSHVPHEINKVLGEMTELLSSSRNYDNYRRAYGECTDFKIPILGVHLKDLISLYEAMPDYLEDGKVNVHKLLALYNHISELVQLQEVAPPLEANKDLVHLLTLSLDLYYTEDEIYELSYAREPRNHRAPSVFKNYDHDQDGYISQEEFEKIAASFPFSFCVMDKDREGLISRDEITAYFMRASSIYSKLGLGFPHNFQETTYLKPTFCDNCAGFLWGVIKQGYRCKDCGMNCHKQCKDLVVFECKKRAKNPVAPTENNTSVGPVSNLCSLGAKDLLHAPEEGPFTFPNGEAVEHGEESKDRTIMLMGVSSQKISLRLKRAVAHKATQTESQPWIGSEGPSGPFVLSSPRKTAQDTLYVLPSPTSPCPSPVLVRKRAFVKWENKDSLIKSKEELRHLRLPTYQELEQEINTLKADNDALKIQLKYAQKKIESLQLEKSNHVLAQMEQGDCS

SEQ ID NO: 61001 - protein, 749 aa, Homo sapiens
MMVSLGHLAKGASLDDLIDSCIQSFDADGNLCRSNQLLQVMLTMHRIVISSAELLQKVITLYKDALAKNSPGLCLKICYFVRYWITEFWVMFKMDASLTDTMEEFQELVKAKGEELHCRLIDTTQINARDWSRKLTQRIKSNTSKKRKVSLLFDHLEPEELSEHLTYLEFKSFRRISFSDYQNYLVNSCVKENPTMERSIALCNGISQWVQLMVLSRPTPQLRAEVFIKFIQVAQKLHQLQNFNTLMAVIGGLCHSSISRLKETSSHVPHEINKVLGEMTELLSSSRNYDNYRRAYGECTDFKIPILGVHLKDLISLYEAMPDYLEDGKVNVHKLLALYNHISELVQLQEVAPPLEANKDLVHLLTLSLDLYYTEDEIYELSYAREPRNHRAPPLTPSKPPVVVDWASGVSPKPDPKTISKHVQRMVDSVFKNYDHDQDGYISQEEFEKIAASFPFSFCVMDKDREGLISRDEITAYFMRASSIYSKLGLGFPHNFQETTYLKPTFCDNCAGFLWGVIKQGYRCKDCGMNCHKQCKDLVVFECKKRAKNPVAPTENNTSVGPVSNLCSLGAKDLLHAPEEGPFTFPNGEAVEHGEESKDRTIMLMGVSSQKISLRLKRAVAHKATQTESQPWIGSEGPSGPFVLSSPRKTAQDTLYVLPSPTSPCPSPVLVRKRAFVKWENKDSLIKSKEELRHLRLPTYQELEQEINTLKADNDALKIQLKYAQKKIESLQLEKSNHVLAQMEQGDCS

SEQ ID NO: 61002 - protein, 481 aa, Homo sapiens
MGTLGKAREAPRKPSHGCRAASKARLEAKPANSPFPSHPSLAHITQFRMMVSLGHLAKGASLDDLIDSCIQSFDADGNLCRSNQLLQVMLTMHRIVISSAELLQKVITLYPDALAKNSPGLCLKICYFVRYWITEFWVMFKMDASLTDTMEEFQELVKAKGEELHCRLIDTTQINARDWSRKLTQRIKSNTSKKRKVSLLFDHLEPEELSEHLTYLEFKSFRRISFSDYQNYLVNSCVKENPTMERSIALCNGISQWVQLMVLSRPTPQLRAEVFIKFIQVAQKLHQLQNFNTLMAVIGGLCHSSISRLKETSSHVPHEINKVLGEMTELLSSSRNYDNYRRAYGECTDFKIPILGVHLKDLISLYEAMPDYLEDGKVNVHKLLALYNHISELVQLQEVAPPLEANKDLVHLLTLSLDLYYTEDEIYELSYAREPRNHRAPSVFKNYDHDQDGYISQEEFEKIAASFPFSFCVMDKDRSGA

SEQ ID NO: 61003 - protein, 546 aa, Homo sapiens
MGTLGKAREAPRKPSHGCRAASKARLEAKPANSPFPSHPSLAHITQFRMMVSLGHLAKGASLDDLIDSCIQSFDADGNLCRSNQLLQVMLTMHRIVISSAELLQKVITLYKDALAKNSPGLCLKICYFVRYWITEFWVMFKMDASLTDTMEEFQELVKAKGEELHCRLIDTTQINARDWSRKLTQRIKSNTSKKRKVSLLFDHLEPEELSEHLTYLEFKSFRRISFSDYQNYLVNSCVKENPTMERSIALCNGISQWVQLMVLSRPTPQLRAEVFIKFIQVAQKLHQLQNFNTLMAVIGGLCHSSISRLKETSSHVPHEINKVLGEMTELLSSSRNYDNYRRAYGECTDFKIPILGVHLKDLISLYEAMPDYLEDGKVNVHKLLALYNHISELVQLQEVAPPLEANKDLVHLLTLSLDLYYTEDEIYELSYAREPRNHRAPSVFKNYDHDQDGYISQEEFEKIAASFPFSFCVMDKDREGLISRDEITAYFMRASSIYSKLGLGFPHNFQETTYLKPTFCDNCAGFLWGVIKQGYRCKGNKYSESR

SEQ ID NO: 61004 - protein, 597 aa, Homo sapiens
MGTLGKAREAPRKPSHGCRAASKARLEAKPANSPFPSHPSLAHITQFRMMVSLGHLAKGASLDDLIDSCIQSFDADGNLCRSNQLLQVMLTMHRIVISSAELLQKVITLYKDALAKNSPGLCLKICYFVRYWITEFWVMFKMDASLTDTMEEFQELVKAKGEELHCRLIDTTQINARDWSRKLTQRIKSNTSKKRKVSLLFDHLEPEELSEHLTYLEFKSFRRISFSDYQNYLVNSCVKENPTMERSIALCNGISQWVQLMVLSRPTPQLRAEVFIKFIQVAQKLHQLQNFNTLMAVIGGLCHSSISRLKETSSHVPHEINKVLGEMTELLSSSRNYDNYRRAYGECTDFKIPILGVHLKDLISLYEAMPDYLEDGKVNVHKLLALYNHISELVQLQEVAPPLEANKDLVHLLTLSLDLYYTEDEIYELSYAREPRNHRAPSVFKNYDHDQDGYISQEEFEKIAASFPFSFCVMDKDREGLISRDEITAYFMRASSIYSKLGLGFPHNFQETTYLKPTFCDNCAGFLWGVIKQGYRCKDCGMNCHKQCKDLVVFECKKRAKNPVAPTENNTSVGPVSNLCSLGAKDLLHGNKYSESR

SEQ ID NO: 61005 - protein, 609 aa, Homo sapiens
MAGTLDLDKGCTVEELLRGCIEAFDDSGKVRDPQLVRMFLMMHPWYIPSSQLAAKLLHIYQQSRKDNSNSLQVKTCHLVRYWISAFPAEFDLNPELAEQIKELKALLDQEGNRRHSSLIDIDSVPTYKWKRQVTQRNPVGQKKRKMSLLFDHLEPMELAEHLTYLEYRSFCKILFQDYHSFVTHGCTVDNPVLERFISLFNSVSQWVQLMILSKPTAPQRALVITHFVHVAEKLLQLQNFNTLMAVVGGLSHSSISRLKETHSHVSPETIKLWEGLTELVTATGNYGNYRRRLAACVGFRFPILGVHLKDLVALQLALPDWLDPARTRLNGAKMKQLFSILEELAMVTSLRPPVQANPDLLSLLTVSLDQYQTEDELYQLSLQREPRSKSSPTSPTSCTPPPRPPVLEEWTSAAKPKLDQALVVEHIEKMVESVFRNFDVDGDGHISQEEFQIIRGNFPYLSAFGDLDQNQDGCISREEMVSYFLRSSSVLGGRMGFVHNFQESNSLRPVACRHCKALILGIYKQGLKCRACGVNCHKQCKDRLSVECRRRAQSVSLEGSAPSPSPMHSHHHRAFSFSLPRPGRRGSRPPEIREEEVQTVEDGVFDIHL

SEQ ID NO: 61006 - protein, 610 aa, Homo sapiens
MAGTLDLDKGCTVEELLRGCIEAFDDSGKVRDPQLVRMFLMMHPWYIPSSQLAAKLLHIYQQSRKDNSNSLQVKTCHLVRYWISAFPAEFDLNPELAEQIKELKALLDQEGNRRHSSLIDIDSVPTYKWKRQVTQRNPVGQKKRKMSLLFDHLEPMELAEHLTYLEYRSFCKILFQDYHSFVTHGCTVDNPVLERFISLFNSVSQWVQLMILSKPTAPQRALVITHFVHVAEKLLQLQNFNTLMAVVGGLSHSSISRLKETHSHVSPETIKLWEGLTELVTATGNYGNYRRRLAACVGFRFPILGVHLKDLVALQLALPDWLDPARTRLNGAKMKQLFSILEELAMVTSLRPPVQANPDLLSLLTVSLDQYQTEDELYQLSLQREPRSKSSPTSPTSCTPPPRPPVLEEWTSAAKPKLDQALVVEHIEKMVESVFRNFDVDGDGHISQEEFQIIRGNFPYLSAFGDLDQNQDGCISREEMVSYFLRSSSVLGGRMGFVHNFQESNSLRPVACRHCKALILGIYKQGLKCRACGVNCHKQCKDRLSVECRRRAQSVSLEGSAPSPSPMHSHHHRAFSFSLPRPGRRGSRPPAEIREEEVQTVEDGVFDIHL

SEQ ID NO: 61007 - protein, 609 aa, Homo sapiens; identical to SEQ ID NO: 61005

SEQ ID NO: 61008 - protein, 609 aa, Homo sapiens; identical to SEQ ID NO: 61005

SEQ ID NO: 61009 - protein, 143 aa, Homo sapiens
MAGTLDLDKGCTVEELLRGCIEAFDDSGKVRDPQLVRMFLMMHPWYIPSSQLAAKLLHIYQQSRKDNSNSLQVKTCHLVRYWISAFPAEFDLNPELAEQIKELKALLDQEGNRRHSSLIDIDSVCVGEHRGLGGHSVSYTICA

SEQ ID NO: 61010 - protein, 576 aa, Homo sapiens
MNRKDSKRKSHQECTGKIGGRGRPRQVRRHKTCPSPREISKVMASMNLGLLSEGGCSEDELLEKCIQSFDSAGSLCHEDHMLNMVLAMHSWVLPSADLAARLLTSYQKATGDTQELRRLQICHLVRYWLMRHPEVMHQDPQLEEVIGRFWATVAREGNSAQRRLGDSSDLLSPGGPGPPLPMSSPGLGKKRKVSLLFDHLETGELAQHLTYLEFRSFQAITALLELTELLASHNNYARYRRTWAGCAGFRLPVLGVHLKDLVSLHEAQPDRLPDGRLHLPKLNNLYLRLQELVALQGQHPPCSANEDLLHLLTLSLDLFYTEDEIYELSYAREPRCPKSLPPSPFNAPLVVEWAPGVTPKPDRVTLGRHVEQLVESVFKNYDPEGRGTISQEDFERLSGNFPFACHGLHPPPRQGRGSFSREELTGYLLRASAICSKLGLAFLHTFHEVTFRKPTFCDSCSGFLWGVTKQGYRCRECGLCCHKHCRDQVKVECKKRPGAKGDAGPPGAPVPSTPAPHASCGSEENHSYTLSLEPETGCQLRHAWTQTESPHPSWETDTVPCPVMDPPSTASSKLDS

SEQ ID NO: 61011 - protein, 617 aa, Homo sapiens
MNRKDSKRKSHQECTGKIGGRGRPRQVRRHKTCPSPREISKVMASMNLGLLSEGGCSEDELLEKCIQSFDSAGSLCHEDHMLNMVLAMHSWVLPSADLAARLLTSYQKATGDTQELRRLQICHLVRYWLMRHPEVMHQDPQLEEVIGRFWATVAREGNSAQRRLGDSSDLLSPGGPGPPLPMSSPGLGKKRKVSLLFDHLETGELAQHLTYLEFRSFQAITPQDLRSYVLQGSVRGCPALEGSVGLSNSVSRWVQVMVLSRPGPLQRAQVLDKFIHVAQRLHQLQNFNTLMAVTGGLCHSAISRLKDSHAHLSPDSTKALLELTELLASHNNYARYRRTWAGCAGFRLPVLGVHLKDLVSLHEAQPDRLPDGRLHLPKLNNLYLRLQELVALQGQHPPCSANEDLLHLLTLSLDLFYTEDEIYELSYAREPRCPKSLPPSPFNAPLVVEWAPGVTPKPDRVTLGRHVEQLVESVFKNYDPEGRGTISQEDFERLSGNFPFACHGLHPPPRQGRGSFSREELTGYLLRASAICSKLGLAFLHTFHEVTFRKPTFCDSCSGFLWGVTKQGYRCRGEWGVSEWEGSLGPQAGRMDDTDRTPAAAFPQSAGCVATNTAETR

SEQ ID NO: 61012 - protein, 484 aa, Homo sapiens
MNRKDSKRKSHQECTGKIGGRGRPRQVRRHKTCPSPREISKVMASMNLGLLSEGGCSEDELLEKCIQSFDSAGSLCHEDHMLNMVLAMHSWVLPSADLAARLLTSYQKATGDTQELRRLQICHLVRYWLMRHPEVMHQDPQLEEVIGRFWATVAREGNSAQRRLGDSSDLLSPGGPGPPLPMSSPGLGKKRKVSLLFDHLETGELAQHLTYLEFRSFQAITLSLDLFYTEDEIYELSYAREPRCPKSLPPSPFNAPLVVEWAPGVTPKPDRVTLGRHVEQLVESVFKNYDPEGRGTISQEDFERLSGNFPFACHGLHPPPRQGRGSFSREELTGYLLRASAICSKLGLAFLHTFHEVTFRKPTFCDSCSGFLWGVTKQGYRCRECGLCCHKHCRDQVKVECKKRPGAKGDAGPPGAPVPSTPAPHASCGSEENHSYTLSLEPETGCQLRHAWTQTESPHPSWETDTVPCPVMDPPSTASSKLDS

SEQ ID NO: 61013 - protein, 581 aa, Homo sapiens
MNRKDSKRKSHQECTGKIGGRGRPRQVRRHKTCPSPREISKVMASMNLGLLSEGGCSEDELLEKCIQSFDSAGSLCHEDHMLNMVLAMHSWVLPSADLAARLLTSYQKATGDTQELRRLQICHLVRYWLMRHPEVMHQDPQLEEVIGRFWATVAREGNSAQRRLGDSSDLLSPGGPGPPLPMSSPGLGKKRKVSLLFDHLETGELAQHLTYLEFRSFQAITPQDLRSYVLQGSVRGCPALEGSVGLSNSVSRWVQVMVLSRPGPLQRAQVLDKFIHVAQRLHQLQNFNTLMAVTGGLCHSAISRLKDSHAHLSPDSTKLSLDLFYTEDEIYELSYAREPRCPKSLPPSPFNAPLVVEWAPGVTPKPDRVTLGRHVEQLVESVFKNYDPEGRGTISQEDFERLSGNFPFACHGLHPPPRQGRGSFSREELTGYLLRASAICSKLGLAFLHTFHEVTFRKPTFCDSCSGFLWGVTKQGYRCRECGLCCHKHCRDQVKVECKKRPGAKGDAGPPGAPVPSTPAPHASCGSEENHSYTLSLEPETGCQLRHAWTQTESPHPSWETDTVPCPVMDPPSTASSKLDS

SEQ ID NO: 61014 - protein, 673 aa, Homo sapiens
MNRKDSKRKSHQECTGKIGGRGRPRQVRRHKTCPSPREISKVMASMNLGLLSEGGCSEDELLEKCIQSFDSAGSLCHEDHMLNMVLAMHSWVLPSADLAARLLTSYQKATGDTQELRRLQICHLVRYWLMRHPEVMHQDPQLEEVIGRFWATVAREGNSAQRRLGDSSDLLSPGGPGPPLPMSSPGLGKKRKVSLLFDHLETGELAQHLTYLEFRSFQAITPQDLRSYVLQGSVRGCPALEGSVGLSNSVSRWVQVMVLSRPGPLQRAQVLDKFIHVAQRLHQLQNFNTLMAVTGGLCHSAISRLKDSHAHLSPDSTKALLELTELLASHNNYARYRRTWAGCAGFRLPVLGVHLKDLVSLHEAQPDRLPDGRLHLPKLNNLYLRLQELVALQGQHPPCSANEDLLHLLTLSLDLFYTEDEIYELSYAREPRCPKSLPPSPFNAPLVVEWAPGVTPKPDRVTLGRHVEQLVESVFKNYDPEGRGTISQEDFERLSGNFPFACHGLHPPPRQGRGSFSREELTGYLLRASAICSKLGLAFLHTFHEVTFRKPTFCDSCSGFLWGVTKQGYRCRECGLCCHKHCRDQVKVECKKRPGAKGDAGPPGAPVPSTPAPHASCGSEENHSYTLSLEPETGCQLRHAWTQTESPHPSWETDTVPCPVMDPPSTASSKLDS

SEQ ID NO: 61015 - protein, 659 aa, Homo sapiens
MNRKDSKRKSHQECTGKIGGRGRPRQVRRHKTCPSPREISKVMASMNLGLLSEGGCSEDELLEKCIQSFDSAGSLCHEDHMLNMVLAMHSWVLPSADLAARLLTSYQKATGDTQELRRLQICHLVRYWLMRHPEVMHQDPQLEEVIGRFWATVAREGNSAQRRLGDSSDLPGLGKKRKVSLLFDHLETGELAQHLTYLEFRSFQAITPQDLRSYVLQGSVRGCPALEGSVGLSNSVSRWVQVMVLSRPGPLQRAQVLDKFIHVAQRLHQLQNFNTLMAVTGGLCHSAISRLKDSHAHLSPDSTKALLELTELLASHNNYARYRRTWAGCAGFRLPVLGVHLKDLVSLHEAQPDRLPDGRLHLPKLNNLYLRLQELVALQGQHPPCSANEDLLHLLTLSLDLFYTEDEIYELSYAREPRCPKSLPPSPFNAPLVVEWAPGVTPKPDRVTLGRHVEQLVESVFKNYDPEGRGTISQEDFERLSGNFPFACHGLHPPPRQGRGSFSREELTGYLLRASAICSKLGLAFLHTFHEVTFRKPTFCDSCSGFLWGVTKQGYRCRECGLCCHKHCRDQVKVECKKRPGAKGDAGPPGAPVPSTPAPHASCGSEENHSYTLSLEPETGCQLRHAWTQTESPHPSWETDTVPCPVMDPPSTASSKLDS

SEQ ID NO: 61016 - protein, 604 aa, Homo sapiens
MNRKDSKRKSHQECTGKIGGRGRPRQVRRHKTCPSPREISKVMASMNLGLLSEGGCSEDELLEKCIQSFDSAGSLCHEDHMLNMVLAMHSWVLPSADLAARLLTSYQKATGDTQELRRLQICHLVRYWLMRHPEVMHQDPQLEEVIGRFWATVAREGNSAQRRLGDSSDLLSPGGPGPPLPMSSPGLGKKRKVSLLFDHLETGELAQHLTYLEFRSFQAITPQDLRSYVLQGSVRGCPALEGSVGLSNSVSRWVQVMVLSRPGPLQRAQVLDKFIHVAQRLHQLQNFNTLMAVTGGLCHSAISRLKDSHAHLSPDSTKELVALQGQHPPCSANEDLLHLLTLSLDLFYTEDEIYELSYAREPRCPKSLPPSPFNAPLVVEWAPGVTPKPDRVTLGRHVEQLVESVFKNYDPEGRGTISQEDFERLSGNFPFACHGLHPPPRQGRGSFSREELTGYLLRASAICSKLGLAFLHTFHEVTFRKPTFCDSCSGFLWGVTKQGYRCRECGLCCHKHCRDQVKVECKKRPGAKGDAGPPGAPVPSTPAPHASCGSEENHSYTLSLEPETGCQLRHAWTQTESPHPSWETDTVPCPVMDPPSTASSKLDS

SEQ ID NO: 61017 - protein, 618 aa, Homo sapiens
MKKDVRILLVGEPRVGKTSLIMSLVSEEFPEEVPPRAEEITIPADVTPERVPTHIVDYSEAEQSDEQLHQEISQANVICIVYAVNNKHSIDKVTSRWIPLINERTDKDSRLPLILVGNKSDLVEYSSMETILPIMNQYTEIETCVECSAKNLKNISELFYYAQKAVLHPTGPLYCPEEKEMKPACIKALTRIFKISDQDNDGTLNDAELNFFQRICFNTPLAPQALEDVKNVVRKHISDGVADSGLTLKGFLFLHTLFIQRGRHETTWTVLRRFGYDDDLDLTPEYLFPLLKIPPDCTTELNHHAYLFLQSTFDKHDLDRDCALSPDELKDLFKVFPYIPWGPDVNNTVCTNERGWITYQGFLSQWTLTTYLDVQRCLEYLGYLGYSILTEQESQASAVTVTRDKKIDLQKKQTQRNVFRCNVIGVKNCGKSGVLQALLGRNLMRQKKIREDHKSYYAINTVYVYGQEKYLLLHDISESEFLTEAEIICDVVCLVYDVSNPKSFEYCARIFKQHFMDSRIPCLIVAAKSDLHEVKQEYSISPTDFCRKHKMPPPQAFTCNTADAPSKDIFVKLTTMAMYPHVTQADLKSSTFWLRASFGATVFAVLGFAMYKALLKQR

SEQ ID NO: 61018 - protein, 659 aa, Homo sapiens
MKKDVRILLVGEPRVGKTSLIMSLVSEEFPEEVPPRAEEITIPADVTPERVPTHIVDYSEAEQSDEQLHQEISQANVICIVYAVNNKHSIDKVTSRWIPLINERTDKDSRLPLILVGNKSDLVEYSSMETILPIMNQYTEIETCVECSAKNLKNISELFYYAQKAVLHPTGPLYCPEEKEMKPACIKALTRIFKISDQDNDGTLNDAELNFFQRICFNTPLAPQALEDVKNVVRKHISDGVADSGLTLKGFLFLHTLFIQRGRHETTWTVLRRFGYDDDLDLTPEYLFPLLKIPPDCTTELNHHAYLFLQSTFDKHDLDRDCALSPDELKDLFKVFPYIPWGPDVNNTVCTNERGWITYQGFLSQWTLTTYLDVQRCLEYLGYLGYSILTEQESQASAVTVTRDKKIDLQKKQTQRNVFRCNVIGVKNCGKSGVLQALLGRNLMRQKKIREDHKSYYAINTVYVYGQEKYLLLHDISESEFLTEAEIICDVVCLVYDVSNPKSFEYCARIFKQHFMDSRIPCLIVAAKSDLHEVKQEYSISPTDFCRKHKMPPPQAFTCNTADAPSKDIFVKLTTMAMYPHARLRCMCTCNRCTFCICQNFLNSDLLQSVKNKIFTAVLNRHVTQADLKSSTFWLRASFGATVFAVLGFAMYKALLKQR

SEQ ID NO: 61019 - protein, 691 aa, Homo sapiens
MKKDVRILLVGEPRVGKTSLIMSLVSEEFPEEVPPRAEEITIPADVTPERVPTHIVDYSEAEQSDEQLHQEISQANVICIVYAVNNKHSIDKVTSRWIPLINERTDKDSRLPLILVGNKSDLVEYSSMETILPIMNQYTEIETCVECSAKNLKNISELFYYAQKAVLHPTGPLYCPEEKEMKPACIKALTRIFKISDQDNDGTLNDAELNFFQRICFNTPLAPQALEDVKNVVRKHISDGVADSGLTLKGFLFLHTLFIQRGRHETTWTVLRRFGYDDDLDLTPEYLFPLLKIPPDCTTELNHHAYLFLQSTFDKHDLDRDCALSPDELKDLFKVFPYIPWGPDVNNTVCTNERGWITYQGFLSQWTLTTYLDVQRCLEYLGYLGYSILTEQESQASAVTVTRDKKIDLQKKQTQRNVFRCNVIGVKNCGKSGVLQALLGRNLMRQKKIREDHKSYYAINTVYVYGQEKYLLLHDISESEFLTEAEIICDVVCLVYDVSNPKSFEYCARIFKQHFMDSRIPCLIVAAKSDLHEVKQEYSISPTDFCRKHKMPPPQAFTCNTADAPSKDIFVKLTTMAMYPEDHYRDRLSRDMGHTDRIENLRKIWVFLKTAFHARLRCMCTCNRCTFCICQNFLNSDLLQSVKNKIFTAVLNRHVTQADLKSSTFWLRASFGATVFAVLGFAMYKALLKQR

SEQ ID NO: 61020 - protein, 650 aa, Homo sapiens
MKKDVRILLVGEPRVGKTSLIMSLVSEEFPEEVPPRAEEITIPADVTPERVPTHIVDYSEAEQSDEQLHQEISQANVICIVYAVNNKHSIDKVTSRWIPLINERTDKDSRLPLILVGNKSDLVEYSSMETILPIMNQYTEIETCVECSAKNLKNISELFYYAQKAVLHPTGPLYCPEEKEMKPACIKALTRIFKISDQDNDGTLNDAELNFFQRICFNTPLAPQALEDVKNVVRKHISDGVADSGLTLKGFLFLHTLFIQRGRHETTWTVLRRFGYDDDLDLTPEYLFPLLKIPPDCTTELNHHAYLFLQSTFDKHDLDRDCALSPDELKDLFKVFPYIPWGPDVNNTVCTNERGWITYQGFLSQWTLTTYLDVQRCLEYLGYLGYSILTEQESQASAVTVTRDKKIDLQKKQTQRNVFRCNVIGVKNCGKSGVLQALLGRNLMRQKKIREDHKSYYAINTVYVYGQEKYLLLHDISESEFLTEAEIICDVVCLVYDVSNPKSFEYCARIFKQHFMDSRIPCLIVAAKSDLHEVKQEYSISPTDFCRKHKMPPPQAFTCNTADAPSKDIFVKLTTMAMYPEDHYRDRLSRDMGHTDRIENLRKIWVFLKTALHVTQADLKSSTFWLRASFGATVFAVLGFAMYKALLKQR

SEQ ID NO: 61021 - protein, 247 aa, Homo sapiens
MKKDVRILLVGEPRVGKTSLIMSLVSEEFPEEVPPRAEEITIPADVTPERVPTHIVDYSEAEQSDEQLHQEISQANVICIVYAVNNKHSIDKVTSRWIPLINERTDKDSRLPLILVGNKSDLVEYSSMETILPIMNQYTEIETCVECSAKNLKNISELFYYAQKAVLHPTGPLYCPEEKEMKPACIKALTRIFKISDQDNDGTLNDAELNFFQRICFNTPLAPRFGFEQVLVLLFLQFWALLCTKHY

SEQ ID NO: 61022 - protein, 618 aa, Homo sapiens
MRRDVRILLLGEAQVGKTSLILSLVGEEFPEEVPPRAEEITIPADVTPEKVPTHIVDYSEAEQTDEELREEIHKANVVCVVYDVSEEATIEKIRTKWIPLVNGGTTQGPRVPIILVGNKSDLRSGSSMEAVLPIMSQFPEIETCVECSAKNLRNISELFYYAQKAVLHPTAPLYDPEAKQLRPACAQALTRIFRLSDQDLDQALSDEELNAFQKSCFGHPLAPQALEDVKTVVCRNVAGGVREDRLTLDGFLFLNTLFIQRGRHETTWTILRRFGYSDALELTADYLSPLIHVPPGCSTELNHLGYQFVQRVFEKHDQDRDGALSPVELQSLFSVFPAAPWGPELPRTVRTEAGRLPLHGYLCQWTLVTYLDVRSCLGHLGYLGYPTLCEQDQAHAITVTREKRLDQEKGQTQRSVLLCKVVGARGVGKSAFLQAFLGRGLGHQDTREQPPGYAIDTVQVNGQEKYLILCEVGTDGLLATSLDATCDVACLMFDGSDPKSFAHCASVYKHHYMDGQTPCLFVSSKADLPEGVAVSGPSPAEFCRKHRLPAPVPFSCAGPAEPSTTIFTQLATMAAFPHLVHAELHPSSFWLRGLLGVVGAAVAAVLSFSLYRVLVKSQ

SEQ ID NO: 61023 - protein, 258 aa, Homo sapiens
MPPQQGDPAFPDRCEAPPVPPRRERGGRGGRGPGEPGGRGRAGGAEGRGVKCVLVGDGAVGKTSLVVSYTTNGYPTEYIPTAFDNFSAVVSVDGRPVRLQLCDTAGQDEFDKLRPLCYTNTDIFLLCFSVVSPSSFQNVSEKWVPEIRCHCPKAPIILVGTQSDLREDVKVLIELDKCKEKPVPEEAAKLCAEEIKAASYIECSALTQKNLKEVFDAAIVAGIQYSDTQQQPKKSKSRTPDKMKNLSKSWWKKYCCFV

SEQ ID NO: 61024 - protein, 963 aa, Homo sapiens
MLSGERKEGGSPRFGKLHLPVGLWINSPRKQLAKLGRRWPSAASVKSSSSDTGSRSSEPLPPPPPHVELRRVGAVKAAGGASGSRAKRISQLFRGSGTGTTGSSGAGGPGTPGGAQRWASEKKLPELAAGVAPEPPLATRATAPPGVLKIFGAGLASGANYKSVLATARSTARELVAEALERYGLAGSPGGGPGESSCVDAFALCDALGRPAAAGVGSGEWRAEHLRVLGDSERPLLVQELWRARPGWARRFELRGREEARRLEQEAFGAADSEGTGAPSWRPQKNRSRAASGGAALASPGPGTGSGAPAGSGGKERSENLSLRRSVSELSLQGRRRRQQERRQQALSMAPGAADAQIGTADPGDFDQLTQCLIQAPSNRPYFLLLQGYQDAQDFVVYVMTREQHVFGRGGNSSGRGGSPAPYVDTFLNAPDILPRHCTVRAGPEHPAMVRPSRGAPVTHNGCLLLREAELHPGDLLGLGEHFLFMYKDPRTGGSGPARPPWLPARPGATPPGPGWAFSCRLCGRGLQERGEALAAYLDGREPVLRFRPREEEALLGEIVRAAAAGSGDLPPLGPATLLALCVQHSARELELGHLPRLLGRLARLIKEAVWEKIKEIGDRQPENHPEGVPEVPLTPEAVSVELRPLMLWMANTTELLSFVQEKVLEMEKEADQEDPQLCNDLELCDEAMALLDEVIMCTFQQSVYYLTKTLYSTLPALLDSNPFTAGAELPGPGAELGAMPPGLRPTLGVFQAALELTSQCELHPDLVSQTFGYLFFFSNASLLNSLMERGQGRPFYQWSRAVQIRTNLDLVLDWLQGAGLGDIATEFFRKLSMAVNLLCVPRTSLLKASWSSLRTDHPTLTPAQLHHLLSHYQLGPGRGPPAAWDPPPAEREAVDTGDIFESFSSHPPLILPLGSSRLRLTGPVTDDALHRELRRLRRLLWDLEQQELPANYRHGPPVATSP

SEQ ID NO: 61025 - protein, 849 aa, Homo sapiens
MAAAAPAAAAASSEAPAASATAEPEAGDQDSREVRVLQSLRGKICEAKNLLPYLGPHKMRDCFCTINLDQEEVYRTQVVEKSLSPFFSEEFYFEIPRTFQYLSFYVYDKNVLQRDLRIGKVAIKKEDLCNHSGKETWFSLQPVDSNSEVQGKVHLELKLNELITENGTVCQQLVVHIKACHGLPLINGQSCDPYATVSLVGPSRNDQKKTKVKKKTSNPQFNEIFYFEVTRSSSYTRKSQFQVEEEDIEKLEIRIDLWNNGNLVQDVFLGEIKVPVNVLRTDSSHQAWYLLQPRDNGNKSSKTDDLGSLRLNICYTEDYVLPSEYYGPLKTLLLKSPDVQPISASAAYILSEICRDKNDAVLPLVRLLLHHDKLVPFATAVAELDLKDTQDANTIFRGNSLATRCLDEMMKIVGGHYLKVTLKPILDEICDSSKSCEIDPIKLKEGDNVENNKENLRYYVDKLFNTIVKSSMSCPTVMCDIFYSLRQMATQRFPNDPHVQYSAVSSFVFLRFFAVAVVSPHTFHLRPHHPDAQTIRTLTLISKTIQTLGSWGSLSKSKSSFKETFMCEFFKMFQEEGYIIAVKKFLDEISSTETKESSGTSEPVHLKEGEMYKRAQGRTRIGKKNFKKRWFCLTSRELTYHKQPGKDAIYTIPVKNILAVEKLEESSFNKKNMFQVIHTEKPLYVQANNCVEANEWIDVLCRVSRCNQNRLSFYHPSVYLNGNWLCCQETGENTLGCKPCTAGVPADIQIDIDEDRETERIYSLFTLSLLKLQKMEEACGTIAVYQGPQKEPDDYSNFVIEDSVTTFKTIQQIKSIIEKLDEPHEKYRKKRSSSAKYGSKENPIVGKAS

SEQ ID NO: 61026 - protein, 277 aa, Homo sapiens
MMKIVGGHYLKVTLKPILDEICDSSKSCEIDPIKLKEGDNVENNKENLRYYVDKLFNTIVKSSMSCPTVMCDIFYSLRQMATQRFPNDPHVQYSAVSSFVFLRFFAVAVVSPHTFHLRPHHPDAQTIRTLTLISKTIQTLGSWGSLSKSKSSFKETFMCEFFKMFQEEGYIIAVKKFLDEISSTETKESSGTSEPVHLKEGEMYKRAQGRTRIGKKNFKKRWFCLTSRELTYHKQPGSCVYALLWGFSWFSVKVSLPLIVTLVNPFSNITVVYGFSH

SEQ ID NO: 61027 - protein, 850 aa, Homo sapiens
MAAAAPAAAAASSEAPAASATAEPEAGDQDSREVRVLQSLRGKICEAKNLLPYLGPHKMRDCFCTINLDQEEVYRTQVVEKSLSPFFSEEFYFEIPRTFQYLSFYVYDKNVLQRDLRIGKVAIKKEDLCNHSGKETWFSLQPVDSNSEVQGKVHLELKLNELITENGTVCQQLVVHIKACHGLPLINGQSCDPYATVSLVGPSRNDQKKTKVKKKTSNPQFNEIFYFEVTRSSSYTRKSQFQVEEEDIEKLEIRIDLWNNGNLVQDVFLGEIKVPVNVLRTDSSHQAWYLLQPRDNGNKSSKTDDLGSLRLNICYTEDYVLPSEYYGPLKTLLLKSPDVQPISASAAYILSEICRDKNDAVLPLVRLLLHHDKLVPFATAVAELDLKDTQDANTIFRGNSLATRCLDEMMKIVGGHYLKVTLKPILDEICDSSKSCEIDPIKLKEGDNVENNKENLRYYVDKLFNTIVKSSMSCPTVMCDIFYSLRQMATQRFPNDPHVQYSAVSSFVFLRFFAVAVVSPHTFHLRPHHPDAQTIRTLTLISKTIQTLGSWGSLSKSKSSFKETFMCEFFKMFQEEGYIIAVKKFLDEISSTETKESSGTSEPVHLKEGEMYKRAQGRTRIGKKNFKKRWFCLTSRELTYHKQPGSKDAIYTIPVKNILAVEKLEESSFNKKNMFQVIHTEKPLYVQANNCVEANEWIDVLCRVSRCNQNRLSFYHPSVYLNGNWLCCQETGENTLGCKPCTAGVPADIQIDIDEDRETERIYSLFTLSLLKLQKMEEACGTIAVYQGPQKEPDDYSNFVIEDSVTTFKTIQQIKSIIEKLDEPHEKYRKKRSSSAKYGSKENPIVGKAS

SEQ ID NO: 61028 - protein, 834 aa, Homo sapiens
MAVEDEGLRVFQSVKIKIGEAKNLPSYPGPSKMRDCYCTVNLDQEEVFRTKIVEKSLCPFYGEDFYCEIPRSFRHLSFYIFDRDVFRRDSIIGKVAIQKEDLQKYHNRDTWFQLQHVDADSEVQGKVHLELRLSEVITDTGVVCHKLATRIVECQGLPIVNGQCDPYATVTLAGPFRSEAKKTKVKRKTNNPQFDEVFYFEVTRPCSYSKKSHFDFEEEDVDKLEIRVDLWNASNLKFGDEFLGELRIPLKVLRQSSSYEAWYFLQPRDNGSKSLKPDDLGSLRLNVVYTEDHVFSSDYYSPLRDLLLKSADVEPVSASAAHILGEVCREKQEAAVPLVRLFLHYGRVVPFISAIASAEVKRTQDPNTIFRGNSLASKCIDETMKLAGMHYLHVTLKPAIEEICQSHKPCEIDPVKLKDGENLENNMENLRQYVDRVFHAITESGVSCPTVMCDIFFSLREAAAKRFQDDPDVRYTAVSSFIFLRFFAPAILSPNLFQLTPHHTDPQTSRTLTLISKTVQTLGSLSKSKSASFKESYMATFYEFFNEQKYADAVKNFLDLISSSGRRDPKSVEQPIVLKEGFMIKRAQGRKRFGMKNFKKRWFRLTNHEFTYHKSKGDQPLYSIPIENILAVEKLEEESFKMKNMFQVIQPERALYIQANNCVEAKDWIDILTKVSQCNQKRLTVYHPSAYLSGHWLCCRAPSDSAPGCSPCTGGLPANIQLDIDGDRETERIYSLFNLYMSKLEKMQEACGSKSVYDGPEQEEYSTFVIDDPQETYKTLKQVIAGVGALEQEHAQYKRDKFKKTKYGSQEHPIGDKSFQNYIRQQSETSTHSI

SEQ ID NO: 61029 - protein, 802 aa, Homo sapiens
MRDCYCTVNLDQEEVFRTKIVEKSLCPFYGEDFYCEIPRSFRHLSFYIFDRDVFRRDSIIGKVAIQKEDLQKYHNRDTWFQLQHVDADSEVQGKVHLELRLSEVITDTGVVCHKLATRIVECQGLPIVNGQCDPYATVTLAGPFRSEAKKTKVKRKTNNPQFDEVFYFEVTRPCSYSKKSHFDFEEEDVDKLEIRVDLWNASNLKFGDEFLGELRIPLKVLRQSSSYEAWYFLQPRDNGSKSLKPDDLGSLRLNVVYTEDHVFSSDYYSPLRDLLLKSADVEPVSASAAHILGEVCREKQEAAVPLVRLFLHYGRVVPFISAIASAEVKRTQDPNTIFRGNSLASKCIDETMKLAGMHYLHVTLKPAIEEICQSHKPCEIDPVKLKDGENLENNMENLRQYVDRVFHAITESGVSCPTVMCDIFFSLREAAAKRFQDDPDVRYTAVSSFIFLRFFAPAILSPNLFQLTPHHTDPQTSRTLTLISKTVQTLGSLSKSKSASFKESYMATFYEFFNEQKYADAVKNFLDLISSSGRRDPKSVEQPIVLKEGFMIKRAQGRKRFGMKNFKKRWFRLTNHEFTYHKSKGDQPLYSIPIENILAVEKLEEESFKMKNMFQVIQPERALYIQANNCVEAKDWIDILTKVSQCNQKRLTVYHPSAYLSGHWLCCRAPSDSAPGCSPCTGGLPANIQLDIDGDRETERIYSLFNLYMSKLEKMQEACGSKSVYDGPEQEEYSTFVIDDPQETYKTLKQVIAGVGALEQEHAQYKRDKFKKTKYGSQEHPIGDKSFQNYIRQQSETSTHSI

SEQ ID NO: 61030 - protein, 132 aa, Homo sapiens
MAVEDEGLRVFQSVKIKIGEAKNLPSYPGPSKMRDCYCTVNLDQEEVFRTKIVEKSLCPFYGEDFYCEIPRSFRHLSFYIFDRDVFRRDSIIGQSAPGAAAERGHHRHWGRLPQARHTHRRVPGPPHREWAM

SEQ ID NO: 61031 - protein, 803 aa, Homo sapiens
MAKRSSLYIRIVEGKNLPAKDITGSSDPYCIVKVDNEPIIRTATVWKTLCPFWGEEYQVHLPPTFHAVAFYVMDEDALSRDDVIGKVCLTRDTIASHPKGFSGWAHLTEVDPDEEVQGEIHLRLEVWPGARACRLRCSVLEARDLAPKDRNGTSDPFVRVRYKGRTRETSIVKKSCYPRWNETFEFELQEGAMEALCVEAWDWDLVSRNDFLGKVVIDVQRLRVVQQEEGWFRLQPDQSKSRRHDEGNLGSLQLEVRLRDETVLPSSYYQPLVHLLCHEVKLGMQGPGQLIPLIEETTSTECRQDVATNLLKLFLGQGLAKDFLDLLFQLELSRTSETNTLFRSNSLASKSMESFLKVAGMQYLHGVLGPIINKVFEEKKYVELDPSKVEVKDVGCSGLHRPQTEAEVLEQSAQTLRAHLGALLSALSRSVRACPAVVRATFRQLFRRVRERFPGAQHENVPFIAVTSFLCLRFFSPAIMSPKLFHLRERHADARTSRTLLLLAKAVQNVGNMDTPASRAKEAWMEPLQPTVRQGVAQLKDFITKLVDIEEKDELDLQRTLSLQAPPVKEGPLFIHRTKGKGPLMSSSFKKLYFSLTTEALSFAKTPSSKKSALIKLANIRAAEKVEEKSFGGSHVMQVIYTDDAGRPQTAYLQCKCVNELNQWLSALRKVSINNTGLLGSYHPGVFRGDKWSCCHQKEKTGQGCDKTRSRVTLQEWNDPLDHDLEAQLIYRHLLGVEAMLWERHRELSGGAEAGTVPTSPGKVPEDSLARLLRVLQDLREAHSSSPAGSPPSEPNCLLELQT

SEQ ID NO: 61032 - protein, 757 aa, Homo sapiens
MAKRSSLYIRIVEGKNLPAKDITGSSDPYCIVKVDNEPIIRTATVWKTLCPFWGEEYQVHLPPTFHAVAFYVMDEDALSRDDVIGKVCLTRDTIASHPKGFSGWAHLTEVDPDEEVQGEIHLRLEVWPGARACRLRCSVLEARDLAPKDRNGTSDPFVRVRYKGRTRETSIVKKSCYPRWNETFEFELQEGAMEALCVEAWDWDLVSRNDFLGKVVIDVQRLRVVQQEEGWFRLQPDQSKSRRHDEGNLGSLQLEVRLRDETVLPSSYYQPLVHLLCHEVKLGMQGPGQLIPLIEETTSTECRQDVATNLLKLFLGQGLAKDFLDLLFQLELSRTSETNTLFRSNSLASKSMESFLKVAGMQYLHGVLGPIINKVFEEKKYVELDPSKVEVKDVGCSGLHRPQTEAEVLEQSAQTLRAHLGALLSALSRSVRACPAVVRATFRQLFRRVRERFPGAQHENVPFIAVTSFLCLRFFSPAIMSPKLFHLRERHADARTSRTLLLLAKAVQNVGNMDTPASRAKEAWMEPLQPTVRQGVAQLKDFITKLVDIEEKDELDLQRTLSLQAPPVKEGPLFIHRTKGKGPLMSSSFKKLYFSLTTEALSFAKTPSSKCVNELNQWLSALRKVSINNTGLLGSYHPGVFRGDKWSCCHQKEKTGQGCDKTRSRVTLQEWNDPLDHDLEAQLIYRHLLGVEAMLWERHRELSGGAEAGTVPTSPGKVPEDSLARLLRVLQDLREAHSSSPAGSPPSEPNCLLELQT

SEQ ID NO: 61033 - protein, 731 aa, Homo sapiens
MDEDALSRDDVIGKVCLTRDTIASHPKGFSGWAHLTEVDPDEEVQGEIHLRLEVWPGARACRLRCSVLEARDLAPKDRNGTSDPFVRVRYKGRTRETSIVKKSCYPRWNETFEFELQEGAMEALCVEAWDWDLVSRNDFLGKVVIDVQRLRVVQQEEGWFRLQPDQSKSRRHDEGNLGSLQLEVRLRDETVLPSSYYQPLVHLLCHEVKLGMQGPGQLIPLIEETTSTECRQDVATNLLKLFLGQGLAKDFLDLLFQLELSRTSETNTLFRSNSLASKSMESFLKVAGMQYLHGVLGPIINKVFEEKKYVELDPSKVEVKDVGCSGLHRPQTEAEVLEQSAQTLRAHLGALLSALSRSVRACPAVVRATFRQLFRRVRERFPGAQHENVPFIAVTSFLCLRFFSPAIMSPKLFHLRERHADARTSRTLLLLAKAVQNVGNMDTPASRAKEAWMEPLQPTVRQGVAQLKDFITKLVDIEEKDELDLQRTLSLQAPPVKEGPLFIHRTKGKGPLMSSSFKKLYFSLTTEALSFAKTPSSKKSALIKLANIRAAEKVEEKSFGGSHVMQVIYTDDAGRPQTAYLQCKCVNELNQWLSALRKVSINNTGLLGSYHPGVFRGDKWSCCHQKEKTGQGCDKTRSRVTLQEWNDPLDHDLEAQLIYRHLLGVEAMLWERHRELSGGAEAGTVPTSPGKVPEDSLARLLRVLQDLREAHSSSPAGSPPSEPNCLLELQT

SEQ ID NO: 61034 - protein, 804 aa, Homo sapiens
MAKSSSLNVRVVEGRALPAKDVSGSSDPYCLVKVDDEVVARTATVWRSLGPFWGEEYTVHLPLDFHQLAFYVLDEDTVGHDDIIGKISLSREAITADPRGIDSWINLSRVDPDAEVQGEICLSVQMLEDGQGRCLRCHVLQARDLAPRDISGTSDPFARVFWGSQSLETSTIKKTRFPHWDEVLELREMPGAPSPLRVELWDWDMVGKNDFLGMVEFSPKTLQQKPPKGWFRLLPFPRAEEDSGGNLGALRVKVRLIEDRVLPSQCYQPLMELLMESVQGPAEEDTASPLALLEELTLGDCRQDLATKLVKLFLGRGLAGRFLDYLTRREVARTMDPNTLFRSNSLASKSMEQFMKLVGMPYLHEVLKPVISRVFEEKKYMELDPCKMDLGRTRRISFKGALSEEQMRETSLGLLTGYLGPIVDAIVGSVGRCPPAMRLAFKQLHRRVEERFPQAEHQDVKYLAISGFLFLRFFAPAILTPKLFDLRDQHADPQTSRSLLLLAKAVQSIGNLGQQLGQGKELWMAPLHPFLLQCVSRVRDFLDRLVDVDGDEAGVPARALFPPSAIVREGYLLKRKEEPAGLATRFAFKKRYVWLSGETLSFSKSPEWQMCHSIPVSHIRAVERVDEGAFQLPHVMQVVTQDGTGALHTTYLQCKNVNELNQWLSALRKASAPNPNKLAACHPGAFRSARWTCCLQAERSAAGCSRTHSAVTLGDWSDPLDPDAEAQTVYRQLLLGRDQLRLKLLEDSNMDTTLEADTGACPEVLARQRAATARLLEVLADLDRAHEEFQQQERGKAALGPLGP

SEQ ID NO: 61035 - protein, 776 aa, Homo sapiens
MAKSSSLNVRVVEGRALPAKDVSGSSDPYCLVKVDDEVVARTATVWRSLGPFWGEEYTVHLPLDFHQLAFYVLDEDTVGHDDIIGKISLSREAITADPRGIDSWINLSRVDPDAEVQGEICLSVQMLEDGQGRCLRCHVLQARDLAPRDISGTSDPFARVFWGSQSLETSTIKKTRFPHWDEVLELREMPGAPSPLRVELWDWDMVGKNDFLGMVEFSPKTLQQKPPKGWFRLLPFPRAEEDSGGNLGALRVKVRLIEDRVLPSQCYQPLMELLMESVQGPAEEDTASPLALLEELTLGDCRQDLATKLVKLFLGRGLAGRFLDYLTRREVARTMDPNTLFRSNSLASKSMEQFMKLVGMPYLHEVLKPVISRVFEEKKYMELDPCKMDLGRTRRISFKGALSEEQMRETSLGLLTGYLGPIVDAIVGSVGRCPPAMRLAFKQLHRRVEERFPQAEHQDVKYLAISGFLFLRFFAPAILTPKLFDLRDQHADPQTSRSLLLLAKAVQSIGNLGQQLGQGKELWMAPLHPFLLQCVSRVRDFLDRLVDVDGDEAGVPARALFPPSAIVREGYLLKRKEEPAGLATRFAFKKRYVWLSGETLSFSKSPEWQVVTQDGTGALHTTYLQCKNVNELNQWLSALRKASAPNPNKLAACHPGAFRSARWTCCLQAERSAAGCSRTHSAVTLGDWSDPLDPDAEAQTVYRQLLLGRDQLRLKLLEDSNMDTTLEADTGACPEVLARQRAATARLLEVLADLDRAHEEFQQQERGKAALGPLGP

SEQ ID NO: 61036 - protein, 806 aa, Homo sapiens
MAKSSSLNVRVVEGRALPAKDVSGSSDPYCLVKVDDEVVARTATVWRSLGPFWGEEYTVHLPLDFHQLAFYVLDEDTVGHDDIIGKISLSREAITADPRGIDSWINLSRVDPDAEVQGEICLSVQMLEDGQGRCLRCHVLQARDLAPRDISGTSDPFARVFWGSQSLETSTIKKTRFPHWDEVLELREMPGAPSPLRVELWDWDMVGKNDFLGMVEFSPKTLQQKPPKGWFRLLPFPRAEEDSGGNLGALRVKVRLIEDRVLPSQCYQPLMELLMESVQGPAEEDTASPLALLEELTLGDCRQDLATKLVKLFLGRGLAGRFLDYLTRREVARTMDPNTLFRSNSLASKSMEQFMKLVGMPYLHEVLKPVISRVFEEKKYMELDPCKMDLGRTRRISFKGALSEEQMRETSLGLLTGYLGPIVDAIVGSVGRCPPAMRLAFKQLHRRVEERFPQAEHQQDVKYLAISGFLFLRFFAPAILTPKLFDLRDQHADPQTSRSLLLLAKAVQSIGNLGQQLGQGKELWMAPLHPFLLQCVSRVRDFLDRLVDVDGDEEAGVPARALFPPSAIVREGYLLKRKEEPAGLATRFAFKKRYVWLSGETLSFSKSPEWQMCHSIPVSHIRAVERVDEGAFQLPHVMQVVTQDGTGALHTTYLQCKNVNELNQWLSALRKASAPNPNKLAACHPGAFRSARWTCCLQAERSAAGCSRTHSAVTLGDWSDPLDPDAEAQTVYRQLLLGRDQLRLKLLEDSNMDTTLEADTGACPEVLARQRAATARLLEVLADLDRAHEEFQQQERGKAALGPLGP

SEQ ID NO: 61037 - protein, 1237 aa, Homo sapiens
MQKSVRYNEGHALYLAFLARKEGTKRGFLSKKTAEASRWHEKWFALYQNVLFYFEGEQSCRPAGMYLLEGCSCERTPAPPRAGAGQGGVRDALDKQYYFTVLFGHEGQKPLELRCEEEQDGKEWMEAIHQASYADILIEREVLMQKYIHLVQIVETEKIAANQLRHQLEDQDTEIERLKSEIIALNKTKERMRPYQSNQEDEDPDIKKIKKVQSFMRGWLCRRKWKTIVQDYICSPHAESMRKRNQIVFTMVEAESEYVHQLYILVNGFLRPLRMAASSKKPPISHDDVSSIFLNSETIMFLHEIFHQGLKARIANWPTLILADLFDILLPMLNIYQEFVRNHQYSLQVLANCKQNRDFDKLLKQYEANPACEGRMLETFLTYPMFQIPRYIITLHELLAHTPHEHVERKSLEFAKSKLEELSRVMHDEVSDTENIRKNLAIERMIVEGCDILLDTSQTFIRQGSLIQVPSVERGKLSKVRLGSLSLKKEGERQCFLFTKHFLICTRSSGGKLHLLKTGGVLSLIDCTLIEEPDASDDDSKGSGQVFGHLDFKIVVEPPDAAAFTVVLLAPSRQEKAAWMSDISQCVDNIRCNGLMTIVFEENSKVTVPHMIKSDARLHKDDTDICFSKTLNSCKVPQIRYASVERLLERLTDLRFLSIDFLNTFLHTYRIFTTAAVVLGKLSDIYKRPFTSIPVRSLELFFATSQNNRGEHLVDGKSPRLCRKFSSPPPLAVSRTSSPVRARKLSLTSPLNSKIGALDLTTSSSPTTTTQSPAASPPPHTGQIPLDLSRGLSSPEQSPGTVEENVDNPRVDLCNKLKRSIQKAVLESAPADRAGVESSPAADTTELSPCRSPSTPRHLRYRQPGGQTADNAHCSVSPASAFAIATAAAGHGSPPGFNNTERTCDKEFIIRRTATNRVLNVLRHWVSKHAQDFELNNELKMNVLNLLEEVLRDPDLLPQERKAAANILRALSQDDQDDIHLKLEDIIQMTDCMKAECFESLSAMELAEQITLLDHVIFRSIPYEEFLGQGWMKLDKNERTPYIMKTSQHFNDMSNLVASQIMNYADVSSRANAIEKWVAVADICRCLHNYNGVLEITSALNRSAIYRLKKTWAKVSKQTKALMDKLQKTVSSEGRFKNLRETLKNCNPPAVPYLGMYLTDLAFIEEGTPNFTEEGLVNFSKMRMISHIIREIRQFQQTSYRIDHQPKVAQYLLDKDLIIDEDTLYELSLKIEPRLPA

SEQ ID NO: 61038 - protein, 1476 aa, Homo sapiens
MTSSSPAGLEGSDLSSINTMMSAVMSVGKVTENGGSPQGIKSPSKPPGPNRIGRRNQETKEEKSSYNCPLCEKICTTQHQLTMHIRQHNTDTGGADHSCSICGKSLSSASSLDRHMLVHSGERPYKCTVCGQSFTTNGNMHRHMKIHEKDPNSATATAPPSPLKRRRLSSKRKLSHDAESEREDPAPAKKMVEDGQSGDLEKKADEVFHCPVCFKEFVCKYGLETHMETHSDNPLRCDICCVTFRTHRGLLRHNALVHKQLPRDAMGRPFIQNNPSIPAGFHDLGFTDFSCRKFPRISQAWCETNLRRCISEQHRFVCDTCDKAFPMLCSLALHKQTHVAADQGQEKPQATPLPGDALDQKGFLALLGLQHTKDVRPAPAEEPLPDDNQAIQLQTLKCQLPQDPGCTNLLSLSPFEAASLGGSLTVLPATKDSIKHLSLQPFQKGFIIQPDSSIVVKPISGESAIELADIQQILKMAASAPPQISLPPFSKAPAAPLQAIFKHMPPLKPKPLVTPRTVVATSTPPPLINAQQASPGCISPSLPPPPLKLLKGSVEAASNAHLLQSKSGTQPHAATRLSLQQPRAELPGQPEMKTQLEQDSIIEALLPLSMEAKIKQEITEGELKAFMTAPGGKKTPAMRKVLYPCRFCNQVFAFSGVLRAHVRSHLGISPYQCNICDYIAADKAALIRHLRTHSGERPYICKICHYPFTVKANCERHLRKKHLKATRKDIEKNIEYVSSSAAELVDAFCAPDTVCRLCGEDLKHYRALRIHMRTHCGRGLGGGHKGRKPFECKECSAAFAAKRNCIHHILKQHLHVPEQDIESYVLAADGLGPAEAPAAEASGRGEDSGCAALGDCKPLTAFLEPQNGFLHRGPTQPPPPHVSIKLEPASSFAVDFNEPLDFSQKGLALVQVKQENISFLSPSSLVPYDCSMEPIDLSIPKNFRKGDKDLATPSEAKKPEEEAGSSEQPSPCPAPGPSLPVTLGPSGILESPMAPAPAATPEPPAQPLQGPVQLAVPIYSSALVSSPPLVGSSALLSGTALLRPLRPKPPLLLPKPPVTEELPPLASIAQIISSVSSAPTLLKTKVADPGPASTGSNTTASDSLGGSVPKAATTATPAATTSPKESSEPPAPASSPEAASPTEQGPAGTSKKRGRKRGMRSRPRANSGGVDLDSSGEFASIEKMLATTDTNKFSPFLQTAEDNTQDEVAGAPADHHGPSDEEQGSPPEDKLLRAKRNSYTNCLQKITCPHCPRVFPWASSLQRHMLTHTGQKPFPCQKCDAFFSTKSNCERHQLRKHGVTTCSLRRNGLIPQSKESDVGSHDSTGERPYKCQTCERTFTLKHSLVRHQRIHQKARHAKHHGKDSDKEERGEEDSENESTHSGNNAVSENEAELAPNASNHMAVTRSRKEGLASATKDCSHREEKVTAGWPSEPGQGDLNPESPAALGQDLLEPRSKRPAHPILATADGASQLVGME

SEQ ID NO: 61039 - protein, 1687 aa, Homo sapiens
MTSSSPAGLEGSDLSSINTMMSAVMSVGKVTENGGSPQGIKSPSKPPGPNRIGRRNQETKEEKSSYNCPLCEKICTTQHQLTMHIRQHNTDTGGADHSCSICGKSLSSASSLDRHMLVHSGERPYKCTVCGQSFTTNGNMHRHMKIHEKDPNSATATAPPSPLKRRRLSSKRKLSHDAESEREDPAPAKKMVEDGQSGDLEKKADEVFHCPVCFKEFVCKYGLETHMETHSDNPLRCDICCVTFRTHRGLLRHNALVHKQLPRDAMGRPFIQNNPSIPAGFHDLGFTDFSCRKFPRISQAWCETNLRRCISEQHRFVCDTCDKAFPMLCSLALHKQTHVAADQGQEKPQATPLPGDALDQKGFLALLGLQHTKDVRPAPAEEPLPDDNQAIQLQTLKCQLPQDPGCTNLLSLSPFEAASLGGSLTVLPATKDSIKHLSLQPFQKGFIIQPDSSIVVKPISGESAIELADIQQILKMAASAPPQISLPPFSKAPAAPLQAIFKHMPPLKPKPLVTPRTVVATSTPPPLINAQQASPGCISPSLPPPPLKLLKGSVEAASNAHLLQSKSGTQPHAATRLSLQQPRAELPGQPEMKTQLEQDSIIEALLPLSMEAKIKQEITEGELKAFMTAPGGKKTPAMRKVLYPCRFCNQVFAFSGVLRAHVRSHLGISPYQCNICDYIAADKAALIRHLRTHSGERPYICKICHYPFTVKANCERHLRKKHLKATRKDIEKNIEYVSSSAAELVDAFCAPDTVCRLCGEDLKHYRALRIHMRTHCGRGLGGGHKGRKPFECKECSAAFAAKRNCIHHILKQHLHVPEQDIESYVLAADGLGPAEAPAAEASGRGEDSGCAALGDCKPLTAFLEPQNGFLHRGPTQPPPPHVSIKLEPASSFAVDFNEPLDFSQKGLALVQVKQENISFLSPSSLVPYDCSMEPIDLSIPKNFRKGDKDLATPSEAKKPEEEAGSSEQPSPCPAPGPSLPVTLGPSGILESPMAPAPAATPEPPAQPLQGPVQLAVPIYSSALVSSPPLVGSSALLSGTALLRPLRPKPPLLLPKPPVTEELPPLASIAQIISSVSSAPTLLKTKVADPGPASTGSNTTASDSLGGSVPKAATTATPAATTSPKESSEPPAPASSPEAASPTEQGPAGTSKKRGRKRGMRSRPRANSGGVDLDSSGEFASIEKMLATTDTNKFSPFLQTAEDNTQDEVAGAPADHHGPSDEEQGSPPEDKLLRAKRNSYTNCLQKITCPHCPRVFPWASSLQRHMLTHTDSQSDAETAAAAGEVLDLTSRDREQPSEGATELRQVAGDAPVEQATAETASPVHREEHGRGESHEPEEEHGTEESTGDADGAEEDASSNQSLDLDFATKLMDFKLAEGDGEAGAGGAASQEQKLACDTCGKSFKFLGTLSRHRKAHGRQEPKDEKGDGASTAEEGPQPAPEQEEKPPETPAEVVESAPGAGEAPAEKLAEETEGPSDGESAAEKRSSEKSDDDKKPKTDSPKSVASKADKRKKVCSVCNKRFWSLQDLTRHMRSHTGERPYKCQTCERTFTLKHSLVRHQRIHQKARHAKHHGKDSDKEERGEEDSENESTHSGNNAVSENEAELAPNASNHMAVTRSRKEGLASATKDCSHREEKVTAGWPSEPGQGDLNPESPAALGQDLLEPRSKRPAHPILATADGASQLVGME

SEQ ID NO: 61040 - protein, 1687 aa, Homo sapiens; identical to SEQ ID NO: 61039

SEQ ID NO: 61041 - protein, 1742 aa, Homo sapiens
MTSSSPAGLEGSDLSSINTMMSAVMSVGKVTENGGSPQGIKSPSKPPGPNRIGRRNQETKEEKSSYNCPLCEKICTTQHQLTMHIRQHNTDTGGADHSCSICGKSLSSASSLDRHMLVHSGERPYKCTVCGQSFTTNGNMHRHMKIHEKDPNSATATAPPSPLKRRRLSSKRKLSHDAESEREDPAPAKKMVEDGQSGDLEKKADEVFHCPVCFKEFVCKYGLETHMETHSDNPLRCDICCVTFRTHRGLLRHNALVHKQLPRDAMGRPFIQNNPSIPAGFHDLGFTDFSCRKFPRISQAWCETNLRRCISEQHRFVCDTCDKAFPMLCSLALHKQTHVAADQGQEKPQATPLPGDALDQKGFLALLGLQHTKDVRPAPAEEPLPDDNQAIQLQTLKCQLPQDPGCTNLLSLSPFEAASLGGSLTVLPATKDSIKHLSLQPFQKGFIIQPDSSIVVKPISGESAIELADIQQILKMAASAPPQISLPPFSKAPAAPLQAIFKHMPPLKPKPLVTPRTVVATSTPPPLINAQQASPGCISPSLPPPPLKLLKGSVEAASNAHLLQSKSGTQPHAATRLSLQQPRAELPGQPEMKTQLEQDSIIEALLPLSMEAKIKQEITEGELKAFMTAPGGKKTPAMRKVLYPCRFCNQVFAFSGVLRAHVRSHLGISPYQCNICDYIAADKAALIRHLRTHSGERPYICKICHYPFTVKANCERHLRKKHLKATRKDIEKNIEYVSSSAAELVDAFCAPDTVCRLCGEDLKHYRALRIHMRTHCGRGLGGGHKGRKPFECKECSAAFAAKRNCIHHILKQHLHVPEQDIESYVLAADGLGPAEAPAAEASGRGEDSGCAALGDCKPLTAFLEPQNGFLHRGPTQPPPPHVSIKLEPASSFAVDFNEPLDFSQKGLALVQVKQENISFLSPSSLVPYDCSMEPIDLSIPKNFRKGDKDLATPSEAKKPEEEAGSSEQPSPCPAPGPSLPVTLGPSGILESPMAPAPAATPEPPAQPLQGPVQLAVPIYSSALVSSPPLVGSSALLSGTALLRPLRPKPPLLLPKPPVTEELPPLASIAQIISSVSSAPTLLKTKVADPGPASTGSNTTASDSLGGSVPKAATTATPAATTSPKESSEPPAPASSPEAASPTEQGPAGTSKKRGRKRGMRSRPRANSGGVDLDSSGEFASIEKMLATTDTNKFSPFLQTAEDNTQDEVAGAPADHHGPSDEEQGSPPEDKLLRAKRNSYTNCLQKITCPHCPRVFPWASSLQRHMLTHTGQKPFPCQKCDAFFSTKSNCERHQLRKHGVTTCSLRRNGLIPQSKESDVGSHDSTDSQSDAETAAAAGEVLDLTSRDREQPSEGATELRQVAGDAPVEQATAETASPVHREEHGRGESHEPEEEHGTEESTGDADGAEEDASSNQSLDLDFATKLMDFKLAEGDGEAGAGGAASQEQKLACDTCGKSFKFLGTLSRHRKAHGRQEPKDEKGDGASTAEEGPQPAPEQEEKPPETPAEVVESAPGAGEAPAEKLAEETEGPSDGESAAEKRSSEKSDDDKKPKTDSPKSVASKADKRKKVCSVCNKRFWSLQDLTRHMRSHTGERPYKCQTCERTFTLKHSLVRHQRIHQKARHAKHHGKDSDKEERGEEDSENESTHSGNNAVSENEAELAPNASNHMAVTRSRKEGLASATKDCSHREEKVTAGWPSEPGQGDLNPESPAALGQDLLEPRSKRPAHPILATADGASQLVGME

SEQ ID NO: 61042 - protein, 4 aa, Homo sapiens
MTSS

SEQ ID NO: 61043 - protein, 164 aa, Homo sapiens
MTSSSPAGLEGSDLSSINTMMSAVMSVGKVTENGGSPQGIKSPSKPPGPNRIGRRNQETKEEKSSYNCPLCEKICTTQHQLTMHIRQHNTDTGGADHSCSICGKSLSSASSLDRHMLVHSGERPYKCTVCGQSFTTNGNMHRHMKIHEKDPNSATATAPPSPLK

SEQ ID NO: 61044 - protein, 778 aa, Homo sapiens
MTSSSPAGLEGSDLSSINTMMSAVMSVGKVTENGGSPQGIKSPSKPPGPNRIGRRNQETKEEKSSYNCPLCEKICTTQHQLTMHIRQHNTDTGGADHSCSICGKSLSSASSLDRHMLVHSGERPYKCTVCGQSFTTNGNMHRHMKIHEKDPNSATATAPPSPLKRRRLSSKRKLSHDAESEREDPAPAKKMVEDGQSGDLEKKADEVFHCPVCFKEFVCKYGLETHMETHSDNPLRCDICCVTFRTHRGLLRHNALVHKQLPRDAMGRPFIQNNPSIPAGFHDLGFTDFSCRKFPRISQAWCETNLRRCISEQHRFVCDTCDKAFPMLCSLALHKQTHVAADQGQEKPQATPLPGDALDQKGFLALLGLQHTKDVRPAPAEEPLPDDNQAIQLQTLKCQLPQDPGCTNLLSLSPFEAASLGGSLTVLPATKDSIKHLSLQPFQKGFIIQPDSSIVVKPISGESAIELADIQQILKMAASAPPQISLPPFSKAPAAPLQAIFKHMPPLKPKPLVTPRTVVATSTPPPLINAQQASPGCISPSLPPPPLKLLKGSVEAASNAHLLQSKSGTQPHAATRLSLQQPRAELPGQPEMKTQLEQDSIIEALLPLSMEAKIKQEITEGELKAFMTAPGGKKTPAMRKVLYPCRFCNQVFAFSGVLRAHVRSHLGISPYQCNICDYIAADKAALIRHLRTHSGERPYICKICHYPFTVKANCERHLRKKHLKATRKDIEKNIEYVSSSAAELVDAFCAPDTVCRLCGEDLKHYRALRIHMRTHCGR

SEQ ID NO: 61045 - protein, 136 aa, Homo sapiens
MTSSSPAGLEGSDLSSINTMMSAVMSVGKVTENGGSPQGIKSPSKPPGPNRIGRRNQETKEEKSSYNCPLCEKICTTQHQLTMHIRQHNTDTGGADHSCSICGKSLSSASSLDRHMLVHSGERPYKCTVCGQSFTT

SEQ ID NO: 61046 - protein, 62 aa, Homo sapiens
MTSSSPAGLEGSDLSSINTMMSAVMSVGKVTENGGSPQGIKSPSKPPGPNRIGRRNQVSVHT

SEQ ID NO: 61047 - protein, 277 aa, Homo sapiens
MSKSLKKLVEESREKNQPEVDMSDRGISNMLDVNGLFTLSHITQLVLSHNKLTMVPPNIAELKNLEVLNFFNNQIEELPTQISSLQKLKHLNLGMNRLNTLPRGFGSLPALEVLDLTYNNLSENSLPGNFFYLTTLRALYLSDNDFEILPPDIGKLTKLQILSLRDNDLISLPKEIGELTQLKELHIQGNRLTVLPPELGNLDLTGQKQVFKAENNPWVTPIADQFQLGVSHVFEYIRSETYKYLYGRHMQANPEPPKKNNDKSKKISRKPLAAKNR

SEQ ID NO: 61048 - protein, 224 aa, Homo sapiens
MVPPNIAELKNLEVLNFFNNQIEELPTQISSLQKLKHLNLGMNRLNTLPRGFGSLPALEVLDLTYNNLSENSLPGNFFYLTTLRALYLSDNDFEILPPDIGKLTKLQILSLRDNDLISLPKEIGELTQLKELHIQGNRLTVLPPELGNLDLTGQKQVFKAENNPWVTPIADQFQLGVSHVFEYIRSETYKYLYGRHMQANPEPPKKNNDKSKKISRKPLAAKNR

SEQ ID NO: 61049 - protein, 277 aa, Homo sapiens; identical to SEQ ID NO: 61047

SEQ ID NO: 61050 - protein, 281 aa, Homo sapiens
MKLAAMIKKMCPSDSELSIPAKNCYRMVILGSSKVGKTAIVSRFLTGRFEDAYTPTIEDFHRKFYSIRGEVYQLDILDTSGNHPFPAMRRLSILTGDVFILVFSLDNRDSFEEVQRLRQQILDTKSCLKNKTKENVDVPLVICGNKGDRDFYREVDQREIEQLVGDDPQRCAYFEISAKKNSSLDQMFRALFAMAKLPSEMSPDLHRKVSVQYCDVLHKKALRNKKLLRAGSGGGGGDPGDAFGIVAPFARRPSVHSDLMYIREKASAGSQAKDKERCVIS

SEQ ID NO: 61051 - protein, 266 aa, Homo sapiens
MMKTLSSGNCTLSVPAKNSYRMVVLGASRVGKSSIVSRFLNGRFEDQYTPTIEDFHRKVYNIRGDMYQLDILDTSGNHPFPAMRRLSILTGDVFILVFSLDNRESFDEVKRLQKQILEVKSCLKNKTKEAAELPMVICGNKNDHGELCRQVPTTEAELLVSGDENCAYFEVSAKKNTNVDEMFYVLFSMAKLPHEMSPALHRKISVQYGDAFHPRPFCMRRVKEMDAYGMVSPFARRPSVNSDLKYIKAKVLREGQARERDKCTIQ

SEQ ID NO: 61052 - protein, 199 aa, Homo sapiens
MAKSAEVKLAIFGRAGVGKSALVVRFLTKRFIWEYDPTLESTYRHQATIDDEVVSMEILDTAGQEDTIQREGHMRWGEGFVLVYDITDRGSFEEVLPLKNILDEIKKPKNVTLILVGNKADLDHSRQVSTEEGEKLATELACAFYECSACTGEGNITEIFYELCREVRRRRMVQGKTRRRSSTTHVKQAINKMLTKISS

SEQ ID NO: 61053 - protein, 39 aa, Homo sapiens
MAKSAEVKLAIFGRAGVGKSALVVRFLTKRFIWEYDPTL

SEQ ID NO: 61054 - protein, 199 aa, Homo sapiens; identical to SEQ ID NO: 61052

SEQ ID NO: 61055 - protein, 199 aa, Homo sapiens; identical to SEQ ID NO: 61052

SEQ ID NO: 61056 - protein, 180 aa, Homo sapiens
MAKSAEVKLAIFGRAGVGKSESTYRHQATIDDEVVSMEILDTAGQEDTIQREGHMRWGEGFVLVYDITDRGSFEEVLPLKNILDEIKKPKNVTLILVGNKADLDHSRQVSTEEGEKLATELACAFYECSACTGEGNITEIFYELCREVRRRRMVQGKTRRRSSTTHVKQAINKMLTKISS

SEQ ID NO: 61057 - protein, 203 aa, Homo sapiens
MVSTYRVAVLGARGVGKSAIVRQFLYNEFSEVCVPTTARRLYLPAVVMNGHVHDLQILDFPPISAFPVNTLQEWADTCCRGLRSVHAYILVYDICCFDSFEYVKTIRQQILETRVIGTSETPIIIVGNKRDLQRGRVIPRWNVSHLVRKTWKCGYVECSAKYNWHILLLFSELLKSVGCARCKHVHAALRFQGALRRNRCAIM

SEQ ID NO: 61058 - protein, 242 aa, Homo sapiens
MRPLSMSGHFLLAPIPESSSDYLLPKDIKLAVLGAGRVGKSAMIVRFLTKRFIGDYEPNTGKLYSRLVYVEGDQLSLQIQDTPGGVQIQDSLPQVVDSLSKCVQWAEGFLLVYSITDYDSYLSIRPLYQHIRKVHPDSKAPVIIVGNKGDLLHARQVQTQDGIQLANELGSLFLEISTSENYEDVCDVFQHLCKEVSKMHGLSGERRRASIIPRPRSPNMQDLKRRFKQALSPKVKAPSALG

SEQ ID NO: 61059 - protein, 248 aa, Homo sapiens
MRLIQNMCTIAEYPAPGNAAASDCCVGAAGRRLVKIAVVGASGVGKTALVVRFLTKRFIGDYERNAGNLYTRQVQIEGETLALQVQDTPGIQVHENSLSCSEQLNRCIRWADAVVIVFSITDYKSYELISQLHQHVQQLHLGTRLPVVVVANKADLLHIKQVDPQLGLQLASMLGCSFYEVSVSENYNDVYSAFHVLCKEVSHKQQPSSTPEKRRTSLIPRPKSPNMQDLKRRFKQALSAKVRTVTSV

SEQ ID NO: 61060 - protein, 308 aa, Homo sapiens
MTLNGGGSGAGGSRGGGQERERRRGSTPWGPAPPLHRRSMPVDERDLQAALTPGALTAAAAGTGTQGPRLDWPEDSEDSLSSGGSDSDESVYKVLLLGAPGVGKSALARIFGGVEDGPEAEAAGHTYDRSIVVDGEEASLMVYDIWEQDGGRWLPGHCMAMGDAYVIVYSVTDKGSFEKASELRVQLRRARQTDDVPIILVGNKSDLVRSREVSVDEGRACAVVFDCKFIETSAALHHNVQALFEGVVRQIRLRRDSKEANARRQAGTRRRESLGKKAKRFLGRIVARNSRKMAFRAKSKSCHDLSVL

SEQ ID NO: 61061 - protein, 308 aa, Homo sapiens; identical to SEQ ID NO: 61060

SEQ ID NO: 61062 - protein, 192 aa, Homo sapiens
MQAIKCVVVGDGAVGKTCLLISYTTNAFPGEYIPTVFDNYSANVMVDGKPVNLGLWDTAGQEDYDRLRPLSYPQTDVFLICFSLVSPASFENVRAKWYPEVRHHCPHTPILLVGTKLDLRDDKDTIERLRDKKLAPITYPQGLAMAREIGSVKYLECSALTQRGLKTVFDEAIRAVLCPPPVKKPGKKCTVF

SEQ ID NO: 61063 - protein, 313 aa, Homo sapiens
MPNTAMKKKVLLMGKSGSGKTSMRSIIFANYIARDTRRLGATIDVEHSHVRFLGNLVLNLWDCGGQDTFMENYFTSQRDNIFRNVEVLIYVFDVESRELEKDMHYYQSCLEAILQNSPDAKIFCLVHKMDLVQEDQRDLIFKEREEDLRRLSRPLECACFRTSIWDETLYKAWSSIVYQLIPNVQQLEMNLRNFAQIIEADEVLLFERATFLVISHYQCKEQRDVHRFEKISNIIKQFKLSCSKLAASFQSMEVRNSNFAAFIDIFTSNTYVMVVMSDPSIPSAATLINIRNARKHFEKLERVDGPKHSLLMR

SEQ ID NO: 61064 - protein, 374 aa, Homo sapiens
MEESDSEKTTEKENLGPRMDPPLGEPEGSLGWVLPNTAMKKKVLLMGKSGSGKTSMRSIIFANYIARDTRRLGATILDRIHSLQINSSLSTYSLVDSVGNTKTFDVEHSHVRFLGNLVLNLWDCGGQDTFMENYFTSQRDNIFRNVEVLIYVFDVESRELEKDMHYYQSCLEAILQNSPDAKIFCLVHKMDLVQEDQRDLIFKEREEDLRRLSRPLECSCFRTSIWDETLYKAWSSIVYQLIPNVQQLEMNLRNFAEIIEADEVLLFERATFLVISHYQCKEQRDAHRFEKISNIIKQFKLSCSKLAASFQSMEVRNSNFAAFIDIFTSNTYVMVVMSDPSIPSAATLINIRNARKHFEKLERVDGPKQCLLMR

SEQ ID NO: 61065 - protein, 346 aa, Homo sapiens
MEESDSEKTTEKENLGPRMDPPLGEPEGSLGWVLPNTAMKKKVLLMGKSGSGKTSMRSIIFANYIARDTRRLGATIDVEHSHVRFLGNLVLNLWDCGGQDTFMENYFTSQRDNIFRNVEVLIYVFDVESRELEKDMHYYQSCLEAILQNSPDAKIFCLVHKMDLVQEDQRDLIFKEREEDLRRLSRPLECSCFRTSIWDETLYKAWSSIVYQLIPNVQQLEMNLRNFAEIIEADEVLLFERATFLVISHYQCKEQRDAHRFEKISNIIKQFKLSCSKLAASFQSMEVRNSNFAAFIDIFTSNTYVMVVMSDPSIPSAATLINIRNARKHFEKLERVDGPKQCLLMR

SEQ ID NO: 61066 - protein, 194 aa, Homo sapiens
MKKKVLLMGKSGSGKTSMRSIIFANYIARDTRRLGATIDVEHSHVRFLGNLVLNLWDCGGQDTFMENYFTSQRDNIFRNVEVLIYVFDVESRELEKDMHYYQSCLEAILQNSPDAKIFCLVHKMDLVQEDQRDLIFKEREEDLRRLSRPLECSCFRTSIWDETLYKAWSSIVYQLIPNVQQLEMNLRNFAEIIE

SEQ ID NO: 61067 - protein, 399 aa, Homo sapiens
MSLQYGAEETPLAGSYGAADSFPKDFGYGVEEEEEEAAAAGGGVGAGAGGGCGPGGADSSKPRILLMGLRRSGKSSIQKVVFHKMSPNETLFLESTNKIYKDDISNSSFVNFQIWDFPGQMDFFDPTFDYEMIFRGTGALIYVIDAQDDYMEALTRLHITVSKAYKVNPDMNFEVFIHKVDGLSDDHKIETQRDIHQRANDDLADAGLEKLHLSFYLTSIYDHSIFEAFSKVVQKLIPQLPTLENLLNIFISNSGIEKAFLFDVVSKIYIATDSSPVDMQSYELCCDMIDVVIDVSCIYGLKEDGSGSAYDKESMAIIKLNNTTVLYLKEVTKFLALVCILREESFERKGLIDYNFHCFRKAIHEVFEVGVTSHRSCGHQTSASSLKALTHNGTPRNAI

SEQ ID NO: 61068 - protein, 249 aa, Homo sapiens
MEALARLHLTVTRAYKVNTDINFEVFIHKVDGLSDDHKIETQRDIHQRANDDLADAGLEKIHLSFYLTSIYDHSIFEAFSKVVQKLIPQLPTLENLLNIFISNSGIEKAFLFDVVSKIYIATDSTPVDMQTYELCCDMIDVVIDISCIYGLKEDGAGTPYDKESTAIIKLNNTTVLYLKEVTKFLALVCFVREESFERKGLIDYNFHCFRKAIHEVFEVRMKVVKSRKVQNRLQKKKRATPNGTPRVLL

SEQ ID NO: 61069 - protein, 400 aa, Homo sapiens
MSQVLGKPQPQDEDDAEEEEEEDELVGLADYGDGPDSSDADPDSGTEEGVLDFSDPFSTEVKPRILLMGLRRSGKSSIQKVVFHKMSPNETLFLESTNKICREDVSNSSFVNFQIWDFPGQIDFFDPTFDYEMIFRGTGALIFVIDSQDDYMEALARLHLTVTRAYKVNTDINFEVFIHKVDGLSDDHKIETQRDIHQRANDDLADAGLEKIHLSFYLTSIYDHSIFEAFSKVVQKLIPQLPTLENLLNIFISNSGIEKAFLFDVVSKIYIATDSTPVDMQTYELCCDMIDVVIDISCIYGLKEDGAGTPYDKESTAIIKLNNTTVLYLKEVTKFLALVCFVREESFERKGLIDYNFHCFRKAIHEVFEVRMKVVKSRKVQNRLQKKKRATPNGTPRVLL

SEQ ID NO: 61070 - protein, 115 aa, Homo sapiens
MLRDTMKSWNDSQSDLCSTDQEEEEEMIFGENEDDLDEMMDLSDLPTSLFACSVHEAVFEAREQKERNMNFTREQSRHPAWWFMSVKVKLKRKKRQKTPNRKLPRRGAPTLRPQR

SEQ ID NO: 61071 - protein, 241 aa, Homo sapiens
MLRDTMKSWNDSQSDLCSTDQEEEEEMIFGENEDDLDEMMDLSDLPTSLFACSVHEAVFEAREQKERFEALFTIYDDQVTFQLFKSFRRVRINFSKPEAAARARIELHETDFNGQKLKLYFAQVQMSGEVRDKSYLLPPQPVKQFLISPPASPPVGWKQSEDAMPVINYDLLCAVSKLGPGEKYELHAGTESTPSVVVHVCESETEEEEETKNPKQKIAQTRRPDPPTAALNEPQTFDCAL

SEQ ID NO: 61072 - protein, 173 aa, Homo sapiens
MLRDTMKSWNDSQSDLCSTDQEEEEEMIFGENEDDLDEMMDLSDLPTSLFACSVHEAVFEAREQKERFEALFTIYDDQVTFQLFKSFRRVRINFSKPEAAARARIELHETDFNGQKLKLYFAQERNMNFTREQSRHPAWWFMSVKVKLKRKKRQKTPNRKLPRRGAPTLRPQR

SEQ ID NO: 61073 - protein, 65 aa, Homo sapiens
MLRDTMKSWNDSQSDLCSTDQEEEEEMIFGENEDDLDEMMDLSDLPTSLFACSVHEAVFEAREQK

SEQ ID NO: 61074 - protein, 231 aa, Homo sapiens
MLRDTMKSWNDSQSDLCSTDQEEEEEMIFGENEDDLDEMMDLSDLPTSLFACSVHEAVFEAREQKERFEALFTIYDDQVTFQLFKSFRRVRINFSKPEAAARARIELHETDFNGQKLKLYFAQSYLLPPQPVKQFLISPPASPPVGWKQSEDAMPVINYDLLCAVSKLGPGEKYELHAGTESTPSVVVHVCESETEEEEETKNPKQKIAQTRRPDPPTAALNEPQTFDCAL

SEQ ID NO: 61075 - protein, 183 aa, Homo sapiens
MLRDTMKSWNDSQSDLCSTDQEEEEEMIFGENEDDLDEMMDLSDLPTSLFACSVHEAVFEAREQKVQMSGEVRDKSYLLPPQPVKQFLISPPASPPVGWKQSEDAMPVINYDLLCAVSKLGPGEKYELHAGTESTPSVVVHVCESETEEEEETKNPKQKIAQTRRPDPPTAALNEPQTFDCAL

SEQ ID NO: 61076 - protein, 299 aa, Homo sapiens
MHSLATAAPVPTTLAQVDREKIYQWINELSSPETRENALLELSKKRESVPDLAPMLWHSFGTIAALLQEIVNIYPSINPPTLTAHQSNRVCNALALLQCVASHPETRSAFLAAHIPLFLYPFLHTVSKTRPFEYLRLTSLGVIGALVKTDEQEVINFLLTTEIIPLCLRIMESGSELSKTVATFILQKILLDDTGLAYICQTYERFSHVAMILGKMVLQLSKEPSARLLKHVVRCYLRLSDNPRAREALRQCLPDQLKDTTFAQVLKDDTTTKRWLAQLVKNLQEGQVTDPRGIPLPPQ

SEQ ID NO: 61077 - protein, 331 aa, Homo sapiens
MHSLATAAPVPTTLAQVDREKIYQWINELSSPETRENALLELSKKRESVPDLAPMLWHSFGTIAALLQEIVNIYPSINPPTLTAHQSNRVCNALALLQCVASHPETRSAFLAAHIPLFLYPFLHTVSKTRPFEYLRLTSLGVIVETGFHHVGQADLELPTSSDLPASASQSAGITGALVKTDEQEVINFLLTTEIIPLCLRIMESGSELSKTVATFILQKILLDDTGLAYICQTYERFSHVAMILGKMVLQLSKEPSARLLKHVVRCYLRLSDNPRAREALRQCLPDQLKDTTFAQVLKDDTTTKRWLAQLVKNLQEGQVTDPRGIPLPPQ

SEQ ID NO: 61078 - protein, 299 aa, Homo sapiens; identical to SEQ ID NO: 61076

SEQ ID NO: 61079 - protein, 258 aa, Homo sapiens
MHSLATAAPVPTTLAQVDREKIYQWINELSSPETRENALLELSKKRESVPDLAPMLWHSFGTIAALLQEIVNIYPSINPPTLTAHQSNRVCNALALLQCVASHPETRSAFLAAHIPLFLYPFLHTVSKTRPFEYLRLTSLGVIGALVKTDEQEVINFLLTTEIIPLCLRIMESGSELSKTVATFILQKILLDDTGLAYICQTYERFSHVAMILGKMVLQLSKEPSARLLKHVVRCYLRLSDNPRFSDLTFCWSSFQRK

SEQ ID NO: 61080 - protein, 329 aa, Homo sapiens
MAALGGDGLRLLSVSRPERPPESAALGGLGPGLCCWVSVFSCLSLACSYVGSLYVWKSELPRDHPAVIKRRFTSVLVVSSLSPLCVLLWRELTGIQPGTSLLTLMGFRLEGIFPAALLPLLLTMILFLGPLMQLSMDCPCDLADGLKVVLAPRSWARCLTDMRWLRNQVIAPLTEELVFRACMLPMLAPCMGLGPAVFTCPLFFGVAHFHHIIEQLRFRQSSVGNIFLSAAFQFSYTAVFGAYTAFLFIRTGHLIGPVLCHSFCNYMGFPAVCAALEHPQRRPLLAGYALGVGLFLLLLQPLTDPKLYGSLPLCVLLERAGDSEAPLCS

SEQ ID NO: 61081 - protein, 308 aa, Homo sapiens
MAALGGDGLRLLSVSRPERPPESAALGGLGPGLCCWVSVFSCLSLACSYVGSLYVWKSELPRDHPAVIKRRFTSVLVVSSLSPLCVLLWRELTGIQPGTSLLTLMGFRLEGIFPAALLPLLLTMILFLGPLMQLSMDCPCDLADGLKVVLAPRSWARCLTDMRWLRNQVIAPLTEELVFRACMLPMLAPCMGLGPAVFTCPLFFGVAHFHHIIEQLRFRQSSVGNIFLSAGHLIGPVLCHSFCNYMGFPAVCAALEHPQRRPLLAGYALGVGLFLLLLQPLTDPKLYGSLPLCVLLERAGDSEAPLCS

SEQ ID NO: 61082 - protein, 387 aa, Homo sapiens
MVPKGATMLVIPPGLSEEEEALQKKFNKLKKKKKALLALKKQSSSSTTSQGGVKRSLSEQPVMDTATATEQAKQLVKSGAISAIKAETKNSGFKRSRTLEGKLKDPEKGPVPTFQPFQRSISADDDLQESSRRPQRKSLYESFVSSSDRLRELGPDGEEAEGPGAGDGPPRSFDWGYEERSGAHSSASPPRSRSRDRSHERNRDRDRDRERDRDRDRDRDRERDRDRDRDRDRDRERDRDRERDRDRDREGPFRRSDSFPERRAPRKGNTLYVYGEDMTPTLLRGAFSPFGNIIDLSMDPPRNCAFVTYEKMESADQAVAELNGTQVESVQLKVNIARKQPMLDAATGKSVWGSLAVQNSPKGCHRDKRTQIVYSDDVYKENLVDGF

SEQ ID NO: 61083 - protein, 380 aa, Homo sapiens
MLVIPPGLSEEEEALQKKFNKLKKKKKALLALKKQSSSSTTSQGGVKRSLSEQPVMDTATATEQAKQLVKSGAISAIKAETKNSGFKRSRTLEGKLKDPEKGPVPTFQPFQRSISADDDLQESSRRPQRKSLYESFVSSSDRLRELGPDGEEAEGPGAGDGPPRSFDWGYEERSGAHSSASPPRSRSRDRSHERNRDRDRDRERDRDRDRDRDRERDRDRDRDRDRDRERDRDRERDRDRDREGPFRRSDSFPERRAPRKGNTLYVYGEDMTPTLLRGAFSPFGNIIDLSMDPPRNCAFVTYEKMESADQAVAELNGTQVESVQLKVNIARKQPMLDAATGKSVWGSLAVQNSPKGCHRDKRTQIVYSDDVYKENLVDGF

SEQ ID NO: 61084 - protein, 380 aa, Homo sapiens; identical to SEQ ID NO: 61083

SEQ ID NO: 61085 - protein, 380 aa, Homo sapiens; identical to SEQ ID NO: 61083

SEQ ID NO: 61086 - protein, 294 aa, Homo sapiens [sequence omitted]

SEQ ID NO: 61087 - protein, 159 aa, Homo sapiens
MLVIPPGLSEEEEALQKKFNKLKKKKKALLALKKQSSSSTTSQGGVKRSLSEQPVMDTATATEQAKQLVKSGAISAIKAETKNSGFKRSRTLEGKLKDPEKGPVPTFQPFQRSISADDDLQESSRRPQRKSLYESFVSSSDRLRELGPDGEEAEGPGAG

SEQ ID NO: 61088 - protein, 240 aa, Homo sapiens
MLVIPPGLSEEEEALQKKFNKLKKKKKALLALKKQSSSSTTSQGGVKRSLSEQPVMDTATATEQAKQLVKSGAISAIKAETKNSGFKRSRTLEGKLKDPEKGPVPTFQPFQRSISADDDLQESSRRPQRKSLYESDRLRELGPDGEEAEGPGAGDGPPRSFDWGYEERSGAHSSASPPRSRSRDRSHERNRDRDRDRERDRDRDRDRDRERDRDRDRDRDRDRERDRDRERDRDRDREGP

SEQ ID NO: 61089 - protein, 159 aa, Homo sapiens; identical to SEQ ID NO: 61087

SEQ ID NO: 61090 - protein, 159 aa, Homo sapiens; identical to SEQ ID NO: 61087

SEQ ID NO: 61091 - protein, 334 aa, Homo sapiens [sequence omitted]

SEQ ID NO: 61092 - protein, 240 aa, Homo sapiens; identical to SEQ ID NO: 61088

SEQ ID NO: 61093 - protein, 159 aa, Homo sapiens; identical to SEQ ID NO: 61087

SEQ ID NO: 61094 - protein, 334 aa, Homo sapiens [sequence omitted]

SEQ ID NO: 61095 - protein, 159 aa, Homo sapiens; identical to SEQ ID NO: 61087

SEQ ID NO: 61096 - protein, 380 aa, Homo sapiens; identical to SEQ ID NO: 61083

SEQ ID NO: 61097 - protein, 294 aa, Homo sapiens [sequence omitted]

SEQ ID NO: 61098 - protein, 240 aa, Homo sapiens; identical to SEQ ID NO: 61088

SEQ ID NO: 61099 - protein, 294 aa, Homo sapiens [sequence omitted]

SEQ ID NO: 61100 - protein, 334 aa, Homo sapiens [sequence omitted]

SEQ ID NO: 61101 - protein, 334 aa, Homo sapiens [sequence omitted]

SEQ ID NO: 61102 - protein, 334 aa, Homo sapiens [sequence omitted]

SEQ ID NO: 61103 - protein, 350 aa, Homo sapiens
MLVIPPGLSEEEEALQKKFNKLKKKKKALLALKKQSSSSTTSQGGVKRSLSEQPVMDTATATEQAKQLVKSGAISAIKAETKNSGFKRSRTLEGKLKDPEKGPVPTFQPFQRSISADDDLQESSRRPQRKSLYESFDWGYEERSGAHSSASPPRSRSRDRSHERNRDRDRDRERDRDRDRDRDRERDRDRDRDRDRDRERDRDRERDRDRDREGPFRRSDSFPERRAPRKGNTLYVYGEDMTPTLLRGAFSPFGNIIDLSMDPPRNCAFVTYEKMESADQAVAELNGTQVESVQLKVNIARKQPMLDAATGKSVWGSLAVQNSPKGCHRDKRTQIVYSDDVYKENLVDGF

SEQ ID NO: 61104 - protein, 380 aa, Homo sapiens; identical to SEQ ID NO: 61083

SEQ ID NO: 61105 - protein, 240 aa, Homo sapiens; identical to SEQ ID NO: 61088

SEQ ID NO: 61106 - protein, 334 aa, Homo sapiens [sequence omitted]

SEQ ID NO: 61107 - protein, 294 aa, Homo sapiens [sequence omitted]

SEQ ID NO: 61108 - protein, 294 aa, Homo sapiens [sequence omitted]

SEQ ID NO: 61109 - protein, 294 aa, Homo sapiens [sequence omitted]

SEQ ID NO: 61110 - protein, 240 aa, Homo sapiens; identical to SEQ ID NO: 61088

SEQ ID NO: 61111 - protein, 380 aa, Homo sapiens; identical to SEQ ID NO: 61083

SEQ ID NO: 61112 - protein, 159 aa, Homo sapiens; identical to SEQ ID NO: 61087

SEQ ID NO: 61113 - protein, 387 aa, Homo sapiens; identical to SEQ ID NO: 61082

SEQ ID NO: 61114 - protein, 387 aa, Homo sapiens; identical to SEQ ID NO: 61082

SEQ ID NO: 61115 - protein, 387 aa, Homo sapiens; identical to SEQ ID NO: 61082

SEQ ID NO: 61116 - protein, 387 aa, Homo sapiens; identical to SEQ ID NO: 61082

SEQ ID NO: 61117 - protein, 387 aa, Homo sapiens; identical to SEQ ID NO: 61082

SEQ ID NO: 61118 - protein, 1097 aa, Homo sapiens
MATQVMGQSSGGGGLFTSSGNIGMALPNDMYDLHDLSKAELAAPQLIMLANVALTGEVNGSCCDYLVGEERQMAELMPVGDNNFSDSEEGEGLEESADIKGEPHGLENMELRSLELSVVEPQPVFEASGAPDIYSSNKDLPPETPGAEDKGKSSKTKPFRCKPCQYEAESEEQFVHHIRVHSAKKFFVEESAEKQAKARESGSSTAEEGDFSKGPIRCDRCGYNTNRYDHYTAHLKHHTRAGDNERVYKCIICTYTTVSEYHWRKHLRNHFPRKVYTCGKCNYFSDRKNNYVQHVRTHTGERPYKCELCPYSSSQKTHLTRHMRTHSGEKPFKCDQCSYVASNQHEVTRHARQVHNGPKPLNCPHCDYKTADRSNFKKHVELHVNPRQFNCPVCDYAASKKCNLQYHFKSKHPTCPNKTMDVSKVKLKKTKKREADLPDNITNEKTEIEQTKIKGDVAGKKNEKSVKAEKRDVSKEKKPSNNVSVIQVTTRTRKSVTEVKEMDVHTGSNSEKFSKTKKSKRKLEVDSHSLHGPVNDEESSTKKKKKVESKSKNNSQEVPKGDSKVEENKKQNTCMKKSTKKKTLKNKSSKKSSKPPQKEPVEKGSAQMDPPQMGPAPTEAVQKGPVQVEPPPPMEHAQMEGAQIRPAPDEPVQMEVVQEGPAQKELLPPVEPAQMVGAQIVLAHMELPPPMETAQTEVAQMGPAPMEPAQMEVAQVESAPMQVVQKEPVQMELSPPMEVVQKEPVQIELSPPMEVVQKEPVKIELSPPIEVVQKEPVQMELSPPMGVVQKEPAQREPPPPREPPLHMEPISKKPPLRKDKKEKSNMQSERARKEQVLIEVGLVPVKDSWLLKESVSTEDLSPPSPPLPKENLREEASGDQKLLNTGEGNKEAPLQKVGAEEADESLPGLAANINESTHISSSGQNLNTPEGETLNGKHQTDSIVCEMKMDTDQNTRENLTGINSTVEEPVSPMLPPSAVEEREAVSKTALASPPATMAANESQEIDEDEGIHSHEGSDLSDNMSEGSDDSGLHGARPVPQESSRKNAKEALAVKAAKGDFVCIFCDRSFRKGKDYSKHLNRHLVNVYYLEEAAQGQE

SEQ ID NO: 61119 - protein, 1074 aa, Homo sapiens
MATQVMGQSSGGGGLFTSSGNIGMALPNDMYDLHDLSKAELAAPQLIMLANVALTGEVNGSCCDYLVGEERQMAELMPVGDNNFSDSEEGEGLEESADIKGEPHGLENMELRSLELSVVEPQPVFEASGAPDIYSSNKDLPPETPGAEDKGKSSKTKPFRCKPCQYEAESEEQFVHHIRVHSAKKFFVEESAEKQAKARESGSSTAEEGDFSKGPIRCDRCGYNTNRYDHYTAHLKHHTRAGDNERVYKCIICTYTTVSEYHWRKHLRNHFPRKVYTCGKCNYFSDRKNNYVQHVRTHTGKRPSGEKPFKCDQCSYVASNQHEVTRHARQVHNGPKPLNCPHCDYKTADRSNFKKHVELHVNPRQFNCPVCDYAASKKCNLQYHFKSKHPTCPNKTMDVSKVKLKKTKKREADLPDNITNEKTEIEQTKIKGDVAGKKNEKSVKAEKRDVSKEKKPSNNVSVIQVTTRTRKSVTEVKEMDVHTGSNSEKFSKTKKSKRKLEVDSHSLHGPVNDEESSTKKKKKVESKSKNNSQEVPKGDSKVEENKKQNTCMKKSTKKKTLKNKSSKKSSKPPQKEPVEKGSAQMDPPQMGPAPTEAVQKGPVQVEPPPPMEHAQMEGAQIRPAPDEPVQMEVVQEGPAQKELLPPVEPAQMVGAQIVLAHMELPPPMETAQTEVAQMGPAPMEPAQMEVAQVESAPMQVVQKEPVQMELSPPMEVVQKEPVQIELSPPMEVVQKEPVKIELSPPIEVVQKEPVQMELSPPMGVVQKEPAQREPPPPREPPLHMEPISKKPPLRKDKKEKSNMQSERARKEQVLIEVGLVPVKDSWLLKESVSTEDLSPPSPPLPKENLREEASGDQKLLNTGEGNKEAPLQKVGAEEADESLPGLAANINESTHISSSGQNLNTPEGETLNGKHQTDSIVCEMKMDTDQNTRENLTGINSTVEEPVSPMLPPSAVEEREAVSKTALASPPATMAANESQEIDEDEGIHSHEGSDLSDNMSEGSDDSGLHGARPVPQESSRKNAKEALAVKAAKGDFVCIFCDRSFRKGKDYSKHLNRHLVNVYYLEEAAQGQE

SEQ ID NO: 61120 - protein, 460 aa, Homo sapiens
MATQVMGQSSGGGGLFTSSGNIGMALPNDMYDLHDLSKAELAAPQLIMLANVALTGEVNGSCCDYLVGEERQMAELMPVGDNNFSDSEEGEGLEESADIKGEPHGLENMELRSLELSVVEPQPVFEASGAPDIYSSNKDLPPETPGAEDKGKSSKTKPFRCKPCQYEAESEEQFVHHIRVHSAKKFFVEESAEKQAKARESGSSTAEEGDFSKGPIRCDRCGYNTNRYDHYTAHLKHHTRAGDNERVYKCIICTYTTVSEYHWRKHLRNHFPRKVYTCGKCNYFSDRKNNYVQHVRTHTGERPYKCELCPYSSSQKTHLTRHMRTHSGEKPFKCDQCSYVASNQHEVTRHARQVHNGPKPLNCPHCDYKTADRSNFKKHVELHVNPRQFNCPVCDYAASKKCNLQYHFKSKHPTCPNKTMDVSKVKLKKTKKREADLPDNITNEKTEIEQTKKKKKKKKK

SEQ ID NO: 61121 - protein, 1914 aa, Homo sapiens
MADGKGDAAAVAGAGAEAPAVAGAGDGVETESMVRGHRPVSPAPGASGLRPCLWQLETELREQEVSEVSSLNYCRSFCQTLLQYASNKNASEHIVYLLEVYRLAIQSFASARPYLTTECEDVLLVLGRLVLSCFELLLSVSESELPCEVWLPFLQSLQESHDALLEFGNNNLQILVHVTKEGVWKNPVLLKILSQQPVETEEVNKLIAQEGPSFLQMRIKHLLKSNCIPQATALSKLCAESKEISNVSSFQQAYITCLCSMLPNEDAIKEIAKVDCKEVLDIICNLESEGQDNTAFVLCTTYLTQQLQTASVYCSWELTLFWSKLQRRIDPSLDTFLERCRQFGVIAKTQQHLFCLIRVIQTEAQDAGLGVSILLCVRALQLRSSEDEEMKASVCKTIACLLPEDLEVRRACQLTEFLIEPSLDGFNMLEELYLQPDQKFDEENAPVPNSLRCELLLALKAHWPFDPEFWDWKTLKRHCHQLLGQEASDSDDDLSGYEMSINDTDVLESFLSDYDEGKEDKQYRRRDLTDQHKEKRDKKPIGSSERYQRWLQYKFFCLLCKRECIEARILHHSKMHMEDGIYTCPVCIKKFKRKEMFVPHVMEHVKMPPSRRDRSKKKLLLKGSQKGICPKSPSAIPEQNHSLNDQAKGESHEYVTFSKLEDCHLQDRDLYPCPGTDCSRVFKQFKYLSVHLKAEHQNNDENAKHYLDMKNRREKCTYCRRHFMSAFHLREHEQVHCGPQPYMCVSIDCYARFGSVNELLNHKQKHDDLRYKCELNGCNIVFSDLGQLYHHEAQHFRDASYTCNFLGCKKFYYSKIEYQNHLSMHNVENSNGDIKKSVKLEESATGEKQDCINQPHLLNQTDKSHLPEDLFCAESANSQIDTETAENLKENSDSNSSDQLSHSSSASMNEELIDTLDHSETMQDVLLSNEKVFGPSSLKEKCSSMAVCFDGTKFTCGFDGCGSTYKNARGMQKHLRKVHPYHFKPKKIKTKDLFPSLGNEHNQTTEKLDAEPKPCSDTNSDSPDEGLDHNIHIKCKREHQGYSSESSICASKRPCTEDTMLELLLRLKHLSLKNSITHGSFSGSLQGYPSSGAKSLQSVSSISDLNFQNQDENMPSQYLAQLAAKPFFCELQGCKYEFVTREALLMHYLKKHNYSKEKVLQLTMFQHRYSPFQCHICQRSFTRKTHLRIHYKNKHQIGSDRATHKLLDNEKCDHEGPCSVDRLKGDCSAELGGDPSSNSEKPHCHPKKDECSSETDLESSCEETESKTSDISSPIGSHREEQEGREGRGSRRTVAKGNLCYILNKYHKPFHCIHKTCNSSFTNLKGLIRHYRTVHQYNKEQLCLEKDKARTKRELVKCKKIFACKYKECNKRFLCSKALAKHCSDSHNLDHIEEPKVLSEAGSAARFSCNQPQCPAVFYTFNKLKHHLMEQHNIEGEIHSDYEIHCDLNGCGQIFTHRSNYSQHVYYRHKDYYDDLFRSQKVANERLLRSEKVCQTADTQGHEHQTTRRSFNAKSKKCGLIKEKKAPISFKTRAEALHMCVEHSEHTQYPCMVQGCLSVVKLESSIVRHYKRTHQMSSAYLEQQMENLVVCVKYGTKIKEEPPSEADPCIKKEENRSCESERTEHSHSPGDSSAPIQNTDCCHSSERDGGQKGCIESSSVFDADTLLYRGTLKCNHSSKTTSLEQCNIVQPPPPCKIENSIPNPNGTESGTYFTSFQLPLPRIKESETRQHSSGQENTVKNPTHVPKENFRKHSQPRSFDLKTYKPMGFESSFLKFIQESEEKEDDFDDWEPSEHLTLSNSSQSSNDLTGNVVANNMVNDSEPEVDIPHSSSDSTIHENLTAIPPLIVAETTTVPSLENLRVVLDKALTDCGELALKQLHYLRPVVVLERSKFSTPILDLFPTKKTDELCVGSS

SEQ ID NO: 61122 - protein, 1607 aa, Homo sapiens
MFYHDLFYRELTLFWSKLQRRIDPSLDTFLERCRQFGVIAKTQQHLFCLIRVIQTEAQDAGLGVSILLCVRALQLRSSEDEEMKASVCKTIACLLPEDLEVRRACQLTEFLIEPSLDGFNMLEELYLQPDQKFDEENAPVPNSLRCELLLALKAHWPFDPEFWDWKTLKRHCHQLLGQEASDSDDDLSGYEMSINDTDVLESFLSDYDEGKEDKQYRRRDLTDQHKEKRDKKPIGSSERYQRWLQYKFFCLLCKRECIEARILHHSKMHMEDGIYTCPVCIKKFKRKEMFVPHVMEHVKMPPSRRDRSKKKLLLKGSQKGICPKSPSAIPEQNHSLNDQAKGESHEYVTFSKLEDCHLQDRDLYPCPGTDCSRVFKQFKYLSVHLKAEHQNNDENAKHYLDMKNRREKCTYCRRHFMSAFHLREHEQVHCGPQPYMCVSIDCYARFGSVNELLNHKQKHDDLRYKCELNGCNIVFSDLGQLYHHEAQHFRDASYTCNFLGCKKFYYSKIEYQNHLSMHNVENSNGDIKKSVKLEESATGEKQDCINQPHLLNQTDKSHLPEDLFCAESANSQIDTETAENLKENSDSNSSDQLSHSSSASMNEELIDTLDHSETMQDVLLSNEKVFGPSSLKEKCSSMAVCFDGTKFTCGFDGCGSTYKNARGMQKHLRKVHPYHFKPKKIKTKDLFPSLGNEHNQTTEKLDAEPKPCSDTNSDSPDEGLDHNIHIKCKREHQGYSSESSICASKRPCTEDTMLELLLRLKHLSLKNSITHGSFSGSLQGYPSSGAKSLQSVSSISDLNFQNQDENMPSQYLAQLAAKPFFCELQGCKYEFVTREALLMHYLKKHNYSKEKVLQLTMFQHRYSPFQCHICQRSFTRKTHLRIHYKNKHQIGSDRATHKLLDNEKCDHEGPCSVDRLKGDCSAELGGDPSSNSEKPHCHPKKDECSSETDLESSCEETESKTSDISSPIGSHREEQEGREGRGSRRTVAKGNLCYILNKYHKPFHCIHKTCNSSFTNLKGLIRHYRTVHQYNKEQLCLEKDKARTKRELVKCKKIFACKYKECNKRFLCSKALAKHCSDSHNLDHIEEPKVLSEAGSAARFSCNQPQCPAVFYTFNKLKHHLMEQHNIEGEIHSDYEIHCDLNGCGQIFTHRSNYSQHVYYRHKDYYDDLFRSQKVANERLLRSEKVCQTADTQGHEHQTTRRSFNAKSKKCGLIKEKKAPISFKTRAEALHMCVEHSEHTQYPCMVQGCLSVVKLESSIVRHYKRTHQMSSAYLEQQMENLVVCVKYGTKIKEEPPSEADPCIKKEENRSCESERTEHSHSPGDSSAPIQNTDCCHSSERDGGQKGCIESSSVFDADTLLYRGTLKCNHSSKTTSLEQCNIVQPPPPCKIENSIPNPNGTESGTYFTSFQLPLPRIKESETRQHSSGQENTVKNPTHVPKENFRKHSQPRSFDLKTYKPMGFESSFLKFIQESEEKEDDFDDWEPSEHLTLSNSSQSSNDLTGNVVANNMVNDSEPEVDIPHSSSDSTIHENLTAIPPLIVAETTTVPSLENLRVVLDKALTDCGELALKQLHYLRPVVVLERSKFSTPILDLFPTKKTDELCVGSS

SEQ ID NO: 61123 - protein, 546 aa, Homo sapiens [sequence omitted]

SEQ ID NO: 61124 - protein, 529 aa, Homo sapiens
MFYYPNVLQRHTGCFATIWLAATRGSRLVKREYLRVNVVKTCEEILNYVLVRVQPPQPGLPRPRFSLYLSAQLQIGVIRVYSQQCQYLVEDIQHILERLHRAQLQIRIDMETELPSLLLPNHLAMMETLEDAPDPFFGMMSVDPRLPSPFDIPQIRHLLEAAIPERVEEIPPEVPTEPREPERIPVTVLPPEAITILEAEPIRMLEIEGERELPEVSRRELDLLIAEEEAILLEIPRLPPPAPAEVEGIGEALGPEELRLTGWEPGALLMRRPPVPPPPRRRRRRRLLFWDKETQISPEKFQEQLQTRAHCWECPMVQPPERTIRGPAELFRTPTLSGWLPPELLGLWTHCAQPPPKALRRELPEEAAAEEERRKIEVPSEIEVPREALEPSVPLMVSLEISLEAAEEEKSRISLIPPEERWAWPEVEAPEAPALPVVPELPEVPMEMPLVLPPELELLSLEAVHRAVALELQANREPDFSSLVSPLSPRRMAARVFYLLLVLSAQQILHVKQEKPYGRLLIQPGPRFH

SEQ ID NO: 61125 - protein, 74 aa, Homo sapiens
MFYYPNVLQRHTGCFATIWLAATRGSRLVKREYLRVNVVKTCEEILNYVLVRVQPPQPGLPRPRFSLYLSAQLQ

SEQ ID NO: 61126 - protein, 546 aa, Homo sapiens [sequence omitted]

SEQ ID NO: 61127 - protein, 232 aa, Homo sapiens
MAGDTEVWKQMFQELMREVKPWHRWTLRPDKGLLPNVLKPGWMQYQQWTFARFQCSSCSRNWASAQVLVLFHMNWSEEKSRGQVKMRVFTQRCKKCPQPLFEDPEFTQENISRILKNLVFRILKKCYRGRFQLIEEVPMIKDISLEGPHNSDNCEACLQGFCAGPIQVTSLPPSQTPRVHSIYKVEEVVKPWASGENVYSYACQNHICRNLSIFCCCVILIVIVVIVVKTAI

SEQ ID NO: 61128 - protein, 246 aa, Homo sapiens
MVVDFWTWEQTFQELIQEAKPRATWTLKLDGNLQLDCLAQGWKQYQQRAFGWFRCSSCQRSWASAQVQILCHTYWEHWTSQGQVRMRLFGQRCQKCSWSQYEMPEFSSDSTMRILSNLVQHILKKYYGNGTRKSPEMPVILEVSLEGSHDTANCEACTLGICGQGLKSCMTKPSKSLLPHLKTGNSSPGIGAVYLANQAKNQSAEAKEAKGSGYEKLGPSRDPDPLNICVFILLLVFIVVKCFTSE

SEQ ID NO: 61129 - protein, 148 aa, Homo sapiens
MARALCRLPRRGLWLLLAHHLFMTTACQEANYGALLRELCLTQFQVDMEAVGETLWCDWGRTIRSYRELADCTWHMAEKLGCFWPNAEVDRFFLAVHGRYFRSCPISGRAVRDPPGSILYPFIVVPITVTLLVTALVVWQSKRTEGIV

SEQ ID NO: 61130 - protein, 126 aa, Homo sapiens
MTTACQEANYGALLRELCLTQFQVDMEAVGETLWCDWGRTIRSYRELADCTWHMAEKLGCFWPNAEVDRFFLAVHGRYFRSCPISGRAVRDPPGSILYPFIVVPITVTLLVTALVVWQSKRTEGIV

SEQ ID NO: 61131 - protein, 126 aa, Homo sapiens; identical to SEQ ID NO: 61130

SEQ ID NO: 61132 - protein, 126 aa, Homo sapiens; identical to SEQ ID NO: 61130

SEQ ID NO: 61133 - protein, 175 aa, Homo sapiens
MASLRVERAGGPRLPRTRVGRPAALRLLLLLGAVLNPHEALAQPLPTTGTPGSEGGTVKNYETAVQFCWNHYKDQMDPIEKDWCDWAMISRPYSTLRDCLEHFAELFDLGFPNPLAERIIFETHQIHFANCSLVQPTFSDPPEDVLLAMIIAPICLIPFLITLVVWRSKDSEAQA

SEQ ID NO: 61134 - protein, 148 aa, Homo sapiens
METGALRRPQLLPLLLLLCGGCPRAGGCNETGMLERLPLCGKAFADMMGKVDVWKWCNLSEFIVYYESFTNCTEMEANVVGCYWPNPLAQGFITGIHRQFFSNCTVDRVHLEDPPDEVLIPLIVIPVVLTVAMAGLVVWRSKRTDTLL

SEQ ID NO: 61135 - protein, 148 aa, Homo sapiens; identical to SEQ ID NO: 61134

SEQ ID NO: 61136 - protein, 151 aa, Homo sapiens
METGALRRPQLLPLLLLLCGGCPRAGGCNETGMLERLPLCGKAFADMMGKVDVWKWCNLSEFIVYYESFTNCTEMEANVVGCYWPNPLAQGFITGIHRQFFSNCTVDRVHLEDPPDEVLIPLIVIPVVLTVAMAGLVVWRSKRTDTLLCGN

SEQ ID NO: 61137 - protein, 201 aa, Homo sapiens
MVSWIISRLVVLIFGTLYPAYYSYKAVKSKDIKEYVKWMMYWIIFALFTTAETFTDIFLCWFPFYYELKIAFVAWLLSPYTKGSSLLYRKFVHPTLSSKEKEIDDCLVQAKDRSYDALVHFGKRGLNVAATAAVMAASKGQGALSERLRSFSMQDLTTIRGDGAPAPSGPPPPGSGRASGKHGQPKMSRSASESASSSGTA

SEQ ID NO: 61138 - protein, 174 aa, Homo sapiens
MDHLQAGGVKWMMYWIIFALFTTAETFTDIFLCWFPFYYELKIAFVAWLLSPYTKGSSLLYRKFVHPTLSSKEKEIDDCLVQAKDRSYDALVHFGKRGLNVAATAAVMAASKGQGALSERLRSFSMQDLTTIRGDGAPAPSGPPPPGSGRASGKHGQPKMSRSASESASSSGTA

SEQ ID NO: 61139 - protein, 208 aa, Homo sapiens
MQKVLSNGQTEEVRSGSRLIFGTLYPAYYSYKAVKSKDIKEYVKWMMYWIIFALFTTAETFTDIFLCWFPFYYELKIAFVAWLLSPYTKGSSLLYRKFVHPTLSSKEKEIDDCLVQAKDRSYDALVHFGKRGLNVAATAAVMAASKGQGALSERLRSFSMQDLTTIRGDGAPAPSGPPPPGSGRASGKHGQPKMSRSASESASSSGTA

SEQ ID NO: 61140 - protein, 180 aa, Homo sapiens
MSLHPCRLNNLPNQVKWMMYWIIFALFTTAETFTDIFLCWFPFYYELKIAFVAWLLSPYTKGSSLLYRKFVHPTLSSKEKEIDDCLVQAKDRSYDALVHFGKRGLNVAATAAVMAASKGQGALSERLRSFSMQDLTTIRGDGAPAPSGPPPPGSGRASGKHGQPKMSRSASESASSSGTA

SEQ ID NO: 61141 - protein, 143 aa, Homo sapiens
MVSWIISRLVVLIFGTLYPAYYSYKAVKSKDIKEYVKWMMYWIIFALFTTAETFTDIFLCWDRVPYRRDCGASACRTSPPSGETAPLLPRAPHHRGLGGPAANTASLRCPGVLLRALAAQAPPRILRSRFRKKSTSSSATETT

SEQ ID NO: 61142 - protein, 252 aa, Homo sapiens
MVSWIISRLVVLIFGTLYPAYSSYKAVKTKNVKEYVKWMMYWIVFAFFTTAETLTDIVLSWFPFYFELKIAFVIWLLSPYTKGSSVLYRKFVHPTLSNKEKEIDEYITQARDKSYETMMRVGKRGLNLAANAAVTAAAKGVLSEKLRSFSMQDLTLIRDEDALPLQRPDGRLRPSPGSLLDTIEDLGDDPALSLRSSTNPADSRTEASEDDMGDKAPKRAKPIKKAPKAEPLASKTLKTRPKKKTSGGGDSA

SEQ ID NO: 61143 - protein, 254 aa, Homo sapiens
MVSWIISRLVVLIFGTLYPAYSSYKAVKTKNVKEYVKWMMYWIVFAFFTTAETLTDIVLSWFPFYFELKIAFVIWLLSPYTKGSSVLYRKFVHPTLSNKEKEIDEYITQARDKSYETMMRVGKRGLNLAANAAVTAAAKGQGVLSEKLRSFSMQDLTLIRDEDALPLQRPDGRLRPSPGSLLDTIEDLGDDPALSLRSSTNPADSRTEASEDDMGDKAPKRAKPIKKAPKAEPLASKTLKTRPKKKTSGGGDSA

SEQ ID NO: 61144 - protein, 240 aa, Homo sapiens [sequence omitted]

SEQ ID NO: 61145 - protein, 255 aa, Homo sapiens
MVSWMISRAVVLVFGMLYPAYYSYKAVKTKNVKEYVRWMMYWIVFALYTVIETVADQTVAWFPLYYELKIAFVIWLLSPYTKGASLIYRKFLHPLLSSKEREIDDYIVQAKERGYETMVNFGRQGLNLAATAAVTAAVKSQGAITERLRSFSMHDLTTIQGDEPVGQRPYQPLPEAKKKSKPAPSESAGYGIPLKDGDEKTDEEAEGPYSDNEMLTHKGLRRSQSMKSVKTTKGRKEVRYGSLKYKVKKRPQVYF

SEQ ID NO: 61146 - protein, 257 aa, Homo sapiens
LMMWLLVERALIQLVFGMLYPAYYSYKAVKTKNVKEYVRWMMYWIVFALYTVIETVADQTVAWFPLYYELKIAFVIWLLSPYTKGASLIYRKFLHPLLSSKEREIDDYIVQAKERGYETMVNFGRQGLNLAATAAVTAAVKSQGAITERLRSFSMHDLTTIQGDEPVGQRPYQPLPEAKKKSKPAPSESAGYGIPLKDGDEKTDEEAEGPYSDNEMLTHKGLRRSQSMKSVKTTKGRKEVRYGSLKYKVKKRPQVYF

SEQ ID NO: 61147 - protein, 257 aa, Homo sapiens
MVSWMICRLVVLVFGMLCPAYASYKAVKTKNIREYVRWMMYWIVFALFMAAEIVTDIFISWFPFYYEIKMAFVLWLLSPYTKGASLLYRKFVHPSLSRHEKEIDAYIVQAKERSYETVLSFGKRGLNIAASAAVQAATKSQGALAGRLRSFSMQDLRSISDAPAPAYHDPLYLEDQVSHRRPPIGYRAGGLQDSDTEDECWSDTEAVPRAPARPREKPLIRSQSLRVVKRKPPVREGTSRSLKVRTRKKTVPSDVDS

SEQ ID NO: 61148 - protein, 173 aa, Homo sapiens
MVSWMICRLVVLVFGMLCPAYASYKAVKTKNIREYVRWMMYWIVFALFMAAEIVTDIFISWFPFYYEIKMAFVLWLLSPYTKGASLLYRKFVHPSLSRHEKEIDAYIVQAKERSYETVLSFGKRGLNIAASAAVQAATKGTGPGACRTATPRMSVGQILRQSPGRQPGPERSP

SEQ ID NO: 61149 - protein, 189 aa, Homo sapiens
MSAAMRERFDRFLHEKNCMTDLLAKLEAKTGVNRSFIALGVIGLVALYLVFGYGASLLCNLIGFGYPAYISIKAIESPNKEDDTQWLTYWVVYGVFSIAEFFSDIFLSWFPFYYMLKCGFLLWCMAPSPSNGAELLYKRIIRPFFLKHESQMDSVVKDLKDKAKETADAITKEAKKATVNLLGEEKKST

SEQ ID NO: 61150 - protein, 131 aa, Homo sapiens
MSAAMRERFDRFLHEKNCMTDLLAKLEAKTGVNRSFIALGVIGLVALYLVFGYGASLLCNLIGFGYPAYISIKAIESPNKEDDTQWLTYWVVYGVFSIAEFFSDIFLSWFPFYYMLKVWSGLGFLLPRCLL

SEQ ID NO: 61151 - protein, 184 aa, Homo sapiens
MDGLRQRVEHFLEQRNLVTEVLGALEAKTGVEKRYLAAGAVTLLSLYLLFGYGASLLCNLIGFVYPAYASIKAIESPSKDDDTVWLTYWVVYALFGLAEFFSDLLLSWFPFYYVGKCAFLLFCMAPRPWNGALMLYQRVVRPLFLRHHGAVDRIMNDLSGRALDAAAGITRNVKPSQTPQPKDK

SEQ ID NO: 61152 - protein, 937 aa, Homo sapiens
MHRPRRRGTRPPLLALLAALLLAARGAAAQETELSVSAELVPTSSWNISSELNKDSYLTLDEPMNNITTSLGQTAELHCKVSGNPPPTIRWFKNDAPVVQEPRRLSFRSTIYGSRLRIRNLDTTDTGYFQCVATNGKEVVSSTGVLFVKFGPPPTASPGYSDEYEEDGFCQPYRGIACARFIGNRTVYMESLHMQGEIENQITAAFTMIGTSSHLSDKCSQFAIPSLCHYAFPYCDETSSVPKPRDLCRDECEILENVLCQTEYIFARSNPMILMRLKLPNCEDLPQPESPEAANCIRIGIPMADPINKNHKCYNSTGVDYRGTVSVTKSGRQCQPWNSQYPHTHTFTALRFPELNGGHSYCRNPGNQKEAPWCFTLDENFKSDLCDIPACDSKDSKEKNKMEILYILVPSVAIPLAIALLFFFICVCRNNQKSSSAPVQRQPKHVRGQNVEMSMLNAYKPKSKAKELPLSAVRFMEELGECAFGKIYKGHLYLPGMDHAQLVAIKTLKDYNNPQQWTEFQQEASLMAELHHPNIVCLLGAVTQEQPVCMLFEYINQGDLHEFLIMRSPHSDVGCSSDEDGTVKSSLDHGDFLHIAIQIAAGMEYLSSHFFVHKDLAARNILIGEQLHVKISDLGLSREIYSADYYRVQSKSLLPIRWMPPEAIMYGKFSSDSDIWSFGVVLWEIFSFGLQPYYGFSNQEVIEMVRKRQLLPCSEDCPPRMYSLMTECWNEIPSRRPRFKDIHVRLRSWEGLSSHTSSTTPSGGNATTQTTSLSASPVSNLSNPRYPNYMFPSQGITPQGQIAGFIGPPIPQNQRFIPINGYPIPPGYAAFPAAHYQPTGPPRVIQHCPPPKSRSPSSASGSTSTGHVTSLPSSGSNQEANIPLLPHMSIPNHPGGMGITVFGNKSQKPYKIDSKQASLLGDANIHGHTESMISAEL

SEQ ID NO: 61153 - protein, 393 aa, Homo sapiens
MHRPRRRGTRPPLLALLAALLLAARGAAAQETELSVSAELVPTSSWNISSELNKDSYLTLDEPMNNITTSLGQTAELHCKVSGNPPPTIRWFKNDAPVVQEPRRLSFRSTIYGSRLRIRNLDTTDTGYFQCVATNGKEVVSSTGVLFVKFGPPPTASPGYSDEYEEDGFCQPYRGIACARFIGNRTVYMESLHMQGEIENQITAAFTMIGTSSHLSDKCSQFAIPSLCHYAFPYCDETSSVPKPRDLCRDECEILENVLCQTEYIFARSNPMILMRLKLPNCEDLPQPESPEAANCIRIGIPMADPINKNHKCYNSTGVDYRGTVSVTKSGRQCQPWNSQYPHTHTFTALRFPELNGGHSYCRNPGNQKEAPWCFTLDENFKSDLCDIPACGK

SEQ ID NO: 61154 - protein, 940 aa, Homo sapiens
RARGCSARRRGTRPPLLALLAALLLAARGAAAQETELSVSAELVPTSSWNISSELNKDSYLTLDEPMNNITTSLGQTAELHCKVSGNPPPTIRWFKNDAPVVQEPRRLSFRSTIYGSRLRIRNLDTTDTGYFQCVATNGKEVVSSTGVLFVKFGPPPTASPGYSDEYEEDGFCQPYRGIACARFIGNRTVYMESLHMQGEIENQITAAFTMIGTSSHLSDKCSQFAIPSLCHYAFPYCDETSSVPKPRDLCRDECEILENVLCQTEYIFARSNPMILMRLKLPNCEDLPQPESPEAANCIRIGIPMADPINKNHKCYNSTGVDYRGTVSVTKSGRQCQPWNSQYPHTHTFTALRFPELNGGHSYCRNPGNQKEAPWCFTLDENFKSDLCDIPACDSKDSKEKNKMEILYILVPSVAIPLAIALLFFFICVCRNNQKSSSAPVQRQPKHVRGQNVEMSMLNAYKPKSKAKELPLSAVRFMEELGECAFGKIYKGHLYLPGMDHAQLVAIKTLKDYNNPQQWTEFQQEASLMAELHHPNIVCLLGAVTQEQPVCMLFEYINQGDLHEFLIMRSPHSDVGCSSDEDGTVKSSLDHGDFLHIAIQIAAGMEYLSSHFFVHKDLAARNILIGEQLHVKISDLGLSREIYSADYYRVQSKSLLPIRWMPPEAIMYGKFSSDSDIWSFGVVLWEIFSFGLQPYYGFSNQEVIEMVRKRQLLPCSEDCPPRMYSLMTECWNEIPSRRPRFKDIHVRLRSWEGLSSHTSSTTPSGGNATTQTTSLSASPVSNLSNPRYPNYMFPSQGITPQGQIAGFIGPPIPQNQRFIPINGYPIPPGYAAFPAAHYQPTGPPRVIQHCPPPKSRSPSSASGSTSTGHVTSLPSSGSNQEANIPLLPHMSIPNHPGGMGITVFGNKSQKPYKIDSKQASLLGDANIHGHTESMISAEL

SEQ ID NO: 61155 - protein, 388 aa, Homo sapiens
MLFEYINQGDLHEFLIMRSPHSDVGCSSDEDGTVKSSLDHGDFLHIAIQIAAGMEYLSSHFFVHKDLAARNILIGEQLHVKISDLGLSREIYSADYYRVQSKSLLPIRWMPPEAIMYGKFSSDSDIWSFGVVLWEIFSFGLQPYYGFSNQEVIEMVRKRQLLPCSEDCPPRMYSLMTECWNEIPSRRPRFKDIHVRLRSWEGLSSHTSSTTPSGGNATTQTTSLSASPVSNLSNPRYPNYMFPSQGITPQGQIAGFIGPPIPQNQRFIPINGYPIPPGYAAFPAAHYQPTGPPRVIQHCPPPKSRSPSSASGSTSTGHVTSLPSSGSNQEANIPLLPHMSIPNHPGGMGITVFGNKSQKPYKIDSKQASLLGDANIHGHTESMISAEL

SEQ ID NO: 61156 - protein, 943 aa, Homo sapiens
MARGSALPRRPLLCIPAVWAAAALLLSVSRTSGEVEVLDPNDPLGPLDGQDGPIPTLKGYFLNFLEPVNNITIVQGQTAILHCKVAGNPPPNVRWLKNDAPVVQEPRRIIIRKTEYGSRLRIQDLDTTDTGYYQCVATNGMKTITATGVLFVRLGPTHSPNHNFQDDYHEDGFCQPYRGIACARFIGNRTIYVDSLQMQGEIENRITAAFTMIGTSTHLSDQCSQFAIPSFCHFVFPLCDARSRTPKPRELCRDECEVLESDLCRQEYTIARSNPLILMRLQLPKCEALPMPESPDAANCMRIGIPAERLGRYHQCYNGSGMDYRGTASTTKSGHQCQPWALQHPHSHHLSSTDFPELGGGHAYCRNPGGQMEGPWCFTQNKNVRMELCDVPSCSPRDSSKMGILYILVPSIAIPLVIACLFFLVCMCRNKQKASASTPQRRQLMASPSQDMEMPLINQHKQAKLKEISLSAVRFMEELGEDRFGKVYKGHLFGPAPGEQTQAVAIKTLKDKAEGPLREEFRHEAMLRARLQHPNVVCLLGVVTKDQPLSMIFSYCSHGDLHEFLVMRSPHSDVGSTDDDRTVKSALEPPDFVHLVAQIAAGMEYLSSHHVVHKDLATRNVLVYDKLNVKISDLGLFREVYAADYYKLLGNSLLPIRWMAPEAIMYGKFSIDSDIWSYGVVLWEVFSYGLQPYCGYSNQDVVEMIRNRQVLPCPDDCPAWVYALMIECWNEFPSRRPRFKDIHSRLRAWGNLSNYNSSAQTSGASNTTQTSSLSTSPVSNVSNARYVGPKQKAPPFPQPQFIPMKGQIRPMVPPPQLYVPVNGYQPVPAYGAYLPNFYPVQIPMQMAPQQVPPQMVPKPSSHHSGSGSTSTGYVTTAPSNTSMADRAALLSEGADDTQNAPEDGAQSTVQEAEEEEEGSVPETELLGDCDTLQVDEAQVQLEA

SEQ ID NO: 61157 - protein, 412 aa, Homo sapiens
MGQDQTKQQIEKGLQLYQSNQTEKALQVWTKVLEKSSDLMGRFRVLGCLVTAHSEMGRYKEMLKFAVVQIDTARELEDADFLLESYLNLARSNEKLCEFHKTISYCKTCLGLPGTRAGAQLGGQVSLSMGNAFLGLSVFQKALESFEKALRYAHNNDDAMLECRVCCSLGSFYAQVKDYEKALFFPCKAAELVNNYGKGWSLKYRAMSQYHMAVAYRLLGRLGSAMECCEESMKIALQHGDRPLQALCLLCFADIHRSRGDLETAFPRYDSAMSIMTEIGNRLGQVQALLGVAKCWVARKALDKALDAIERAQDLAEEVGNKLSQLKLHCLSESIYRSKGLQRELRAHVVRFHECVEETELYCGLCGESIGEKNSRLQALPCSHIFHLRCLQNNGTRSCPNCRRSSMKPGFV

SEQ ID NO: 61158 - protein, 353 aa, Homo sapiens
MGQDQTKQQIEKGLQLYQSNQTEKALQVWTKVLEKSSDLMGRFRVLGCLVTAHSEMGRYKEMLKFAVVQIDTARELEDADFLLESYLNLARSNEKLCEFHKTISYCKTCLGLPGTRAGAQLGGQVSLSMGNAFLGLSVFQKALESFEKALRYAHNNDDAMLECRVCCSLGSFYAQVKDYEKALFFPCKAAELVNNYGKGWSLKYRAMSQYHMAVAYRLLGRLGSAMECCEESMKIALQHGDRPLQALCLLCFADIHRSRGDLELSQLKLHCLSESIYRSKGLQRELRAHVVRFHECVEETELYCGLCGESIGEKNSRLQALPCSHIFHLRCLQNNGTRSCPNCRRSSMKPGFV

SEQ ID NO: 61159 - protein, 518 aa, Homo sapiens
MSCVKLWPSGAPAPLVSIEELENQELVGKGGFGTVFRAQHRKWGYDVAVKIVNSKAISREVKAMASLDNEFVLRLEGVIEKVNWDQDPKPALVTKFMENGSLSGLLQSQCPRPWPLLCRLLKEVVLGMFYLHDQNPVLLHRDLKPSNVLLDPELHVKLADFGLSTFQGGSQSGTGSGEPGGTLGYLAPELFVNVNRKASTASDVYSFGILMWAVLAGREVELPTEPSLVYEAVCNRQNRPSLAELPQAGPETPGLEGLKELMQLCWSSEPKDRPSFQECLPKTDEVFQMVENNMNAAVSTVKDFLSQLRSSNRRFSIPESGQGGTEMDGFRRTIENQHSRNDVMVSEWLNKLNLEEPPSSVPKKCPSLTKRSRAQEEQVPQAWTAGTSSDSMAQPPQTPETSTFRNQMPSPTSTGTPSPGPRGNQGAERQGMNWSCRTPEPNPVTGRPLVNIYNCSGVQVGDNNYLTMQQTTALPTWGLAPSGKGRGLQHPPPVGSQEGPKDPEAWSRPQGWYNHSGK

SEQ ID NO: 61160 - protein, 401 aa, Homo sapiens
MQRCWQGDPRVRPTFQEITSETEDLCEKPDDEVKETAHDLDVKSPPEPRSEVVPARLKRASAPTFDNDYSLSELLSQLDSGVSQAVEGPEELSRSSSESKLPSSGSGKRLSGVSSVDSAFSSRGSLSLSFEREPSTSDLGTTDVQKKKLVDAIVSGDTSKLMKILQPQDVDLALDSGASLLHLAVEAGQEECAKWLLLNNANPNLSNRRGSTPLHMAVERRVRGVVELLLARKISVNAKDEDQWTALHFAAQNGDESSTRLLLEKNASVNEVDFEGRTPMHVACQHGQENIVRILLRRGVDVSLQGKDAWHCTTLAGPPAHRQAAGQAAGGECERPDAGWEDAIAPGRTARALPRGPHPHRPVLRRQRLQPAGTDTPARPRRRGTRALPGCSCIGALARRP

SEQ ID NO: 61161 - protein, 784 aa, Homo sapiens
MEGDGGTPWALALLRTFDAGEFTGWEKVGSGGFGQVYKVRHVHWKTWLAIKCSPSLHVDDRERMELLEEAKKMEMAKFRYILPVYGICREPVGLVMEYMETGSLEKLLASEPLPWDLRFRIIHETAVGMNFLHCMAPPLLHLDLKPANILLDAHYHVKISDFGLAKCNGLSHSHDLSMDGLFGTIAYLPPERIREKSRLFDTKHDVYSFAIVIWGVLTQKKPFADEKNILHIMVKVVKGHRPELPPVCRARPRACSHLIRLMQRCWQGDPRVRPTFQEITSETEDLCEKPDDEVKETAHDLDVKSPPEPRSEVVPARLKRASAPTFDNDYSLSELLSQLDSGVSQAVEGPEELSRSSSESKLPSSGSGKRLSGVSSVDSAFSSRGSLSLSFEREPSTSDLGTTDVQKKKLVDAIVSGDTSKLMKILQPQDVDLALDSGASLLHLAVEAGQEECAKWLLLNNANPNLSNRRGSTPLHMAVERRVRGVVELLLARKISVNAKDEDQWTALHFAAQNGDESSTRLLLEKNASVNEVDFEGRTPMHVACQHGQENIVRILLRRGVDVSLQGKDAWLPLHYAAWQGHLPIVKLLAKQPGVSVNAQTLDGRTPLHLAAQRGHYRVARILIDLCSDVNVCSLLAQTPLHVAAETGHTSTARLLLHRGAGKEAMTSDGYTALHLAARNGHLATVKLLVEEKADVLARGPLNQTALHLAAAHGHSEVVEELVSADVIDLFDEQGLSALHLAAQGRHAQTVETLLRHGAHINLQSLKFQGGHGPAATLLRRSKT

SEQ ID NO: 61162 - protein, 832 aa, Homo sapiens
MEGDGGTPWALALLRTFDAGEFTGWEKVGSGGFGQVYKVRHVHWKTWLAIKCSPSLHVDDRERMELLEEAKKMEMAKFRYILPVYGICREPVGLVMEYMETGSLEKLLASEPLPWDLRFRIIHETAVGMNFLHCMAPPLLHLDLKPANILLDAHYHVKISDFGLAKCNGLSHSHDLSMDGLFGTIAYLPPERIREKSRLFDTKHDVYSFAIVIWGVLTQKKPFADEKNILHIMVKVVKGHRPELPPVCRARPRACSHLIRLMQRCWQGDPRVRPTFQGNGLNGELIRQVLAALLPVTGRWRSPGEGFRLESEVIIRVTCPLSSPQEITSETEDLCEKPDDEVKETAHDLDVKSPPEPRSEVVPARLKRASAPTFDNDYSLSELLSQLDSGVSQAVEGPEELSRSSSESKLPSSGSGKRLSGVSSVDSAFSSRGSLSLSFEREPSTSDLGTTDVQKKKLVDAIVSGDTSKLMKILQPQDVDLALDSGASLLHLAVEAGQEECAKWLLLNNANPNLSNRRGSTPLHMAVERRVRGVVELLLARKISVNAKDEDQWTALHFAAQNGDESSTRLLLEKNASVNEVDFEGRTPMHVACQHGQENIVRILLRRGVDVSLQGKDAWLPLHYAAWQGHLPIVKLLAKQPGVSVNAQTLDGRTPLHLAAQRGHYRVARILIDLCSDVNVCSLLAQTPLHVAAETGHTSTARLLLHRGAGKEAMTSDGYTALHLAARNGHLATVKLLVEEKADVLARGPLNQTALHLAAAHGHSEVVEELVSADVIDLFDEQGLSALHLAAQGRHAQTVETLLRHGAHINLQSLKFQGGHGPAATLLRRSKT

SEQ ID NO: 61163 - protein, 721 aa, Homo sapiens
MELLEEAKKMEMAKFRYILPVYGICREPVGLVMEYMETGSLEKLLASEPLPWDLRFRIIHETAVGMNFLHCMAPPLLHLDLKPANILLDAHYHVKISDFGLAKCNGLSHSHDLSMDGLFGTIAYLPPERIREKSRLFDTKHDVYSFAIVIWGVLTQKKPFADEKNILHIMVKVVKGHRPELPPVCRARPRACSHLIRLMQRCWQGDPRVRPTFQEITSETEDLCEKPDDEVKETAHDLDVKSPPEPRSEVVPARLKRASAPTFDNDYSLSELLSQLDSGVSQAVEGPEELSRSSSESKLPSSGSGKRLSGVSSVDSAFSSRGSLSLSFEREPSTSDLGTTDVQKKKLVDAIVSGDTSKLMKILQPQDVDLALDSGASLLHLAVEAGQEECAKWLLLNNANPNLSNRRGSTPLHMAVERRVRGVVELLLARKISVNAKDEDQWTALHFAAQNGDESSTRLLLEKNASVNEVDFEGRTPMHVACQHGQENIVRILLRRGVDVSLQGKDAWLPLHYAAWQGHLPIVKLLAKQPGVSVNAQTLDGRTPLHLAAQRGHYRVARILIDLCSDVNVCSLLAQTPLHVAAETGHTSTARLLLHRGAGKEAMTSDGYTALHLAARNGHLATVKLLVEEKADVLARGPLNQTALHLAAAHGHSEVVEELVSADVIDLFDEQGLSALHLAAQGRHAQTVETLLRHGAHINLQSLKFQGGHGPAATLLRRSKT

SEQ ID NO: 61164 - protein, 721 aa, Homo sapiens; identical to SEQ ID NO: 61163

SEQ ID NO: 61165 - protein, 1043 aa, Homo sapiens
MAASFPPTLGLSSAPDEIQHPHIKFSEWKFKLFRVRSFEKTPEEAQKEKKDSFEGKPSLEQSPAVLDKADGQKPVPTQPLLKAHPKFSKKFHDNEKARGKAIHQANLRHLCRICGNSFRADEHNRRYPVHGPVDGKTLGLLRKKEKRATSWPDLIAKVFRIDVKADVDSIHPTEFCHNCWSIMHRKFSSAPCEVYFPRNVTMEWHPHTPSCDICNTARRGLKRKSLQPNLQLSKKLKTVLDQARQARQHKRRAQARISSKDVMKKIANCSKIHLSTKLLAVDFPEHFVKSISCQICEHILADPVETNCKHVFCRVCILRCLKVMGSYCPSCRYPCFPTDLESPVKSFLSVLNSLMVKCPAKECNEEVSLEKYNHHISSHKESKEIFVHINKGGRPRQHLLSLTRRAQKHRLRELKLQVKAFADKEEGGDVKSVCMTLFLLALRARNEHRQADELEAIMQGKGSGLQPAVCLAIRVNTFLSCSQYHKMYRTVKAITGRQIFQPLHALRNAEKVLLPGYHHFEWQPPLKNVSSSTDVGIIDGLSGLSSSVDDYPVDTIAKRFRYDSALVSALMDMEEDILEGMRSQDLDDYLNGPFTVVVKESCDGMGDVSEKHGSGPVVPEKAVRFSFTIMKITIAHSSQNVKVFEEAKPNSELCCKPLCLMLADESDHETLTAILSPLIAEREAMKSSELMLELGGILRTFKFIFRGTGYDEKLVREVEGLEASGSVYICTLCDATRLEASQNLVFHSITRSHAENLERYEVWRSNPYHESVEELRDRVKGVSAKPFIETVPSIDALHCDIGNAAEFYKIFQLEIGEVYKNPNASKEERKRWQATLDKHLRKKMNLKPIMRMNGNFARKLMTKETVDAVCELIPSEERHEALRELMDLYLKMKPVWRSSCPAKECPESLCQYSFNSQRFAELLSTKFKYRYEGKITNYFHKTLAHVPEIIERDGSIGAWASEGNESGNKLFRRFRKMNARQSKCYEMEDVLKHHWLYTSKYLQKFMNAHNALKTSGFTMNPQASLGDPLGIEDSLESQDSMEF

SEQ ID NO: 61166 - protein, 527 aa, Homo sapiens
MSLQMVTVSNNIALIQPGFSLMNFDGQVFFFGQKGWPKRSCPTGVFHLDVKHNHVKLKPTIFSKDSCYLPPLRYPATCTFKGSLESEKHQYIIHGGKTPNNEVSDKIYVMSIVCKNNKKVTFRCTEKDLVGDVPEARYGHSINVVYSRGKSMGVLFGGRSYMPSTHRTTEKWNSVADCLPCVFLVDFEFGCATSYILPELQDGLSFHVSIAKNDTIYILGGHSLANNIRPANLYRIRVDLPLGSPAVNCTVLPGGISVSSAILTQTNNDEFVIVGGYQLENQKRMICNIISLEDNKIEIREMETPDWTPDIKHSKIWFGSNMGNGTVFLGIPGDNKQVVSEGFYFYMLKCAEDDTNEEQTTFTNSQTSTEDPGDSTPFEDSEEFCFSAEANSFDGDDEFDTYNEDDEEDESETGYWITCCPTCDVDINTWVPFYSTELNKPAMIYCSHGDGHWVHAQCMDLAERTLIHLSAGSNKYYCNEHVEIARALHTPQRVLPLKKPPMKSLRKKGSGKILTPAKKSFLRRLFD

SEQ ID NO: 61167 - protein, 71 aa, Homo sapiens
MSLQMVTVSNNIALIQPGFSLMNFDGQVFFFGQKGWPKRSCPTGVFHLDVKHNHVKLKPTIFSKDSCYLPP

SEQ ID NO: 61168 - protein, 150 aa, Homo sapiens
MSLQMVTVSNNIALIQPGFSLMNFDGQVFFFGQKGWPKRSCPTGVFHLDVKHNHVKLKPTIFSKDSCYLPPLRYPATCTFKGSLESEKHQYIIHGGKTPNNEVSDKIYVMSIVCKNNKKVTFRCTEKDLVGDVPEARYGHSINVVYSRGK

SEQ ID NO: 61169 - skipped

SEQ ID NO: 61170 - protein, 500 aa, Homo sapiens
MDHTEGSPAEEPPAHAPSPGKFGERPPPKRLTREAMRNYLKERGDQTVLILHAKVAQKSYGNEKRFFCPPPCVYLMGSGWKKKKEQMERDGCSEQESQPCAFIGIGNSDQEMQQLNLEGKNYCTAKTLYISDSDKRKHFMLSVKMFYGNSDDIGVFLSKRIKVISKPSKKKQSLKNADLCIASGTKVALFNRLRSQTVSTRYLHVEGGNFHASSQQWGAFFIHLLDDDESEGEEFTVRDGYIHYGQTVKLVCSVTGMALPRLIIRKVDKQTALLDADDPVSQLHKCAFYLKDTERMYLCLSQERIIQFQATPCPKEPNKEMINDGASWTIISTDKAEYTFYEGMGPVLAPVTPVPVVESLQLNGGGDVAMLELTGQNFTPNLRVWFGDVEAETMYRCGESMLCVVPDISAFREGWRWVRQPVQVPVTLVRNDGIIYSTSLTFTYTPEPGPRPHCSAAGAILRANSSQVPPNESNTNSEGSYTNASTNSTSVTSSTATVVS

SEQ ID NO: 61171 - protein, 486 aa, Homo sapiens
MAWIKRKFGERPPPKRLTREAMRNYLKERGDQTVLILHAKVAQKSYGNEKRFFCPPPCVYLMGSGWKKKKEQMERDGCSEQESQPCAFIGIGNSDQEMQQLNLEGKNYCTAKTLYISDSDKRKHFMLSVKMFYGNSDDIGVFLSKRIKVISKPSKKKQSLKNADLCIASGTKVALFNRLRSQTVSTRYLHVEGGNFHASSQQWGAFFIHLLDDDESEGEEFTVRDGYIHYGQTVKLVCSVTGMALPRLIIRKVDKQTALLDADDPVSQLHKCAFYLKDTERMYLCLSQERIIQFQATPCPKEPNKEMINDGASWTIISTDKAEYTFYEGMGPVLAPVTPVPVVESLQLNGGGDVAMLELTGQNFTPNLRVWFGDVEAETMYRCGESMLCVVPDISAFREGWRWVRQPVQVPVTLVRNDGIIYSTSLTFTYTPEPGPRPHCSAAGAILRANSSQVPPNESNTNSEGSYTNASTNSTSVTSSTATVVS

SEQ ID NO: 61172 - protein, 485 aa, Homo sapiens
MGGCRKFGERPPPKRLTREAMRNYLKERGDQTVLILHAKVAQKSYGNEKRFFCPPPCVYLMGSGWKKKKEQMERDGCSEQESQPCAFIGIGNSDQEMQQLNLEGKNYCTAKTLYISDSDKRKHFMLSVKMFYGNSDDIGVFLSKRIKVISKPSKKKQSLKNADLCIASGTKVALFNRLRSQTVSTRYLHVEGGNFHASSQQWGAFFIHLLDDDESEGEEFTVRDGYIHYGQTVKLVCSVTGMALPRLIIRKVDKQTALLDADDPVSQLHKCAFYLKDTERMYLCLSQERIIQFQATPCPKEPNKEMINDGASWTIISTDKAEYTFYEGMGPVLAPVTPVPVVESLQLNGGGDVAMLELTGQNFTPNLRVWFGDVEAETMYRCGESMLCVVPDISAFREGWRWVRQPVQVPVTLVRNDGIIYSTSLTFTYTPEPGPRPHCSAAGAILRANSSQVPPNESNTNSEGSYTNASTNSTSVTSSTATVVS

SEQ ID NO: 61173 - protein, 487 aa, Homo sapiens
MAPVVTGKFGERPPPKRLTREAMRNYLKERGDQTVLILHAKVAQKSYGNEKRFFCPPPCVYLMGSGWKKKKEQMERDGCSEQESQPCAFIGIGNSDQEMQQLNLEGKNYCTAKTLYISDSDKRKHFMLSVKMFYGNSDDIGVFLSKRIKVISKPSKKKQSLKNADLCIASGTKVALFNRLRSQTVSTRYLHVEGGNFHASSQQWGAFFIHLLDDDESEGEEFTVRDGYIHYGQTVKLVCSVTGMALPRLIIRKVDKQTALLDADDPVSQLHKCAFYLKDTERMYLCLSQERIIQFQATPCPKEPNKEMINDGASWTIISTDKAEYTFYEGMGPVLAPVTPVPVVESLQLNGGGDVAMLELTGQNFTPNLRVWFGDVEAETMYRCGESMLCVVPDISAFREGWRWVRQPVQVPVTLVRNDGIIYSTSLTFTYTPEPGPRPHCSAAGAILRANSSQVPPNESNTNSEGSYTNASTNSTSVTSSTATVVS

SEQ ID NO: 61174 - protein, 486 aa, Homo sapiens; identical to SEQ ID NO: 61171

SEQ ID NO: 61175 - protein, 500 aa, Homo sapiens; identical to SEQ ID NO: 61170

SEQ ID NO: 61176 - protein, 143 aa, Homo sapiens
MRNYLKERGDQTVLILHAKVAQKSYGNEKRFFCPPPCVYLMGSGWKKKKEQMERDGCSEQESQPCAFIGIGNSDQEMQQLNLEGKNYCTAKTLYISDSDKRKHFMLSVKMFYGNSDDIGVFLSKRIKVISKPSKKKQSLKNAD

SEQ ID NO: 61177 - protein, 28 aa, Homo sapiens
MAWIKRKFGERPPPKRLTREAMRNYLKE

SEQ ID NO: 61178 - protein, 97 aa, Homo sapiens
MAWIKRKFGERPPPKRLTREAMRNYLKERGDQTVLILHAKVAQKSYGNEKRFFCPPPCVYLMGSGWKKKKEQMERDGCSEQESQPCAFIGIGNSDQE

SEQ ID NO: 61179 - protein, 465 aa, Homo sapiens
MRNYLKERGDQTVLILHAKVAQKSYGNEKRFFCPPPCVYLMGSGWKKKKEQMERDGCSEQESQPCAFIGIGNSDQEMQQLNLEGKNYCTAKTLYISDSDKRKHFMLSVKMFYGNSDDIGVFLSKRIKVISKPSKKKQSLKNADLCIASGTKVALFNRLRSQTVSTRYLHVEGGNFHASSQQWGAFFIHLLDDDESEGEEFTVRDGYIHYGQTVKLVCSVTGMALPRLIIRKVDKQTALLDADDPVSQLHKCAFYLKDTERMYLCLSQERIIQFQATPCPKEPNKEMINDGASWTIISTDKAEYTFYEGMGPVLAPVTPVPVVESLQLNGGGDVAMLELTGQNFTPNLRVWFGDVEAETMYRCGESMLCVVPDISAFREGWRWVRQPVQVPVTLVRNDGIIYSTSLTFTYTPEPGPRPHCSAAGAILRANSSQVPPNESNTNSEGSYTNASTNSTSVTSSTATVVS

SEQ ID NO: 61180 - protein, 157 aa, Homo sapiens
MRNYLKERGDQTVLILHAKVAQKSYGNEKRFFCPPPCVYLMGSGWKKKKEQMERDGCSEQESQPCAFIGIGNSDQEMQQLNLEGKNYCTAKTLYISDSDKRKHFMLSVKMFYGNSDDIGVFLSKRIKVISKPSKKKQSLKNADLCIASGTKVALFNR

SEQ ID NO: 61181 - protein, 49 aa, Homo sapiens
MAWIKRKFGERPPPKRLTREAMRNYLKERGDQTVLILHAKVAQKSYGNE

SEQ ID NO: 61182 - protein, 107 aa, Homo sapiens
MAWIKRKFGERPPPKRLTREAMRNYLKERGDQTVLILHAKVAQKSYGNEKRFFCPPPCVYLMGSGWKKKKEQMERDGCSEQESQPCAFIGIGNSDQEMQQLNLEGKN

SEQ ID NO: 61183 - protein, 94 aa, Homo sapiens
MAWIKRKFGERPPPKRLTREAMRNYLKERGDQTVLILHAKVAQKSYGNEKRFFCPPPCVYLMGSGWKKKKEQMERDGCSEQESQPCAFIGIGNS

SEQ ID NO: 61184 - protein, 178 aa, Homo sapiens
MDHTEGSPAEEPPAHAPSPGKFGERPPPKRLTREAMRNYLKERGDQTVLILHAKVAQKSYGNEKRFFCPPPCVYLMGSGWKKKKEQMERDGCSEQESQPCAFIGIGNSDQEMQQLNLEGKNYCTAKTLYISDSDKRKHFMLSVKMFYGNSDDIGVFLSKRIKVISKPSKKKQSLKNAD

SEQ ID NO: 61185 - protein, 110 aa, Homo sapiens
MAWIKRKFGERPPPKRLTREAMRNYLKERGDQTVLILHAKVAQKSYGNEKRFFCPPPCVYLMGSGWKKKKEQMERDGCSEQESQPCAFIGIGNSDQEMQQLNLEGKNYCT

SEQ ID NO: 61186 - protein, 113 aa, Homo sapiens
MAWIKRKFGERPPPKRLTREAMRNYLKERGDQTVLILHAKVAQKSYGNEKRFFCPPPCVYLMGSGWKKKKEQMERDGCSEQESQPCAFIGIGNSDQEMQQLNLEGKNYCTAKT

SEQ ID NO: 61187 - protein, 48 aa, Homo sapiens
MAWIKRKFGERPPPKRLTREAMRNYLKERGDQTVLILHAKVAQKSYGN

SEQ ID NO: 61188 - protein, 189 aa, Homo sapiens
MRNYLKERGDQTVLILHAKVAQKSYGNEKRFFCPPPCVYLMGSGWKKKKEQMERDGCSEQESQPCAFIGIGNSDQEMQQLNLEGKNYCTAKTLYISDSDKRKHFMLSVKMFYGNSDDIGVFLSKRIKVISKPSKKKQSLKNADLCIASGTKVALFNRLRSQTVSTRYLHVEGGNFHASSQQWGAFFIHL

SEQ ID NO: 61189 - protein, 199 aa, Homo sapiens
MASVSALTEELDSITSELHAVEIQIQELTERQQELIQKKKVLTKKIKQCLEDSDAGASNEYDSSPAAWNKEDFPWSGKVKDILQNVFKLEKFRPLQLETINVTMAGKEVFLVMPTGGGKSLCYQLPALCSDGFTLVICPLISLMEDQLMVLKQLGISATMLNASSSKEHVKWVHAEMVNKNSELKLIYVTPEKIAKSKM

SEQ ID NO: 61190 - protein, 211 aa, Homo sapiens
MASVSALTEELDSITSELHAVEIQIQELTERQQELIQKKKVLTKKIKQCLEDSDAGASNEYDSSPAAWNKEDFPWSGKVKDILQNVFKLEKFRPLQLETINVTMAGKEVFLVMPTGGGKSLCYQLPALCSDGFTLVICPLISLMEDQLMVLKQLGISATMLNASSSKEHVKWVHAEMVNKNSELKLIYVTPEKIAKSKMFMSRLEKAYEAR

SEQ ID NO: 61191 - protein, 649 aa, Homo sapiens
MASVSALTEELDSITSELHAVEIQIQELTERQQELIQKKKVLTKKIKQCLEDSDAGASNEYDSSPAAWNKEDFPWSGKVKDILQNVFKLEKFRPLQLETINVTMAGKEVFLVMPTGGGKSLCYQLPALCSDGFTLVICPLISLMEDQLMVLKQLGISATMLNASSSKEHVKWVHAEMVNKNSELKLIYVTPEKIAKSKMFMSRLEKAYEARRFTRIAVDEVHCCSQWGHDFRPDYKALGILKRQFPNASLIGLTATATNHVLTDAQKILCIEKCFTFTASFNRPNLYYEVRQKPSNTEDFIEDIVKLINGRYKGQSGIIYCFSQKDSEQVTVSLQNLGIHAGAYHANLEPEDKTTVHRKWSANEIQVVVATVAFGMGIDKPDVRFVIHHSMSKSMENYYQESGRAGRDDMKADCILYYGFGDIFRISSMVVMENVGQQKLYEMVSYCQNISKCRRVLMAQHFDEVWNSEACNKMCDNCCKDSAFERKNITEYCRDLIKILKQAEELNEKLTPLKLIDSWMGKGAAKLRVAGVVAPTLPREDLEKIIAHFLIQQYLKEDYSFTAYATISYLKIGPKANLLNNEAHAITMQVTKSTQNSFRAESSQTCHSEQGDKKMEEKNSGNFQKKAANMLQQSGSKNTGAKKRKIDDA

SEQ ID NO: 61192 - protein, 649 aa, Homo sapiens; identical to SEQ ID NO: 61191

SEQ ID NO: 61193 - protein, 106 aa, Homo sapiens
MASVSALTEELDSITSELHAVEIQIQELTERQQELIQKKKVLTKKIKQCLEDSDAGASNEYDSSPAAWNKEDFPWSGKVKDILQNVFKLEKFRPLQLETINVTMAG

SEQ ID NO: 61194 - protein, 97 aa, Homo sapiens
MASVSALTEELDSITSELHAVEIQIQELTERQQELIQKKKVLTKKIKQCLEDSDAGASNEYDSSPAAWNKEDFPWSGKVKDILQNVFKLEKFRPLQL

SEQ ID NO: 61195 - protein, 72 aa, Homo sapiens
MASVSALTEELDSITSELHAVEIQIQELTERQQELIQKKKVLTKKIKQCLEDSDAGASNEYDSSPAAWNKED

SEQ ID NO: 61196 - protein, 131 aa, Homo sapiens
MASVSALTEELDSITSELHAVEIQIQELTERQQELIQKKKVLTKKIKQCLEDSDAGASNEYDSSPAAWNKEDFPWSGKVKDILQNVFKLEKFRPLQLETINVTMAGKEVFLVMPTGGGKSLCYQLPALCSD

SEQ ID NO: 61197 - protein, 991 aa, Homo sapiens
MSSHHTTFPFDPERRVRSTLKKVFGFDSFKTPLQESATMAVVKGNKDVFVCMPTGAGKSLCYQLPALLAKGITIVVSPLIALIQDQVDHLLTLKVRVSSLNSKLSAQERKELLADLEREKPQTKILYITPEMAASSSFQPTLNSLVSRHLLSYLVVDEAHCVSQWGHDFRPDYLRLGALRSRLGHAPCVALTATATPQVQEDVFAALHLKKPVAIFKTPCFRANLFYDVQFKELISDPYGNLKDFCLKALGQEADKGLSGCGIVYCRTREACEQLAIELSCRGVNAKAYHAGLKASERTLVQNDWMEEKVPVIVATISFGMGVDKANVRFVAHWNIAKSMAGYYQESGRAGRDGKPSWCRLYYSRNDRDQVSFLIRKEVAKLQEKRGNKASDKATIMAFDALVTFCEELGCRHAAIAKYFGDALPACAKGCDHCQNPTAVRRRLEALERSSSWSKTCIGPSQGNGFDPELYEGGRKGYGDFSRYDEGSGGSGDEGRDEAHKREWNLFYQKQMQLRKGKDPKIEEFVPPDENCPLKEASSRRIPRLTVKAREHCLRLLEEALSSNRQSTRTADEADLRAKAVELEHETFRNAKVANLYKASVLKKVADIHRASKDGQPYDMGGSAKSCSAQAEPPEPNEYDIPPASHVYSLKPKRVGAGFPKGSCPFQTATELMETTRIREQAPQPERGGEHEPPSRPCGLLDEDGSEPLPGPRGEVPGGSAHYGGPSPEKKAKSSSGGSSLAKGRASKKQQLLATAAHKDSQSIARFFCRRVESPALLASAPEAEGACPSCEGVQGPPMAPEKYTGEEDGAGGHSPAPPQTEECLRERPSTCPPRDQGTPEVQPTPAKDTWKGKRPRSQQENPESQPQKRPRPSAKPSVVAEVKGSVSASEQGTLNPTAQDPFQLSAPGVSLKEAANVVVKCLTPFYKEGKFASKELFKGFARHLSHLLTQKTSPGRSVKEEAQNLIRHFFHGRARCESEADWHGLCGPQR

SEQ ID NO: 61198 - protein, 435 aa, Homo sapiens
MSSHHTTFPFDPERRVRSTLKKVFGFDSFKTPLQESATMAVVKGNKDVFVCMPTGAGKSLCYQLPALLAKGITIVVSPLIALIQDQVDHLLTLKVRVSSLNSKLSAQERKELLADLEREKPQTKILYITPEMAASSSFQPTLNSLVSRHLLSYLVVDEAHCVSQWGHDFRPDYLRLGALRSRLGHAPCVALTATATPQVQEDVFAALHLKKPVAIFKTPCFRANLFYDVQFKELISDPYGNLKDFCLKALGQEADKGLSGCGIVYCRTREACEQLAIELSCRGVNAKAYHAGLKASERTLVQNDWMEEKVPVIVATISFGMGVDKANVRFVAHWNIAKSMAGYYQESGRAGRDGKPSWCRLYYSRNDRDQVSFLIRKEVAKLQEKRGNKASDKATIMAFDALVTFCEELGRWGRGHGKSLRAAWCSQVVSRHAEL

SEQ ID NO: 61199 - protein, 410 aa, Homo sapiens
MSSHHTTFPFDPERRVRSTLKKVFGFDSFKTPLQESATMAVVKGNKDVFVCMPTGAGKSLCYQLPALLAKGITIVVSPLIALIQDQVDHLLTLKVRVSSLNSKLSAQERKELLADLEREKPQTKILYITPEMAASSSFQPTLNSLVSRHLLSYLVVDEAHCVSQWGHDFRPDYLRLGALRSRLGHAPCVALTATATPQVQEDVFAALHLKKPVAIFKTPCFRANLFYDVQFKELISDPYGNLKDFCLKALGQEADKGLSGCGIVYCRTREACEQLAIELSCRGVNAKAYHAGLKASERTLVQNDWMEEKVPVIVATISFGMGVDKANVRFVAHWNIAKSMAGYYQESGRAGRDGKPSWCRLYYSRNDRDQVSFLIRKEVAKLQEKRGNKASDKATIMAFDALVTFCEELG

SEQ ID NO: 61200 - protein, 1018 aa, Homo sapiens
MSSHHTTFPFDPERRVRSTLKKVFGFDSFKTPLQESATMAVVKGNKDVFVCMPTGAGKSLCYQLPALLAKGITIVVSPLIALIQDQVDHLLTLKVRVSSLNSKLSAQERKELLADLEREKPQTKILYITPEMAASSSFQPTLNSLVSRHLLSYLVVDEAHCVSQWGHDFRPDYLRLGALRSRLGHAPCVALTATATPQVQEDVFAALHLKKPVAIFKTPCFRANLFYDVQFKELISDPYGNLKDFCLKALGQEADKGLSGCGIVYCRTREACEQLAIELSCRGVNAKAYHAGLKASERTLVQNDWMEEKVPVIVATISFGMGVDKANVRFVAHWNIAKSMAGYYQESGRAGRDGKPSWCRLYYSRNDRDQVSFLIRKEVAKLQEKRGNKASDKATIMAFDALVTFCEELGCRHAAIAKYFGDALPACAKGCDHCQNPTAVRRRLEALERSSSWSKTCIGPSQGNGFDPELYEGGRKGYGDFSRYDEGSGGSGDEGRDEAHKREWNLFYQKQMQLRKGKDPKIEEFVPPDENCPLKEASSRRIPRLTVKAREHCLRLLEEALSSNRQSTRTADEADLRAKAVELEHETFRNAKVANLYKASVLKKVADIHRASKDGQPYDMGGSAKSCSAQAEPPEPNEYDIPPASHVYSLKPKRVGAGFPKGSCPFQTATELMETTRIREQAPQPERGGEHEPPSRPCGLLDEDGSEPLPGPRGEVPGGSAHYGGPSPEKKAKSSSGGSSLAKGRASKKQQLLATAAHKDSQSIARFFCRRVESPALLASAPEAEGACPSCEGVQGPPMAPEKYTGEEDGAGGHSPAPPQTEECLRERPSTCPPRDQGTPEVQPTPAKDTWKGKRPRSQQENPESQPQKRPRPSAKPSVVAEVKGSVSASEQGTLNPTAQDPFQLSAPGVSLKEAANVVVKCLTPFYKEGKFASKELFKGFARHLSHLLTQKTSPGRSVKEEAQNLIRHFFHGRARCESGPHGWVFWDTCRGQKVEGGGAAAGRRGRKSGPSPSSKSG

SEQ ID NO: 61201 - protein, 586 aa, Homo sapiens
MFLVRCRHAAIAKYFGDALPACAKGCDHCQNPTAVRRRLEALERSSSWSKTCIGPSQGNGFDPELYEGGRKGYGDFSRYDEGSGGSGDEGRDEAHKREWNLFYQKQMQLRKGKDPKIEEFVPPDENCPLKEASSRRIPRLTVKAREHCLRLLEEALSSNRQSTRTADEADLRAKAVELEHETFRNAKVANLYKASVLKKVADIHRASKDGQPYDMGGSAKSCSAQAEPPEPNEYDIPPASHVYSLKPKRVGAGFPKGSCPFQTATELMETTRIREQAPQPERGGEHEPPSRPCGLLDEDGSEPLPGPRGEVPGGSAHYGGPSPEKKAKSSSGGSSLAKGRASKKQQLLATAAHKDSQSIARFFCRRVESPALLASAPEAEGACPSCEGVQGPPMAPEKYTGEEDGAGGHSPAPPQTEECLRERPSTCPPRDQGTPEVQPTPAKDTWKGKRPRSQQENPESQPQKRPRPSAKPSVVAEVKGSVSASEQGTLNPTAQDPFQLSAPGVSLKEAANVVVKCLTPFYKEGKFASKELFKGFARHLSHLLTQKTSPGRSVKEEAQNLIRHFFHGRARCESEADWHGLCGPQR

SEQ ID NO: 61202 - protein, 166 aa, Homo sapiens
MAQTSSYFMLISCLMFLSQSQGQEAQTELPQARISCPEGTNAYRSYCYYFNEDRETWVDADLYCQNMNSGNLVSVLTQAEGAFVASLIKESGTDDFNVWIGLHDPKKNRRWHWSSGSLVSYKSWGIGAPSSVNPGYCVSLTSSTGFQKWKDVPCEDKFSFVCKFKN

SEQ ID NO: 61203 - protein, 175 aa, Homo sapiens
MLPPMALPSVSWMLLSCLILLCQVQGEETQKELPSPRISCPKGSKAYGSPCYALFLSPKSWMDADLACQKRPSGKLVSVLSGAEGSFVSSLVRSISNSYSYIWIGLHDPTQGSEPDGDGWEWSSTDVMNYFAWEKNPSTILNPGHCGSLSRSTGFLKWKDYNCDAKLPYVCKFKD

SEQ ID NO: 61204 - protein, 175 aa, Homo sapiens; identical to SEQ ID NO: 61203

SEQ ID NO: 61205 - protein, 129 aa, Homo sapiens
MLPPMALPSVSWMLLSCLILLCQVQGEETQKELPSPRISCPKGSKAYGSPCYALFLSPKSWMDADGSEPDGDGWEWSSTDVMNYFAWEKNPSTILNPGHCGSLSRSTGFLKWKDYNCDAKLPYVCKFKD

SEQ ID NO: 61206 - protein, 158 aa, Homo sapiens
MASRSMRLLLLLSCLAKTGVLGDIIMRPSCAPGWFYHKSNCYGYFRKLRNWSDAELECQSYGNGAHLASILSLKEASTIAEYISGYQRSQPIWIGLHDPQKRQQWQWIDGAMYLYRSWSGKSMGGNKHCAEMSSNNNFLTWSSNECNKRQHFLCKYRP

SEQ ID NO: 61207 - protein, 158 aa, Homo sapiens; identical to SEQ ID NO: 61206

SEQ ID NO: 61208 - protein, 134 aa, Homo sapiens
MASRSMRLLLLLSCLAKTGVLGDIIMRPSCAPGWFYHKSNCYGYFRKLRNWSDAEVRNLLPAWPGLSRAKDQPEPQISFDSGSSVLPGHYEEKPLWLVKWREEGCVFNSFNSVSIAEAGAVCQTLDGLQAHTDT

SEQ ID NO: 61209 - protein, 124 aa, Homo sapiens
MASRSMRLLLLLSCLAKTGVLGDIIMRPSCAPGWFYHKSNCYGYFRKLRNWSDAELECQSYGNGAHLASILSLKEASTIAEYISGYQRSQPIWIGLHDPQKQPLNSCLFFLWPWEGLPVESLLG

SEQ ID NO: 61210 - protein, 299 aa, Homo sapiens
MSSIKIECVLPENCRCGESPVWEEVSNSLLFVDIPAKKVCRWDSFTKQVQRVTMDAPVSSVALRQSGGYVATIGTKFCALNWKEQSAVVLATVDNDKKNNRFNDGKVDPAGRYFAGTMAEETAPAVLERHQGALYSLFPDHHVKKYFDQVDISNGLDWSLDHKIFYYIDSLSYSVDAFDYDLQTGQISNRRSVYKLEKEEQIPDGMCIDAEGKLWVACYNGGRVIRLDPVTGKRLQTVKLPVDKTTSCCFGGKNYSEMYVTCARDGMDPEGLLRQPEAGGIFKITGLGVKGIAPYSYAG

SEQ ID NO: 61211 - protein, 299 aa, Homo sapiens; identical to SEQ ID NO: 61210

SEQ ID NO: 61212 - protein, 299 aa, Homo sapiens; identical to SEQ ID NO: 61210

SEQ ID NO: 61213 - protein, 227 aa, Homo sapiens
MSSIKIECVLPENCRCGESPVWEEVSNSLLFVDIPAKKVCRWDSFTKQVQRVTMDAPVSSVALRQSGGYVATIGTKFCALNWKEQSAVVLATVDNDKKNNRFNDGKVDPAGRYFAANRRSVYKLEKEEQIPDGMCIDAEGKLWVACYNGGRVIRLDPVTGKRLQTVKLPVDKTTSCCFGGKNYSEMYVTCARDGMDPEGLLRQPEAGGIFKITGLGVKGIAPYSYAG

SEQ ID NO: 61214 - protein, 1291 aa, Homo sapiens
MSSAVGPRGPRPPTVPPPMQELPDLSHLTEEERNIIMAVMDRQKEEEEKEEAMLKCVVRDMAKPAACKTPRNAENQPHQPSPRLHQQFESYKEQVRKIGEEARRYQGEHKDDAPTCGICHKTKFADGCGHLCSYCRTKFCARCGGRVSLRSNNEDKYVMWVCNLCRKQQEILTKSGAWFFGSGPQQTSQDGTLSDTATGAGSEVPREKKARLQERSRSQTPLSTAAASSQDAAPPSAPPDRSKGAEPSQQALGPEQKQASSRSRSEPPRERKKTPGLSEQNGKGALKSERKRVPKTSAQPVEGAVEERERKERRESRRLEKGRSQDYPDTPEKRDEGKAADEEKQRKEEDYQTRYRSDPNLARYPVKPPPEEQQMRMHARVSRARHERRHSDVALPRTEAGAALPEGKAGKRAPAAARASPPDSPRAYSAERTAETRAPGAKQLTNHSPPAPRHGPVPAEAPELKAQEPLRKQSRLDPSSAVLMRKAKREKVETMLRNDSLSSDQSESVRPSPPKPHRSKRGGKKRQMSVSSSEEEGVSTPEYTSCEDVELESESVSEKGDLDYYWLDPATWHSRETSPISSHPVTWQPSKEGDRLIGRVILNKRTTMPKDSGALLGLKVVGGKMTDLGRLGAFITKVKKGSLADVVGHLRAGDEVLEWNGKPLPGATNEEVYNIILESKSEPQVEIIVSRPIGDIPRIPESSHPPLESSSSSFESQKMERPSISVISPTSPGALKDAPQVLPGQLSVKLWYDKVGHQLIVNVLQATDLPARVDGRPRNPYVKMYFLPDRSDKSKRRTKTVKKILEPKWNQTFVYSHVHRRDFRERMLEITVWDQPRVQEEESEFLGEILIELETALLDDEPHWYKLQTHDESSLPLPQPSPFMPRRHIHGESSSKKLQRSQRISDSDISDYEVDDGIGVVPPGYRSSARESKSTTLTVPEQQRTTHHRSRSVSPHRGNDQGKPRSRLPNVPLQRSLDEIHPTRRSRSPTRHHDASRSPVDHRTRDVDSQYLSEQDRMHRQRSPTQSPPADTSFSSRRGRQLPQVPVRSGSIEQESGHKKLKSTIQRSTETGMAAEMRKMVRQPSRESTDGSINSYSSEGNLIFPGVRLGADSQFSDFLDGLGPAQLVGRQTLATPAMGDIQIGMEDKKGQLEVEVIRARSLTQKPGSKSTPAPYVKVYLLENGACIAKKKTRIARKTLDPLYQQSLVFDESPQGKVLQVIVWGDYGRMDHKCFMGVAQILLEELDLSSMVIGWYKLFPPSSLVDPTLTPLTRRASQSSLESSTGPPCIRS

SEQ ID NO: 61215 - protein, 1475 aa, Homo sapiens
MSSAVGPRGPRPPTVPPPMQELPDLSHLTEEERNIIMAVMDRQKEEEEKEEAMLKCVVRDMAKPAACKTPRNAENQPHQPSPRLHQQFESYKEQVRKIGEEARRYQGEHKDDAPTCGICHKTKFADGCGHLCSYCRTKFCARCGGRVSLRSNNEDICVMWVCNLCRKQQEILTKSGAWFFGSGPQQTSQDGTLSDTATGAGSEVPREKKARLQERSRSQTPLSTAAASSQDAAPPSAPPDRSKGAEPSQQALGPEQKQASSRSRSEPPRERKKTPGLSEQNGKGALKSERKRVPKTSAQPVEGAVEERERKERRESRRLEKGRSQDYPDTPEKRDEGKAADEEKQRKEEDYQTRYRSDPNLARYPVKPPPEEQQMRMHARVSRARHERRHSDVALPRTEAGAALPEGKAGKRAPAAARASPPDSPRAYSAERTAETRAPGAKQLTNHSPPAPRHGPVPAEAPELKAQEPLRKQSRLDPSSAVLMRKAKREKVETMLRNDSLSSDQSESVRPSPPKPHRSKRGGKKRQMSVSSSEEEGVSTPEYTSCEDVELESESVSEKGDLDYYWLDPATWHSRETSPISSHPVTWQPSKEGDRLIGRVILNKRTTMPKDSGALLGLKVVGGKMTDLGRLGAFITKVKKGSLADVVGHLRAGDEVLEWNGKPLPGATNEEVYNIILESKSEPQVEIIVSRPIGDIPRIPESSHPPLESSSSSFESQKMERPSISVISPTSPGALKDAPQVLPGQLSVKLWYDKVGHQLIVNVLQATDLPARVDGRPRNPYVKMYFLPDRSDKSKRRTKTVKKILEPKWNQTFVYSHVHRRDFRERMLEITVWDQPRVQEEESEFLGEILIELETALLDDEPHWYKLQTHDESSLPLPQPSPFMPRRHIHGESSSKKLQRSQRISDSDISDYEVDDGIGVVPPGYRSSARESKSTTLTVPEQQRTTHHRSRSVSPHRGNDQGKPRSRLPNVPLQRSLDEIHPTRRSRSPTRHHDASRSPVDHRTRDVDSQYLSEQDSELLMLPRAKRGRSAECLHTTRMHRQRSPTQSPPADTSFSSRRGRQLPQVPVRSGSIEQASLVVEERTRQMKMKVHRFKQTTGSGSSQELDREQYSKYNIHKDQYRSCDNVSAKSSDSDVSDVSAISRTSSASRLSSTSFMSEQSERPRGRIRRMGTSGRSIMKSTSVSGEMYTLEHNDGSQSDTAVGTVGAGGKKRRSSLSAKVVAIVSRRSRSTSQLSQTESGHKKLKSTIQRSTETGMAAEMRKMVRQPSRESTDGSINSYSSEGNLIFPGVRLGADSQFSDFLDGLGPAQLVGRQTLATPAMGDIQIGMEDKKGQLEVEVIRARSLTQKPGSKSTPAPYVKVYLLENGACIAKKKTRIARKTLDPLYQQSLVFDESPQGKVLQVIVWGDYGRMDHKCFMGVAQILLEELDLSSMVIGWYKLFPPSSLVDPTLTPLTRRASQSSLESSTGPPCIRS

SEQ ID NO: 61216 - protein, 1371 aa, Homo sapiens
MSSAVGPRGPRPPTVPPPMQELPDLSHLTEEERNIIMAVMDRQKEEEEKEEAMLKCVVRDMAKPAACKTPRNAENQPHQPSPRLHQQFESYKEQVRKIGEEARRYQGEHKDDAPTCGICHKTKFADGCGHLCSYCRTKFCARCGGRVSLRSNNENKIVMWVCNLCRKQQEILTKSGAWFFGSGPQQTSQDGTLSDTATGAGSEVPREKKARLQERSRSQTPLSTAAASSQDAAPPSAPPDRSKGAEPSQQALGPEQKQASSRSRSEPPRERKKTPGLSEQNGKGALKSERKRVPKTSAQPVEGAVEERERKERRESRRLEKGRSQDYPDTPEKRDEGKAADEEKQRKEEDYQTRYRSDPNLARYPVKPPPEEQQMRMHARVSRARHERRHSDVALPRTEAGAALPEGKAGKRAPAAARASPPDSPRAYSAERTAETRAPGAKQLTNHSPPAPRHGPVPAEAPELKAQEPLRKQSRLDPSSAVLMRKAKREKVETMLRNDSLSSDQSESVRPSPPKPHRSKRGGKKRQMSVSSSEEEGVSTPEYTSCEDVELESESVSEKGDLDYYWLDPATWHSRETSPISSHPVTWQPSKEGDRLIGRVILNKRTTMPKDSGALLGLKVVGGKMTDLGRLGAFITKVKKGSLADVVGHLRAGDEVLEWNGKPLPGATNEEVYNIILESKSEPQVEIIVSRPIGDIPRIPESSHPPLESSSSSFESQKMERPSISVISPTSPGALKDAPQVLPGQLSVKLWYDKVGHQLIVNVLQATDLPARVDGRPRNPYVKMYFLPDRSDKSKRRTKTVKKILEPKWNQTFVYSHVHRRDFRERMLEITVWDQPRVQEEESEFLGEILIELETALLDDEPHWYKLQTHDESSLPLPQPSPFMPRRHIHGESSSKKLQRSQRISDSDISDYEVDDGIGVVPPVGYRSSARESKSTTLTVPEQQRTTHHRSRSVSPHRGNDQGKPRSRLPNVPLQRSLDEIHPTRRSRSPTRHHDASRSPVDHRTRDVDSQYLSEQDSELLMLPRAKRGRSAECLHTTSELQPFLDRARSASTNCLRPDTSLHSPERERGRWSPSLDRRRPPSPRIQIQHASPENDRMHRQRSPTQSPPADTSFSSRRGRQLPQVPVRSGSIEQESGHKKLKSTIQRSTETGMAAEMRKMVRQPSRESTDGSINSYSSEGNLIFPGVRLGADSQFSDFLDGLGPAQLVGRQTLATPAMGDIQIGMEDKKGQLEVEVIRARSLTQKPGSKSTPAPYVKVYLLENGACIAKKKTRIARKTLDPLYQQSLVFDESPQGKVLQVIVWGDYGRMDHKCFMGVAQILLEELDLSSMVIGWYKLFPPSSLVDPTLTPLTRRASQSSLESSTGPPCIRS

SEQ ID NO: 61217 - protein, 1541 aa, Homo sapiens
MSSAVGPRGPRPPTVPPPMQELPDLSHLTEEERNIIMAVMDRQKEEEEKEEAMLKCVVRDMAKPAACKTPRNAENQPHQPSPRLHQQFESYKEQVRKIGEEARRYQGEHKDDAPTCGICHKTKFADGCGHLCSYCRTKFCARCGGRVSLRSNNEDKYVMWVCNLCRKQQEILTKSGAWFFGSGPQQTSQDGTLSDTATGAGSEVPREKKARLQERSRSQTPLSTAAASSQDAAPPSAPPDRSKGAEPSQQALGPEQKQASSRSRSEPPRERKKTPGLSEQNGKGALKSERKRVPKTSAQPVEGAVEERERKERRESRRLEKGRSQDYPDTPEKRDEGKAADEEKQRKEEDYQTRYRSDPNLARYPVKPPPEEQQMRMHARVSRARHERRHSDVALPRTEAGAALPEGKAGKRAPAAARASPPDSPRAYSAERTAETRAPGAKQLTNHSPPAPRHGPVPAEAPELKAQEPLRKQSRLDPSSAVLMRKAKREKVETMLRNDSLSSDQSESVRPSPPKPHRSKRGGKKRQMSVSSSEEEGVSTPEYTSCEDVELESESVSEKGDLDYYWLDPATWHSRETSPISSHPVTWQPSKEGDRLIGRVILNKRTTMPKDSGALLGLKVVGGKMTDLGRLGAFITKVKKGSLADVVGHLRAGDEVLEWNGKPLPGATNEEVYNIILESKSEPQVEIIVSRPIGDIPRIPESSHPPLESSSSSFESQKMERPSISVISPTSPGALKDAPQVLPGQLSVKLWYDKVGHQLIVNVLQATDLPARVDGRPRNPYVKMYFLPDRSDKSKRRTKTVKKILEPKWNQTFVYSHVHRRDFRERMLEITVWDQPRVQEEESEFLGEILIELETALLDDEPHWYKLQTHDESSLPLPQPSPFMPRRHIHGESSSKKLQRSQRISDSDISDYEVDDGIGVVPPVGYRSSARESKSTTLTVPEQQRTTHHRSRSVSPHRGNDQGKPRSRLPNVPLQRSLDEIHPTRRSRSPTRHHDASRSPVDHRTRDVDSQYLSEQDSELLMLPRAKRGRSAECLHTTRHLVRHYKTLPPKMPLLQSSSHWNIYSELQPFLDRARSASTNCLRPDTSLHSPERERMHRQRSPTQSPPADTSFSSRRGRQLPQVPVRSGSIEQASLVVEERTRQMKMKVHRFKQTTGSGSSQELDREQYSKYNIHKDQYRSCDNVSAKSSDSDVSDVSAISRTSSASRLSSTSFMSEQSERPRGRISSFTPKMQGRRMGTSGRSIMKSTSVSGEMYTLEHNDGSQSDTAVGTVGAGGKKRRSSLSAKVVAIVSRRSRSTSQLSQTESGHKKLKSTIQRSTETGMAAEMRKMVRQPSRESTDGSINSYSSEGNLIFPGVRLGADSQFSDFLDGLGPAQLVGRQTLATPAMGDIQIGMEDKKGQLEVEVIRARSLTQKPGSKSTPAPYVKVYLLENGACIAKKKTRIARKTLDPLYQQSLVFDESPQGKVLQVIVWGDYGRMDHKCFMGVAQILLEELDLSSMVIGWYKLFPPSSLVDPTLTPLTRRASQSSLESSTGPPCIRS

SEQ ID NO: 61218 - protein, 1481 aa, Homo sapiens
MSSAVGPRGPRPPTVPPPMQELPDLSHLTEEERNIIMAVMDRQKEEEEKEEAMLKCVVRDMAKPAACKTPRNAENQPHQPSPRLHQQFESYKEQVRKIGEEARRYQGEHKDDAPTCGICHKTKFADGCGHLCSYCRTKFCARCGGRVSLRSNNENKIVMWVCNLCRKQQEILTKSGAWFFGSGPQQTSQDGTLSDTATGAGSEVPREKKARLQERSRSQTPLSTAAASSQDAAPPSAPPDRSKGAEPSQQALGPEQKQASSRSRSEPPRERKKTPGLSEQNGKGALKSERKRVPKTSAQPVEGAVEERERKERRESRRLEKGRSQDYPDTPEKRDEGKAADEEKQRKEEDYQTRYRSDPNLARYPVKPPPEEQQMRMHARVSRARHERRHSDVALPRTEAGAALPEGKAGKRAPAAARASPPDSPRAYSAERTAETRAPGAKQLTNHSPPAPRHGPVPAEAPELKAQEPLRKQSRLDPSSAVLMRKAKREKVETMLRNDSLSSDQSESVRPSPPKPHRSKRGGKKRQMSVSSSEEEGVSTPEYTSCEDVELESESVSEKGDLDYYWLDPATWHSRETSPISSHPVTWQPSKEGDRLIGRVILNKRTTMPKDSGALLGLKVVGGKMTDLGRLGAFITKVKKGSLADVVGHLRAGDEVLEWNGKPLPGATNEEVYNIILESKSEPQVEIIVSRPIGDIPRIPESSHPPLESSSSSFESQKMERPSISVISPTSPGALKDAPQVLPGQLSVKLWYDKVGHQLIVNVLQATDLPARVDGRPRNPYVKMYFLPDRSDKSKRRTKTVKKILEPKWNQTFVYSHVHRRDFRERMLEITVWDQPRVQEEESEFLGEILIELETALLDDEPHWYKLQTHDESSLPLPQPSPFMPRRHIHGESSSKKLQRSQRISDSDISDYEVDDGIGVVPPVGYRSSARESKSTTLTVPEQQRTTHHRSRSVSPHRGNDQGKPRSRLPNVPLQRSLDEIHPTRRSRSPTRHHDASRSPVDHRTRDVDSQYLSEQDSELLMLPRAKRGRSAECLHTTSELQPFLDRARSASTNCLRPDTSLHSPERERMHRQRSPTQSPPADTSFSSRRGRQLPQVPVRSGSIEQASLVVEERTRQMKMKVHRFKQTTGSGSSQELDREQYSKYNIHKDQYRSCDNVSAKSSDSDVSDVSAISRTSSASRLSSTSFMSEQSERPRGRISSFTPKMQGRRMGTSGRSIMKSTSVSGEMYTLEHNDGSQSDTAVGTVGAGGKKRRSSLSAKVVAIVSRRSRSTSQLSQTESGHKKLKSTIQRSTETGMAAEMRKMVRQPSRESTDGSINSYSSEGNLIFPGVRLGADSQFSDFLDGLGPAQLVGRQTLATPAMAPYVKVYLLENGACIAKKKTRIARKTLDPLYQQSLVFDESPQGKVLQVIVWGDYGRMDHKCFMGVAQILLEELDLSSMVIGWYKLFPPSSLVDPTLTPLTRRASQSSLESSTGPPCIRS

SEQ ID NO: 61219 - protein, 1481 aa, Homo sapiens
MSSAVGPRGPRPPTVPPPMQELPDLSHLTEEERNIIMAVMDRQKEEEEKEEAMLKCVVRDMAKPAACKTPRNAENQPHQPSPRLHQQFESYKEQVRKIGEEARRYQGEHKDDAPTCGICHKTKFADGCGHLCSYCRTKFCARCGGRVSLRSNNEDKVVMWVCNLCRKQQEILTKSGAWFFGSGPQQTSQDGTLSDTATGAGSEVPREKKARLQERSRSQTPLSTAAASSQDAAPPSAPPDRSKGAEPSQQALGPEQKQASSRSRSEPPRERKKTPGLSEQNGKGALKSERKRVPKTSAQPVEGAVEERERKERRESRRLEKGRSQDYPDTPEKRDEGKAADEEKQRKEEDYQTRYRSDPNLARYPVKPPPEEQQMRMHARVSRARHERRHSDVALPRTEAGAALPEGKAGKRAPAAARASPPDSPRAYSAERTAETRAPGAKQLTNHSPPAPRHGPVPAEAPELKAQEPLRKQSRLDPSSAVLMRKAKREKVETMLRNDSLSSDQSESVRPSPPKPHRSKRGGKKRQMSVSSSEEEGVSTPEYTSCEDVELESESVSEKGDLDYYWLDPATWHSRETSPISSHPVTWQPSKEGDRLIGRVILNKRTTMPKDSGALLGLKVVGGKMTDLGRLGAFITKVKKGSLADVVGHLRAGDEVLEWNGKPLPGATNEEVYNIILESKSEPQVEIIVSRPIGDIPRIPESSHPPLESSSSSFESQKMERPSISVISPTSPGALKDAPQVLPGQLSVKLWYDKVGHQLIVNVLQATDLPARVDGRPRNPYVKMYFLPDRSDKSKRRTKTVKKILEPKWNQTFVYSHVHRRDFRERMLEITVWDQPRVQEEESEFLGEILIELETALLDDEPHWYKLQTHDESSLPLPQPSPFMPRRHIHGESSSKKLQRSQRISDSDISDYEVDDGIGVVPPVGYRSSARESKSTTLTVPEQQRTTHHRSRSVSPHRGNDQGKPRSRLPNVPLQRSLDEIHPTRRSRSPTRHHDASRSPVDHRTRDVDSQYLSEQDSELLMLPRAKRGRSAECLHTTSELQPFLDRARSASTNCLRPDTSLHSPERERMHRQRSPTQSPPADTSFSSRRGRQLPQVPVRSGSIEQASLVVEERTRQMKMKVHRFKQTTGSGSSQELDREQYSKYNIHKDQYRSCDNVSAKSSDSDVSDVSAISRTSSASRLSSTSFMSEQSERPRGRISSFTPKMQGRRMGTSGRSIMKSTSVSGEMYTLEHNDGSQSDTAVGTVGAGGKKRRSSLSAKVVAIVSRRSRSTSQLSQTESGHKKLKSTIQRSTETGMAAEMRKMVRQPSRESTDGSINSYSSEGNLIFPGVRLGADSQFSDFLDGLGPAQLVGRQTLATPAMAPYVKVYLLENGACIAKKKTRIARKTLDPLYQQSLVFDESPQGKVLQVIVWGDYGRMDHKCFMGVAQILLEELDLSSMVIGWYKLFPPSSLVDPTLTPLTRRASQSSLESSTGPPCIRS

SEQ ID NO: 61220 - protein, 1692 aa, Homo sapiens
MSSAVGPRGPRPPTVPPPMQELPDLSHLTEEERNIIMAVMDRQKEEEEKEEAMLKCVVRDMAKPAACKTPRNAENQPHQPSPRLHQQFESYKEQVRKIGEEARRYQGEHKDDAPTCGICHKTKFADGCGHLCSYCRTKFCARCGGRVSLRSNNEDKVVMWVCNLCRKQQEILTKSGAWFFGSGPQQTSQDGTLSDTATGAGSEVPREKKARLQERSRSQTPLSTAAASSQDAAPPSAPPDRSKGAEPSQQALGPEQKQASSRSRSEPPRERKKTPGLSEQNGKGALKSERKRVPKTSAQPVEGAVEERERKERRESRRLEKGRSQDYPDTPEKRDEGKAADEEKQRKEEDYQTRYRSDPNLARYPVKPPPEEQQMRMHARVSRARHERRHSDVALPRTEAGAALPEGKAGKRAPAAARASPPDSPRAYSAERTAETRAPGAKQLTNHSPPAPRHGPVPAEAPELKAQEPLRKQSRLDPSSAVLMRKAKREKVETMLRNDSLSSDQSESVRPSPPKPHRSKRGGKKRQMSVSSSEEEGVSTPEYTSCEDVELESESVSEKGDLDYYWLDPATWHSRETSPISSHPVTWQPSKEGDRLIGRVILNKRTTMPKDSGALLGLKVVGGKMTDLGRLGAFITKVKKGSLADVVGHLRAGDEVLEWNGKPLPGATNEEVYNIILESKSEPQVEIIVSRPIGDIPRIPESSHPPLESSSSSFESQKMERPSISVISPTSPGALKDAPQVLPGQLSVKLWYDKVGHQLIVNVLQATDLPARVDGRPRNPYVKMYFLPDRSDKSKRRTKTVKKILEPKWNQTFVYSHVHRRDFRERMLEITVWDQPRVQEEESEFLGEILIELETALLDDEPHWYKLQTHDESSLPLPQPSPFMPRRHIHGESSSKKLQRSQRISDSDISDYEVDDGIGVVPPVGYRSSARESKSTTLTVPEQQRTTHHRSRSVSPHRGNDQGKPRSRLPNVPLQRSLDEIHPTRRSRSPTRHHDASRSPVDHRTRDVDSQYLSEQDSELLMLPRAKRGRSAECLHTTRHLVRHYKTLPPKMPLLQSSSHWNIYSSILPAHTKTKSVTRQDISLHHECFNSTVLRFTDEILVSELQPFLDRARSASTNCLRPDTSLHSPERERGRWSPSLDRRRPPSPRIQIQHASPENDRHSRKSERSSIQKQTRKGTASDAERVLPTCLSRRGHAAPRATDQPVIRGKHPARSRSSEHSSIRTLCSMHHLVPGGSAPPSPLLTRMHRQRSPTQSPPADTSFSSRRGRQLPQVPVRSGSIEQASLVVEERTRQMKMKVHRFKQTTGSGSSQELDREQYSKYNIHKDQYRSCDNVSAKSSDSDVSDVSAISRTSSASRLSSTSFMSEQSERPRGRISSFTPKMQGRRMGTSGRSIMKSTSVSGEMYTLEHNDGSQSDTAVGTVGAGGKKRRSSLSAKVVAIVSRRSRSTSQLSQTESGHKKLKSTIQRSTETGMAAEMRKMVRQPSRESTDGSINSYSSEGNLIFPGVRLGADSQFSDFLDGLGPAQLVGRQTLATPAMGDIQIGMEDKKGQLEVEVIRARSLTQKPGSKSTPAPYVKVYLLENGACIAKKKTRIARKTLDPLYQQSLVFDESPQGKVLQVIVWGDYGRMDHKCFMGVAQILLEELDLSSMVIGWYKLFPPSSLVDPTLTPLTRRASQSSLESSTGPPCIRS

SEQ ID NO: 61221 - protein, 498 aa, Homo sapiens
MLPRAKRGRSAECLHTTRHSRKSERSSIQKQTRKGTASDAERMHRQRSPTQSPPADTSFSSRRGRQLPQVPVRSGSIEQEQEKYNSSTKASLVVEERTRQMKMKVHRFKQTTGSGSSQELDREQYSKYNIHKDQYRSCDNVSAKSSDSDVSDVSAISRTSSASRLSSTSFMSEQSERPRGRISSFTPKMQGRRMGTSGRSIMKSTSVSGEMYTLEHNDGSQSDTAVGTVGAGGKKRRSSLSAKVVAIVSRRSRSTSQLSQTESGHKKLKSTIQRSTETGMAAEMRKMVRQPSRESTDGSINSYSSEGNLIFPGVRLGADSQFSDFLDGLGPAQLVGRQTLATPAMGDIQIGMEDKKGQLEVEVIRARSLTQKPGSKSTPAPYVKVYLLENGACIAKKKTRIARKTLDPLYQQSLVFDESPQGKVLQVIVWGDYGRMDHKCFMGVAQILLEELDLSSMVIGWYKLFPPSSLVDPTLTPLTRRASQSSLESSTGPPCIRS

SEQ ID NO: 61222 - protein, 1012 aa, Homo sapiens
MCAPGIHVSSEGWEEVRSVDSEEGTIEARRAVAGDLDYYWLDPATWHSRETSPISSHPVTWQPSKEGDRLIGRVILNKRTTMPKDSGALLGLKVVGGKMTDLGRLGAFITKVKKGSLADVVGHLRAGDEVLEWNGKPLPGATNEEVYNIILESKSEPQVEIIVSRPIGDIPRIPESSHPPLESSSSSFESQKMERPSISVISPTSPGALKDAPQVLPGQLSVKLWYDKVGHQLIVNVLQATDLPARVDGRPRNPYVKMYFLPDRSDKSKRRTKTVKKILEPKWNQTFVYSHVHRRDFRERMLEITVWDQPRVQEEESEFLGEILIELETALLDDEPHWYKLQTHDESSLPLPQPSPFMPRRHIHGESSSKKLQRSQRISDSDISDYEVDDGIGVVPPGYRSSARESKSTTLTVPEQQRTTHHRSRSVSPHRGNDQGKPRSRLPNVPLQRSLDEIHPTRRSRSPTRHHDASRSPVDHRTRDVDSQYLSEQDSELLMLPRAKRGRSAECLHTTSELQPFLDRARSASTNCLRPDTSLHSPERERHSRKSERSSIQKQTRKGTASDAERMHRQRSPTQSPPADTSFSSRRGRQLPQVPVRSGSIEQASLVVEERTRQMKMKVHRFKQTTGSGSSQELDREQYSKYNIHKDQYRSCDNVSAKSSDSDVSDVSAISRTSSASRLSSTSFMSEQSERPRGRISSFTPKMQGRRMGTSGRSIMKSTSVSGEMYTLEHNDGSQSDTAVGTVGAGGKKRRSSLSAKVVAIVSRRSRSTSQLSQTESGHKKLKSTIQRSTETGMAAEMRKMVRQPSRESTDGSINSYSSEGNLIFPGVRLGADSQFSDFLDGLGPAQLVGRQTLATPAMGDIQIGMEDKKGQLEVEVIRARSLTQKPGSKSTPAPYVKVYLLENGACIAKKKTRIARKTLDPLYQQSLVFDESPQGKVLQVIVWGDYGRMDHKCFMGVAQILLEELDLSSMVIGWYKLFPPSSLVDPTLTPLTRRASQSSLESSTGPPCIRS

SEQ ID NO: 61223 - protein, 219 aa, Homo sapiens
MAAEMRKMVRQPSRESTDGSINSYSSEGNLIFPGVRLGADSQFSDFLDGLGPAQLVGRQTLATPAMGDIQIGMEDKKGQLEVEVIRARSLTQKPGSKSTPAPYVKVYLLENGACIAKKKTRIARKTLDPLYQQSLVFDESPQGKVLQVIVWGDYGRMDHKCFMGVAQILLEELDLSSMVIGWYKLFPPSSLVDPTLTPLTRRASQSSLESSTGPPCIRS

SEQ ID NO: 61224 - protein, 760 aa, Homo sapiens
MPKDSGALLGLKVVGGKMTDLGRLGAFITKVKKGSLADVVGHLRAGDEVLEWNGKPLPGATNEEVYNIILESKSEPQVEIIVSRPIGDIPRIPESSHPPLESSSSSFESQKMERPSISVISPTSPGALKDAPQVLPGQLSVKLWYDKVGHQLIVNVLQATDLPARVDGRPRNPYVKMYFLPDRSDKSKRRTKTVKKILEPKWNQTFVYSHVHRRDFRERMLEITVWDQPRVQEEESEFLGEILIELETALLDDEPHWYKLQTHDESSLPLPQPSPFMPRRHIHGESSSKKLQRSQRISDSDISDYEVDDGIGVVPPVGYRSSARESKSTTLTVPEQQRTTHHRSRSVSPHRGNDQGKPRSRLPNVPLQRSLDEIHPTRRSRSPTRHHDASRSPVDHRTRDVDSQYLSEQDSELLMLPRAKRGRSAECLHTTSELQPFLDRARSASTNCLRPDTSLHSPERERHSRKSERSSIQKQTRKGTASDAERMHRQRSPTQSPPADTSFSSRRGRQLPQVPVRSGSIEQESGHKKLKSTIQRSTETGMAAEMRKMVRQPSRESTDGSINSYSSEGNLIFPGVRLGADSQFSDFLDGLGPAQLVGRQTLATPAMGDIQIGMEDKKGQLEVEVIRARSLTQKPGSKSTPAPYVKVYLLENGACIAKKKTRIARKTLDPLYQQSLVFDESPQGKVLQVIVWGDYGRMDHKCFMGVAQILLEELDLSSMVIGWYKLFPPSSLVDPTLTPLTRRASQSSLESSTGPPCIRS

SEQ ID NO: 61225 - protein, 826 aa, Homo sapiens
MFAGFLQFLLLHTLHSGTGDLDYYWLDPATWHSRETSPISSHPVTWQPSKEGDRLIGRVILNKRTTMPKDSGALLGLKVVGGKMTDLGRLGAFITKVKKGSLADVVGHLRAGDEVLEWNGKPLPGATNEEVYNIILESKSEPQVEIIVSRPIGDIPRIPESSHPPLESSSSSFESQKMERPSISVISPTSPGALKDAPQVLPGQLSVKLWYDKVGHQLIVNVLQATDLPARVDGRPRNPYVKMYFLPDRSDKSKRRTKTVKKILEPKWNQTFVYSHVHRRDFRERMLEITVWDQPRVQEEESEFLGEILIELETALLDDEPHWYKLQTHDESSLPLPQPSPFMPRRHIHGESSSKKLQRSQRISDSDISDYEVDDGIGVVPPVGYRSSARESKSTTLTVPEQQRTTHHRSRSVSPHRGNDQGKPRSRLPNVPLQRSLDEIHPTRRSRSPTRHHDASRSPVDHRTRDVDSQYLSEQDSELLMLPRAKRGRSAECLHTTSELQPFLDRARSASTNCLRPDTSLHSPERERHSRKSERSSIQKQTRKGTASDAERMHRQRSPTQSPPADTSFSSRRGRQLPQVPVRSGSIEQESGHKKLKSTIQRSTETGMAAEMRKMVRQPSRESTDGSINSYSSEGNLIFPGVRLGADSQFSDFLDGLGPAQLVGRQTLATPAMGDIQIGMEDKKGQLEVEVIRARSLTQKPGSKSTPAPYVKVYLLENGACIAKKKTRIARKTLDPLYQQSLVFDESPQGKVLQVIVWGDYGRMDHKCFMGVAQILLEELDLSSMVIGWYKLFPPSSLVDPTLTPLTRRASQSSLESSTGPPCIRS

SEQ ID NO: 61226 - protein, 817 aa, Homo sapiens
MCAPGIHVSSEGWEEVRSVDSEEGTIEARRAVAGDLDYYWLDPATWHSRETSPISSHPVTWQPSKEGDRLIGRVILNKRTTMPKDSGALLGLKVVGGKMTDLGRLGAFITKVKKGSLADVVGHLRAGDEVLEWNGKPLPGATNEEVYNIILESKSEPQVEIIVSRPIGDIPRIPESSHPPLESSSSSFESQKMERPSISVISPTSPGALKDAPQVLPGQLSVKLWYDKVGHQLIVNVLQATDLPARVDGRPRNPYVKMYFLPDRSDKSKRRTKTVKKILEPKWNQTFVYSHVHRRDFRERMLEITVWDQPRVQEEESEFLGEILIELETALLDDEPHWYKLQTHDESSLPLPQPSPFMPRRHIHGESSSKKLQRSQRISDSDISDYEVDDGIGVVPPVGYRSSARESKSTTLTVPEQQRTTHHRSRSVSPHRGNDQGKPRSRLPNVPLQRSLDEIHPTRRSRSPTRHHDASRSPVDHRTRDVDSQYLSEQDSELLMLPRAKRGRSAECLHTTSELQPFLDRARSASTNCLRPDTSLHSPERERMHRQRSPTQSPPADTSFSSRRGRQLPQVPVRSGSIEQESGHKKLKSTIQRSTETGMAAEMRKMVRQPSRESTDGSINSYSSEGNLIFPGVRLGADSQFSDFLDGLGPAQLVGRQTLATPAMGDIQIGMEDKKGQLEVEVIRARSLTQKPGSKSTPAPYVKVYLLENGACIAKKKTRIARKTLDPLYQQSLVFDESPQGKVLQVIVWGDYGRMDHKCFMGVAQILLEELDLSSMVIGWYKLFPPSSLVDPTLTPLTRRASQSSLESSTGPPCIRS

SEQ ID NO: 61227 - protein, 1188 aa, Homo sapiens
MQFETLRQVCNSVLSHFHGVFSSPPNILQNELFGQTLNNARKRSPSVSRDQNRRYDQREEREEYSQYATSDTAMPRSPSDYADRRSQHEPQFYEDSDHLSYRDSNRRSHRHSKEYIVDDEDVESRDEYERQRREEEYQSRYRSDPNLARYPVKPQPYEEQMRIHAEVSRARHERRHSDVSLANADLEDSRISMLRMDRPSRQRSISERRAAMENQRSYSMERTREAQGPSSYAQRTTNHSPPTPRRSPLPIDRPDLRRTDSLRKQHHLDPSSAVRKTKREKMETMLRNDSLSSDQSESVRPPPPKPHKSKKGGKMRQISLSSSEEELASTPEYTSCDDVEIESESVSEKGDSQKGKRKTSEQAVLSDSNTRSERQKEMMYFGGHSLEEDLEWSEPQIKDSGVDTCSSTTLNEEHSHSDKHPVTWQPSKDGDRLIGRILLNKRLKDGSVPRDSGAMLGLKVVGGKMTESGRLCAFITKVKKGSLADTVGHLRPGDEVLEWNGRLLQGATFEEVYNIILESKPEPQVELVVSRPIGDIPRIPDSTHAQLESSSSSFESQKMDRPSISVTSPMSPGMLRDVPQFLSGQLSIKLWFDKVGHQLIVTILGAKDLPSREDGRPRNPYVKIYFLPDRSDKNKRRTKTVKKTLEPKWNQTFIYSPVHRREFRERMLEITLWDQARVREEESEFLGEILIELETALLDDEPHWYKLQTHDVSSLPLPHPSPYMPRRQLHGESPTRRLQRSKRISDSEVSDYDCDDGIGVVSDYRHDGRDLQSSTLSVPEQVMSSNHCSPSGSPHRVDVIGRTRSWSPSVPPPQSRNVEQGLRGTRTMTGHYNTISRMDRHRVMDDHYSPDRDRDCEAADRQPYHRSRSTEQRPLLERTTTRSRSTERPDTNLMRSMPSLMTGRSAPPSPALSRSHPRTGSVQTSPSSTPVAGRRGRQLPQLPPKGTLDRKAGGKKLRSTVQRSTETGLAVEMRNWMTRQASRESTDGSMNSYSSEGNLIFPGVRLASDSQFSDFLDGLGPAQLVGRQTLATPAMGDIQVGMMDKKGQLEVEIIRARGLVVKPGSKTLPAPYVKVYLLDNGVCIAKKKTKVARKTLEPLYQQLLSFEESPQGKVLQIIVWGDYGRMDHKSFMGVAQILLDELELSNMVIGWFKLFPPSSLVDPTLAPLTRRASQSSLESSTGPSYSRS

SEQ ID NO: 61228 - protein, 1386 aa, Homo sapiens
MSAPVGPRGRLAPIPAASQPPLQPEMPDLSHLTEEERKIILAVMDRQKKEVKEEHKPQLTQWFPFSGITELVNNVLQPQQKQQNEKEPQTKLHQQFEMYKEQVKKMGEESQQQQEQKGDAPTCGICHKTKFADGCGHNCSYCQTKFCARCGGRVSLRSNKVMWVCNLCRKQQEILTKSGAWFYNSGSNTPQQPDQKVLRGLRNEEAPQEKKPKLHEQTQFQGPSGDLSVPAVEKSRSHGLTRQHSIKNGSGVKHHIASDIASDRKRSPSVSRDQNRRYDQREEREEYSQYATSDTAMPRSPSDYADRRSQHEPQFYEDSDHLSYRDSNRRSHRHSKEYIVDDEDVESRDEYERQRREEEYQSRYRSDPNLARYPVKPQPYEEQMRIHAEVSRARHERRHSDVSLANADLEDSRISMLRMDRPSRQRSISERRAAMENQRSYSMERTREAQGPSSYAQRTTNHSPPTPRRSPLPIDRPDLRRTDSLRKQHHLDPSSAVRKTKREKMETMLRNDSLSSDQSESVRPPPPKPHKSKKGGKMRQISLSSSEEELASTPEYTSCDDVEIESESVSEKGDMDYNWLDHTSWHSSEASPMSLHPVTWQPSKDGDRLIGRILLNKRLKDGSVPRDSGAMLGLKVVGGKMTESGRLCAFITKVKKGSLADTVGHLRPGDEVLEWNGRLLQGATFEEVYNIILESKPEPQVELVVSRPIGDIPRIPDSTHAQLESSSSSFESQKMDRPSISVTSPMSPGMLRDVPQFLSGQLSIKLWFDKVGHQLIVTILGAKDLPSREDGRPRNPYVKIYFLPDRSDKNKRRTKTVKKTLEPKWNQTFIYSPVHRREFRERMLEITLWDQARVREEESEFLGEILIELETALLDDEPHWYKLQTHDVSSLPLPHPSPYMPRRQLHGESPTRRLQRSKRISDSEVSDYDCDDGIGVVSDYRHDGRDLQSSTLSVPEQVMSSNHCSPSGSPHRVDVIGRTRSWSPSVPPPQSRNVEQGLRGTRTMTGHYNTISRMDRHRVMDDHYSPDRDSHFLTLPRSRYSQTIDHHHRDGRDCEAADRQPYHRSRSTEQRPLLERTTTRSRSTERPDTNLMRSMPSLMTGRSAPPSPALSRSHPRTGSVQTSPSSTPVAGRRGRQLPQLPPKGTLDRKAGGKKLRSTVQRSTETGLAVEMRNWMTRQASRESTDGSMNSYSSEGNLIFPGVRLASDSQFSDFLDGLGPAQLVGRQTLATPAMGDIQVGMMDKKGQLEVEIIRARGLVVKPGSKTLPAPYVKVYLLDNGVCIAKKKTKVARKTLEPLYQQLLSFEESPQGKVLQIIVWGDYGRMDHKSFMGVAQILLDELELSNMVIGWFKLFPPSSLVDPTLAPLTRRASQSSLESSTGPSYSRS

SEQ ID NO: 61229 - protein, 285 aa, Homo sapiens
MGRQGLGGASAAGRSMQRSQSRSSLSASFEALAGYFPCMNSLEEEEGEAGGKKLRSTVQRSTETGLAVEMRNWMTRQASRESTDGSMNSYSSEGNLIFPGVRLASDSQFSDFLDGLGPAQLVGRQTLATPAMGDIQVGMMDKKGQLEVEIIRARGLVVKPGSKTLPAPYVKVYLLDNGVCIAKKKTKVARKTLEPLYQQLLSFEESPQGKVLQIIVWGDYGRMDHKSFMGVAQILLDELELSNMVIGWFKLFPPSSLVDPTLAPLTRRASQSSLESSTGPSYSRS

SEQ ID NO: 61230 - protein, 127 aa, Homo sapiens [sequence omitted]

SEQ ID NO: 61231 - protein, 1411 aa, Homo sapiens
MSAPVGPRGRLAPIPAASQPPLQPEMPDLSHLTEEERKIILAVMDRQKKEVKEEHKPQLTQWFPFSGITELVNNVLQPQQKQQNEKEPQTKLHQQFEMYKEQVKKMGEESQQQQEQKGDAPTCGICHKTKFADGCGHNCSYCQTKFCARCGGRVSLRSNKVMWVCNLCRKQQEILTKSGAWFYNSGSNTPQQPDQKVLRGLRNEEAPQEKKPKLHEQTQFQGPSGDLSVPAVEKSRSHGLTRQHSIKNGSGVKHHIASDIASDRKRSPSVSRDQNRRYDQREEREEYSQYATSDTAMPRSPSDYADRRSQHEPQFYEDSDHLSYRDSNRRSHRHSKEYIVDDEDVESRDEYERQRREEEYQSRYRSDPNLARYPVKPQPYEEQMRIHAEVSRARHERRHSDVSLANADLEDSRISMLRMDRPSRQRSISERRAAMENQRSYSMERTREAQGPSSYAQRTTNHSPPTPRRSPLPIDRPDLRRTDSLRKQHHLDPSSAVRKTKREKMETMLRNDSLSSDQSESVRPPPPKPHKSKKGGKMRQISLSSSEEELASTPEYTSCDDVEIESESVSEKGDSQKGKRKTSEQAVLSDSNTRSERQKEMMYFGGHSLEEDLEWSEPQIKDSGVDTCSSTTLNEEHSHSDKHPVTWQPSKDGDRLIGRILLNKRLKDGSVPRDSGAMLGLKVVGGKMTESGRLCAFITKVKKGSLADTVGHLRPGDEVLEWNGRLLQGATFEEVYNIILESKPEPQVELVVSRPIGDIPRIPDSTHAQLESSSSSFESQKMDRPSISVTSPMSPGMLRDVPQFLSGQLSIKLWFDKVGHQLIVTILGAKDLPSREDGRPRNPYVKIYFLPDRSDKNKRRTKTVKKTLEPKWNQTFIYSPVHRREFRERMLEITLWDQARVREEESEFLGEILIELETALLDDEPHWYKLQTHDVSSLPLPHPSPYMPRRQLHGESPTRRLQRSKRISDSEVSDYDCDDGIGVVSDYRHDGRDLQSSTLSVPEQVMSSNHCSPSGSPHRVDVIGRTRSWSPSVPPPQSRNVEQGLRGTRTMTGHYNTISRMDRHRVMDDHYSPDRDRDCEAADRQPYHRSRSTEQRPLLERTTTRSRSTERPDTNLMRSMPSLMTGRSAPPSPALSRSHPRTGSVQTSPSSTPVAGRRGRQLPQLPPKGTLDRKAGGKKLRSTVQRSTETGLAVEMRNWMTRQASRESTDGSMNSYSSEGNLIFPGVRLASDSQFSDFLDGLGPAQLVGRQTLATPAMGDIQVGMMDKKGQLEVEIIRARGLVVKPGSKTLPAPYVKVYLLDNGVCIAKKKTKVARKTLEPLYQQLLSFEESPQGKVLQIIVWGDYGRMDHKSFMGVAQILLDELELSNMVIGWFKLFPPSSLVDPTLAPLTRRASQSSLESSTGPSYSRS

SEQ ID NO: 61232 - protein, 1349 aa, Homo sapiens
MSAPVGPRGRLAPIPAASQPPLQPEMPDLSHLTEEERKIILAVMDRQKKEEEKEQSVLKKLHQQFEMYKEQVKKMGEESQQQQEQKGDAPTCGICHKTKFADGCGHNCSYCQTKFCARCGGRVSLRSNKVMWVCNLCRKQQEILTKSGAWFYNSGSNTPQQPDQKVLRGLRNEEAPQEKKPKLHEQTQFQGPSGDLSVPAVEKSRSHGLTRQHSIKNGSGVKHHIASDIASDRKRSPSVSRDQNRRYDQREEREEYSQYATSDTAMPRSPSDYADRRSQHEPQFYEDSDHLSYRDSNRRSHRHSKEYIVDDEDVESRDEYERQRREEEYQSRYRSDPNLARYPVKPQPYEEQMRIHAEVSRARHERRHSDVSLANADLEDSRISMLRMDRPSRQRSISERRAAMENQRSYSMERTREAQGPSSYAQRTTNHSPPTPRRSPLPIDRPDLRRTDSLRKQHHLDPSSAVRKTKREKMETMLRNDSLSSDQSESVRPPPPKPHKSKKGGKMRQISLSSSEEELASTPEYTSCDDVEIESESVSEKGDMDYNWLDHTSWHSSEASPMSLHPVTWQPSKDGDRLIGRILLNKRLKDGSVPRDSGAMLGLKVVGGKMTESGRLCAFITKVKKGSLADTVGHLRPGDEVLEWNGRLLQGATFEEVYNIILESKPEPQVELVVSRPIGDIPRIPDSTHAQLESSSSSFESQKMDRPSISVTSPMSPGMLRDVPQFLSGQLSSQSLSRRTTPFVPRVQIKLWFDKVGHQLIVTILGAKDLPSREDGRPRNPYVKIYFLPDRSDKNKRRTKTVKKTLEPKWNQTFIYSPVHRREFRERMLEITLWDQARVREEESEFLGEILIELETALLDDEPHWYKLQTHDVSSLPLPHPSPYMPRRQLHGESPTRRLQRSKRISDSEVSDYDCDDGIGVVSDYRHDGRDLQSSTLSVPEQVMSSNHCSPSGSPHRVDVIGRTRSWSPSVPPPQSRNVEQGLRGTRTMTGHYNTISRMDRHRVMDDHYSPDRDRDCEAADRQPYHRSRSTEQRPLLERTTTRSRSTERPDTNLMRSMPSLMTGRSAPPSPALSRSHPRTGSVQTSPSSTPVAGRRGRQLPQLPPKGTLDRKAGGKKLRSTVQRSTETGLAVEMRNWMTRQASRESTDGSMNSYSSEGNLIFPGVRLASDSQFSDFLDGLGPAQLVGRQTLATPAMGDIQVGMMDKKGQLEVEIIRARGLVVKPGSKTLPAPYVKVYLLDNGVCIAKKKTKVARKTLEPLYQQLLSFEESPQGKVLQIIVWGDYGRMDHKSFMGVAQILLDELELSNMVIGWFKLFPPSSLVDPTLAPLTRRASQSSLESSTGPSYSRS

SEQ ID NO: 61233 - protein, 1163 aa, Homo sapiens
MQFETLRQVCNSVLSHFHGVFSSPPNILQNELFGQTLNNARKRSPSVSRDQNRRYDQREEREEYSQYATSDTAMPRSPSDYADRRSQHEPQFYEDSDHLSYRDSNRRSHRHSKEYIVDDEDVESRDEYERQRREEEYQSRYRSDPNLARYPVKPQPYEEQMRIHAEVSRARHERRHSDVSLANADLEDSRISMLRMDRPSRQRSISERRAAMENQRSYSMERTREAQGPSSYAQRTTNHSPPTPRRSPLPIDRPDLRRTDSLRKQHHLDPSSAVRKTKREKMETMLRNDSLSSDQSESVRPPPPKPHKSKKGGKMRQISLSSSEEELASTPEYTSCDDVEIESESVSEKGDMDYNWLDHTSWHSSEASPMSLHPVTWQPSKDGDRLIGRILLNKRLKDGSVPRDSGAMLGLKVVGGKMTESGRLCAFITKVKKGSLADTVGHLRPGDEVLEWNGRLLQGATFEEVYNIILESKPEPQVELVVSRPIGDIPRIPDSTHAQLESSSSSFESQKMDRPSISVTSPMSPGMLRDVPQFLSGQLSIKLWFDKVGHQLIVTILGAKDLPSREDGRPRNPYVKIYFLPDRSDKNKRRTKTVKKTLEPKWNQTFIYSPVHRREFRERMLEITLWDQARVREEESEFLGEILIELETALLDDEPHWYKLQTHDVSSLPLPHPSPYMPRRQLHGESPTRRLQRSKRISDSEVSDYDCDDGIGVVSDYRHDGRDLQSSTLSVPEQVMSSNHCSPSGSPHRVDVIGRTRSWSPSVPPPQSRNVEQGLRGTRTMTGHYNTISRMDRHRVMDDHYSPDRDSHFLTLPRSRYSQTIDHHHRDGRDCEAADRQPYHRSRSTEQRPLLERTTTRSRSTERPDTNLMRSMPSLMTGRSAPPSPALSRSHPRTGSVQTSPSSTPVAGRRGRQLPQLPPKGTLDRKAGGKKLRSTVQRSTETGLAVEMRNWMTRQASRESTDGSMNSYSSEGNLIFPGVRLASDSQFSDFLDGLGPAQLVGRQTLATPAMGDIQVGMMDKKGQLEVEIIRARGLVVKPGSKTLPAPYVKVYLLDNGVCIAKKKTKVARKTLEPLYQQLLSFEESPQGKVLQIIVWGDYGRMDHKSFMGVAQILLDELELSNMVIGWFKLFPPSSLVDPTLAPLTRRASQSSLESSTGPSYSRS

SEQ ID NO: 61234 - protein, 308 aa, Homo sapiens
MFNGEPGPASSGASRNVVRSSSISGEICGSQQAGGGAGTTTAKKRRSSLGAKMVAIVGLTQWSKSTLQLPQPEGATKKLRSNIRRSTETGIAVEMRSRVTRQGSRESTDGSTNSNSSDGTFIFPTTRLGAESQFSDFLDGLGPAQIVGRQTLATPPMGDVHIAIMDRSGQLEVEVIEARGLTPKPGSKSLPATYIKVYLLENGACLAKKKTKMTKKTCDPLYQQALLFDEGPQGKVLQVIVWGDYGRMDHKCFMGMAQIMLDELDLSAAVTGWYKLFPTSSVADSTLGSLTRRLSQSSLESATSPSCS

SEQ ID NO: 61235 - protein, 308 aa, Homo sapiens; identical to SEQ ID NO: 61234

SEQ ID NO: 61236 - protein, 269 aa, Homo sapiens
MERSQSRLSLSASFEALAIYFPCMNSFDDEDAGDSRRLKGAIQRSTETGLAVEMPSRTLRQASHESIEDSMNSYGSEGNLNYGGVCLASDAQFSDFLGSMGPAQFVGRQTLATTPMGDVEIGLQERNGQLEVDIIQARGLTAKPGSKTLPAAYIKAYLLENGICIAKKKTKVARKSLDPLYNQVLLFPESPQGKVLQVIVWGNYGRMERKQFMGVARVLLEELDLTTLAVGWYKLFPTSSMVDPATGPLLRQASQLSLESTVGPCGERS

SEQ ID NO: 61237 - protein, 270 aa, Homo sapiens
MERSQSRLSLSASFEALAIYFPCMNSFDDEDAEGDSRRLKGAIQRSTETGLAVEMPSRTLRQASHESIEDSMNSYGSEGNLNYGGVCLASDAQFSDFLGSMGPAQFVGRQTLATTPMGDVEIGLQERNGQLEVDIIQARGLTAKPGSKTLPAAYIKAYLLENGICIAKKKTKVARKSLDPLYNQVLLFPESPQGKVLQVIVWGNYGRMERKQFMGVARVLLEELDLTTLAVGWYKLFPTSSMVDPATGPLLRQASQLSLESTVGPCGERS

SEQ ID NO: 61238 - protein, 252 aa, Homo sapiens
MEDGVAGPQLGAAAEAAEAAEARARPGVTLRPFAPLSGAAEADEGGGDWSFIDCEMEEVDLQDLPSATIACHLDPRVFVDGLCRAKFESLFRTYDKDITFQYFKSFKRVRINFSNPFSAADARLQLHKTEFLGKEMKLYFAQTLHIGSSHLAPPNPDKQFLISPPASPPVGWKQVEDATPVINYDLLYAISKLGPGEKYELHAATDTTPSVVVHVCESDQEKEEEEEMERMRRPKPKIIQTRRPEYTPIHLS

SEQ ID NO: 61239 - protein, 197 aa, Homo sapiens
MHFRNFNYSFSSLIACVANSDIFSESETRAKFESLFRTYDKDITFQYFKSFKRVRINFSNPFSAADARLQLHKTEFLGKEMKLYFAQTLHIGSSHLAPPNPDKQFLISPPASPPVGWKQVEDATPVINYDLLYAISKLGPGEKYELHAATDTTPSVVVHVCESDQEKEEEEEMERMRRPKPKIIQTRRPEYTPIHLS

SEQ ID NO: 61240 - protein, 242 aa, Homo sapiens
MQGEQGRRLFRLLLNDLPGRDRLPCSYPQPHVEQASTSASPRLLAVNIPEDTLLSYPESSLPLQRHCAFHRFSKAKFESLFRTYDKDITFQYFKSFKRVRINFSNPFSAADARLQLHKTEFLGKEMKLYFAQTLHIGSSHLAPPNPDKQFLISPPASPPVGWKQVEDATPVINYDLLYAISKLGPGEKYELHAATDTTPSVVVHVCESDQEKEEEEEMERMRRPKPKIIQTRRPEYTPIHLS

SEQ ID NO: 61241 - protein, 117 aa, Homo sapiens
MKLYFAQTLHIGSSHLAPPNPDKQFLISPPASPPVGWKQVEDATPVINYDLLYAISKLGPGEKYELHAATDTTPSVVVHVCESDQEKEEEEEMERMRRPKPKIIQTRRPEYTPIHLS

SEQ ID NO: 61242 - protein, 117 aa, Homo sapiens; identical to SEQ ID NO: 61241

SEQ ID NO: 61243 - protein, 117 aa, Homo sapiens; identical to SEQ ID NO: 61241

SEQ ID NO: 61244 - protein, 243 aa, Homo sapiens
MRGESYFIGMRSPGQQGHVPEDGGLFLLCCIDRDWAVTRCFAEEAFQAITDFNDLPNSLFACNVHQSVFEGEESKEKFEGLFRTYDDCVTFQLFKSFRRVRINFSNPKSAARARIELHETQFRGKKLKLYFAQVQTPETDGDKLHLAPPQPAKQFLISPPSSPPVGWQPINDATPVLNYDLLYAVAKLGPGEKYELHAGTESTPSVVVHVCDSDIEEEEDPKTSPKPKIIQTRRPGLPPSVSN

SEQ ID NO: 61245 - protein, 197 aa, Homo sapiens [sequence omitted]

SEQ ID NO: 61246 - protein, 243 aa, Homo sapiens; identical to SEQ ID NO: 61244

SEQ ID NO: 61247 - protein, 243 aa, Homo sapiens; identical to SEQ ID NO: 61244

SEQ ID NO: 61248 - protein, 531 aa, Homo sapiens
MVDVGKWPIFTLLSPQEIASIRKACVFGTSASEALYVTDNDEVFVFGLNYSNCLGTGDNQSTLVPKKLEGLCGKKIKSLSYGSGPHVLLSTEDGVVYAWGHNGYSQLGNGTTNQGIAPVQVCTNLLIKQVVEVACGSHHSMALAADGEVFAWGYNNCGQVGSGSTANQPTPRKVTNCLHIKRVVGIACGQTSSMAVLDNGEVYGWGYNGNGQLGLGNNGNQLTPVRVAALHSVCVNQIVCGYAHTLALTDEGLLYAWGANTYGQLGTGNKNNLLSPAHIMVEKERVVEIAACHSAHTSAAKTQGGHVYMWGQCRGQSVILPHLTHFSCTDDVFACFATPAVSWRLLSVEHEDFLTVAESLKKEFDSPETADLKFRIDGKYIHVHKAVLKIRCEHFRSMFQSYWNEDMKEVIEIDQFSYPVYRAFLQYLYTDTVDLPPEDAIGLLDLATSYCENRLKKLCQHIIKRGITVENAFSLFSAAVRYDAEDLEEFCFKFCINHLTEVTQTAAFWQMDGPLLKEFIAKASKCGAFKN

SEQ ID NO: 61249 - protein, 531 aa, Homo sapiens; identical to SEQ ID NO: 61248

SEQ ID NO: 61250 - protein, 355 aa, Homo sapiens
MVDVGKWPIFTLLSPQEIASIRKACVFGTSASEALYVTDNDEVFVFGLNYSNCLGTGDNQSTLVPKKLEGLCGKKIKSLSYGSGPHVLLSTEDGVVYAWGHNGYSQLGNGTTNQGIAPVQVCTNLLIKQVVEVACGSHHSMALAADGEVFAWGYNNCGQVGSGSTANQPTPRKVTNCLHIKRVVGIACGQTSSMAVLDNGEVYGWGYNGNGQLGLGNNGNQLTPVRVAALHSVCVNQIVCGYAHTLALTDEGLLYAWGANTYGQLGTGNKNNLLSPAHIMVEKERVVEIAACHSAHTSAAKTQGGHVYMWGQCRGQSVILPHLTHFSCTDDVFACFATPAVSWRLLSVVSIVIGK

SEQ ID NO: 61251 - protein, 551 aa, Homo sapiens
MEEELPLFSGDSGKPVQATLSSLKMLDVGKWPIFSLCSEEELQLIRQACVFGSAGNEVLYTTVNDEIFVLGTNCCGCLGLGDVQSTIEPRRLDSLNGKKIACLSYGSGPHIVLATTEGEVFTWGHNAYSQLGNGTTNHGLVPCHISTNLSNKQVIEVACGSYHSLVLTSDGEVFAWGYNNSGQVGSGSTVNQPIPRRVTGCLQNKVVVTIACGQMCCMAVVDTGEVYVWGYNGNGQLGLGNSGNQPTPCRVAALQGIRVQRVACGYAHTLVLTDEGQVYAWGANSYGQLGTGNKSNQSYPTPVTVEKDRIIEIAACHSTHTSAAKTQGGHVYMWGQCRGQSVILPHLTHFSCTDDVFACFATPAVTWRLLSVEPDDHLTVAESLKREFDNPDTADLKFLVDGKYIYAHKVLLKIRCEHFRSSLEDNEDDIVEMSEFSYPVYRAFLEYLYTDSISLSPEEAVGLLDLATFYRENRLKKLCQQTIKQGICEENAIALLSAAVKYDAQDLEEFCFRFCINHLTVVTQTSGFAEMDHDLLKNFISKASRVGAFKN

SEQ ID NO: 61252 - protein, 556 aa, Homo sapiens
MSALPRDLELSNPREKLTKPVQATLSSLKMLDVGKWPIFSLCSEEELQLIRQACVFGSAGNEVLYTTVNDEIFVLGTNCCGCLGLGDVQSTIEPRRLDSLNGKKIACLSYGSGPHIVLATTEGEVFTWGHNAYSQLGNGTTNHGLVPCHISTNLSNKQVIEVACGSYHSLVLTSDGEVFAWGYNNSGQVGSGSTVNQPIPRRVTGCLQNKVVVTIACGQMCCMAVVDTGEVYVWGYNGNGQLGLGNSGNQPTPCRVAALQGIRVQRVACGYAHTLVLTDEGQVYAWGANSYGQLGTGNKSNQSYPTPVTVEKDRIIEIAACHSTHTSAAKTQGGHVYMWGQCRGQSVILPHLTHFSCTDDVFACFATPAVTWRLLSVEPDDHLTVAESLKREFDNPDTADLKFLVDGKYIYAHKVLLKIRCEHFRSSLEDNEDDIVEMSEFSYPVYRAFLEYLYTDSISLSPEEAVGLLDLATFYRENRLKKLCQQTIKQGICEENAIALLSAAVKYDAQDLEEFCFRFCINHLTVVTQTSGFAEMDHDLLKNFISKASRVGAFKN

SEQ ID NO: 61253 - protein, 503 aa, Homo sapiens
MLQDGSCKQMLLMLLIVQPVQATLSSLKMLDVGKWPIFSLCSEEELQLIRQACVFGSAGNEVLYTTVNDEIFVLGTNCCGCLGLGDVQSTIEPRRLDSLNGKKIACLSYGSGPHIVLATTEGEVFTWGHNAYSQLGNGTTNHGLVPCHISTNLSNKQVIEVACGSYHSLVLTSDGEVFAWGYNNSGQVGSGSTVNQPIPRRVTGCLQNKVVVTIACGQMCCMAVVDTGEVYVWGYNGNGQLGLGNSGNQPTPCRVAALQGIRVQRVACGYTHTSAAKTQGGHVYMWGQCRGQSVILPHLTHFSCTDDVFACFATPAVTWRLLSVEPDDHLTVAESLKREFDNPDTADLKFLVDGKYIYAHKVLLKIRCEHFRSSLEDNEDDIVEMSEFSYPVYRAFLEYLYTDSISLSPEEAVGLLDLATFYRENRLKKLCQQTIKQGICEENAIALLSAAVKYDAQDLEEFCFRFCINHLTVVTQTSGFAEMDHDLLKNFISKASRVGAFKN

SEQ ID NO: 61254 - protein, 556 aa, Homo sapiens
PCSNRYPGGGADKAPACEEPVQATLSSLKMLDVGKWPIFSLCSEEELQLIRQACVFGSAGNEVLYTTVNDEIFVLGTNCCGCLGLGDVQSTIEPRRLDSLNGKKIACLSYGSGPHIVLATTEGEVFTWGHNAYSQLGNGTTNHGLVPCHISTNLSNKQVIEVACGSYHSLVLTSDGEVFAWGYNNSGQVGSGSTVNQPIPRRVTGCLQNKVVVTIACGQMCCMAVVDTGEVYVWGYNGNGQLGLGNSGNQPTPCRVAALQGIRVQRVACGYAHTLVLTDEGQVYAWGANSYGQLGTGNKSNQSYPTPVTVEKDRIIEIAACHSTHTSAAKTQGGHVYMWGQCRGQSVILPHLTHFSCTDDVFACFATPAVTWRLLSVEPDDHLTVAESLKREFDNPDTADLKFLVDGKYIYAHKVLLKIRCEHFRSSLEDNEDDIVEMSEFSYPVYRAFLEYLYTDSISLSPEEAVGLLDLATFYRENRLKKLCQQTIKQGICEENAIALLSAAVKYDAQDLEEFCFRFCINHLTVVTQTSGFAEMDHDLLKNFISKASRVGAFKN

SEQ ID NO: 61255 - protein, 277 aa, Homo sapiens
MSGVTTETGSLDSATVATSQPLAEWQLCKASVSRGIIEIAACHSTHTSAAKTQGGHVYMWGQCRGQSVILPHLTHFSCTDDVFACFATPAVTWRLLSVEPDDHLTVAESLKREFDNPDTADLKFLVDGKYIYAHKVLLKIRCEHFRSSLEDNEDDIVEMSEFSYPVYRAFLEYLYTDSISLSPEEAVGLLDLATFYRENRLKKLCQQTIKQGICEENAIALLSAAVKYDAQDLEEFCFRFCINHLTVVTQTSGFAEMDHDLLKNFISKASRVGAFKN

SEQ ID NO: 61256 - protein, 281 aa, Homo sapiens
MLDVGKWPIFSLCSEEELQLIRQACVFGSAGNEVLYTTVNDEIFVLGTNCCGCLGLGDVQSTIEPRRLDSLNGKKIACLSYGSGPHIVLATTEGEVFTWGHNAYSQLGNGTTNHGLVPCHISTNLSNKQVIEVACGSYHSLVLTSDGEVFAWGYNNSGQVGSGSTVNQPIPRRVTGCLQNKVVVTIACGQMCCMAVVDTGEVYVWGYNGNGQLGLGNSGNQPTPCRVAALQGIRVQRDYRDCSLSLHTHVCGQDAGWARVHVGPVPGSVRDPPAPHPLLLH

SEQ ID NO: 61257 - protein, 452 aa, Homo sapiens
MSPKRIAKRRSPPADAIPKSKKVKDTRAAASRRVPGARSCQGACGPSPPDQKTRPVSHRSHSTEPGLVLTLGQGDVGQLGLGENVMERKKPALVSIPEDVVQAEAGGMHTVCLSKSGQVYSFGCNDEGALGRDTSVEGSEMVPGKVELQEKVVQVSAGDSHTAALTDDGRVFLWGSFRDNNGVIGLLEPMKKSMVPVQVQLDVPVVKVASGNDHLVMLTADGDLYTLGCGEQGQLGRVPELFANRGGRQGLERLLVPKCVMLKSRGSRGHVRFQDAFCGAYFTFAISHEGHVYGFGLSNYHQLGTPGTESCFIPQNLTSFKNSTKSWVGFSGGQHHTVCMDSEGKAYSLGRAEYGRLGLGEGAEEKSIPTLISRLPAVSSVACGASVGYAVTKDGRVFAWGMGTNYQLGTGQDEDAWSPVEMMGKQLENRVVLSVSSGGQHTVLLVKDKEQS

SEQ ID NO: 61258 - protein, 421 aa, Homo sapiens
MSPKRIAKRRSPPADAIPKSKKVKVSHRSHSTEPGLVLTLGQGDVGQLGLGENVMERKKPALVSIPEDVVQAEAGGMHTVCLSKSGQVYSFGCNDEGALGRDTSVEGSEMVPGKVELQEKVVQVSAGDSHTAALTDDGRVFLWGSFRDNNGVIGLLEPMKKSMVPVQVQLDVPVVKVASGNDHLVMLTADGDLYTLGCGEQGQLGRVPELFANRGGRQGLERLLVPKCVMLKSRGSRGHVRFQDAFCGAYFTFAISHEGHVYGFGLSNYHQLGTPGTESCFIPQNLTSFKNSTKSWVGFSGGQHHTVCMDSEGKAYSLGRAEYGRLGLGEGAEEKSIPTLISRLPAVSSVACGASVGYAVTKDGRVFAWGMGTNYQLGTGQDEDAWSPVEMMGKQLENRVVLSVSSGGQHTVLLVKDKEQS

SEQ ID NO: 61259 - protein, 421 aa, Homo sapiens; identical to SEQ ID NO: 61258

SEQ ID NO: 61260 - protein, 421 aa, Homo sapiens; identical to SEQ ID NO: 61258

SEQ ID NO: 61261 - protein, 230 aa, Homo sapiens
MSPKRIAKRRSPPADAIPKSKKVKVSHRSHSTEPGLVLTLGQGDVGQLGLGENVMERKKPALVSIPEDVVQAEAGGMHTVCLSKSGQVYSFGCNDEGALGRDTSVEGSEMVPGKVELQEKVVQVSAGDSHTAALTDDGRVFLWGSFRDNNGVIGLLEPMKKSMVPVQVQLDVPVVKVASGNDHLVMLTADGDLYTLGCGEQGQLGRVPELFANRGGRQGLERLLVPKCVM

SEQ ID NO: 61262 - protein, 283 aa, Homo sapiens
MSPKRIAKRRSPPADAIPKSKKVKVSHRSHSTEPGLVLTLGQGDVGQLGLGENVMERKKPALVSIPEDVVQAEAGGMHTVCLSKSGQVYSFGCNDEGALGRDTSVEGSEMVPGKVELQEKVVQVSAGDSHTAALTDDGRVFLWGSFRDNNGVIGLLEPMKKSMVPVQVQLDVPVVKVASGNDHLVMLTADGDLYTLGCGEQGQLGRVPELFANRGGRQGLERLLVPKCVMLKSRGSRGHVRFQDAFCGAYFTFAISHEGHVYGFGLSNYHQLGTPGTESCFIP

SEQ ID NO: 61263 - protein, 235 aa, Homo sapiens
MAREECKALLDGLNKTTACYHHLVLTVGGSADSQNLRQELQKTRQKAQELAVSTCARLTAVLRDRGLAADERAEFERLWVAFSGCLDLLEADMRRALELGAAFPLHAPRRPLVRTGVAGASSGVAARALSTRSLRLEAEGDFDVADLRELEREVLQVGEMIDNMEMKVNVPRWTVQARQAAGAELLSTVSAGPSSVVSLQERGGGCDPRKALAAILFGAVLLAAVALAVCVAKLS

SEQ ID NO: 61264 - protein, 209 aa, Homo sapiens
MRAAAISTPKLDKMPGMFFSANPKELKGTTHSLLDDKMQKRRPKTFGMDMKAYLRSMIPHLESGMKSSKSKDVLSAAEVMQWSQSLEKLLANQTGQNVFGSFLKSEFSEENIEFWLACEDYKKTESDLLPCKAEEIYKAFVHSDAAKQINIDFRTRESTAKKIKAPTPTCFDEAQKVIYTLMEKDSYPRFLKSDIYLNLLNDLQANSLK

SEQ ID NO: 61265 - protein, 347 aa, Homo sapiens
MPGKPKHLGVPNGRMVLAVSDGELSSTTGPQGQGEGRGSSLSIHSLPSGPSSPFPTFVSSKSESHRKSLGSTEGESESRPGKYCCVYLPDGTASLALARPGLTIRDMLAGICEKRGLSLPDIKVYLVGNEQKALVLDQDCTVLADQEVRLENRITFELELTALERVVRISAKPTKRLQEALQPILEKHGLSPLEVVLHRPGEKQPLDLGKLVSSVAAQRLVLDTLPGVKISKARDKSPCRSQGCPPRTQDKATHPPPASPSSLVKVPSSATGKRQTCDIEGLVELLNRVQSSGAHDQRGLLRKEDLVLPEFLQLPAQGPSSEETPPQTKSAAQPIGGSLNSTTDSAL

SEQ ID NO: 61266 - protein, 566 aa, Homo sapiens
MPGKPKHLGVPNGRMVLAVSDGELSSTTGPQGQGEGRGSSLSIHSLPSGPSSPFPTEEQPVASWALSFERLLQDPLGLAYFTEFLKKEFSAENVTFWKACERFQQIPASDTQQLAQEARNIYQEFLSSQALSPVNIDRQAWLGEEVLAEPRPDMFRAQQLQIFNLMKFDSYARFVKSPLYRECLLAEAEGRPLREPGSSRLGSPDATRKKPKLKPGKSLPLGVEELGQLPPVEGPGGRPLRKSFRRELGGTANAALRRESQGSLNSSASLDLGFLAFVSSKSESHRKSLGSTEGESESRPGKYCCVYLPDGTASLALARPGLTIRDMLAGICEKRGLSLPDIKVYLVGNEQALVLDQDCTVLADQEVRLENRITFELELTALERVVRISAKPTKRLQEALQPILEKHGLSPLEVVLHRPGEKQPLDLGKLVSSVAAQRLVLDTLPGVKISKARDKSPCRSQGCPPRTQDKATHPPPASPSSLVKVPSSATGKRQTCDIEGLVELLNRVQSSGAHDQRGLLRKEDLVLPEFLQLPAQGPSSEETPPQTKSAAQPIGGSLNSTTDSAL

SEQ ID NO: 61267 - protein, 437 aa, Homo sapiens
  VARIANT 1: note = MOD_RES - Any amino acid
XSPVNIDRQAWLGEEVLAEPRPDMFRAQQLQIFNLMKFDSYARFVKSPLYRECLLAEAEGRPLREPGSSRLGSPDATRKKPKLKPGKSLPLGVEELGQLPPVEGPGGRPLRKSFRRELGGTANAALRRESQGSLNSSASLDLGFLAFVSSKSESHRKSLGSTEGESESRPGKYCCVYLPDGTASLALARPGLTIRDMLAGICEKRGLSLPDIKVYLVGNEQKALVLDQDCTVLADQEVRLENRITFELELTALERVVRISAKPTKRLQEALQPILEKHGLSPLEVVLHRPGEKQPLDLGKLVSSVAAQRLVLDTLPGVKISKARDKSPCRSQGCPPRTQDKATHPPPASPSSLVKVPSSATGKRQTCDIEGLVELLNRVQSSGAHDQRGLLRKEDLVLPEFLQLPAQGPSSEETPPQTKSAAQPIGGSLNSTTDSAL

SEQ ID NO: 61268 - protein, 202 aa, Homo sapiens
MCRTLAAFPTTCLERAKEFKTRLGIFLHKSELGCDTGSTGKFEWGSKHSKENRNFSEDVLGWRESFDLLLSSKNGVAAFHAFLKTEFSEENLEFWLACEEFKKIRSATKLASRAHQIFEEFICSEAPKEVNIDHETHELTRMNLQTATATCFDAAQGKTRTLMEKDSYPRFLKSPAYRDLAAQASAASATLSSCSLDEPSHT

SEQ ID NO: 61269 - protein, 152 aa, Homo sapiens
MPVKCCFYRSPTAETMTWSENMDTLLANQAGLDAFRIFLKSEFSEENVEFWLACEDFKKTKNADKIASKAKMIYSEFIEADAPKEINIDFGTRDLISKNIAEPTLKCFDEAQKLIYCLMAKDSFPRFLKSEIYKKLVNSQQVPNHKKWLPFL

SEQ ID NO: 61270 - protein, 602 aa, Homo sapiens
MERSLHRVSLGSRRAHPDLSFYLTTFGQLRLSIDAQDRVLLLHIIEGKGLISKQPGTCDPYVKISLIPEDSRLRHQKTQTVPDCRDPAFHEHFFFPVQEEDDQKRLLVTVWNRASQSRQSGLIGCMSFGVKSLLTPDKEISGWYYLLGEHLGRTKHLKVARRRLRPLRDPLLRMPGGGDTENGKKLKITIPRGKDGFGFTICCDSPVRVQAVDSGGPAERAGLQQLDTVLQLNERPVEHWKCVELAHEIRSCPSEIILLVWRMVPQVKPGPDGGVLRRASCKSTHDLQSPPNKREKNCTHGVQARPEQRHSCHLVCDSSDGLLLGGWERYTEVAKRGGQHTLPALSRATAPTDPNYIILAPLNPGSQLLRPVYQEDTIPEESGSPSKGKSYTGLGKKSRLMKTVQTMKGHGNYQNCPVVRPHATHSSYGTYVTLAPKVLVFPVFVQPLDLCNPARTLLLSEELLLYEGRNKAAEVTLFAYSDLLLFTKEDEPGRCDVLRNPLYLQSVKLQEGSSEDLKFCVLYLAEKAECLFTLEAHSQEQKKRVCWCLSENIAKQQQLAASPPDSKKLHPFGSLQQEMGPVNSTNATQDRSFTSPGQTLIG

SEQ ID NO: 61271 - protein, 168 aa, Homo sapiens
MKNKLGIFRRRNESPGAPPAGKADKMMKSFKPTSEEALKWGESLEKLLVHKYGLAVFQAFLRTEFSEENLEFWLACEDFKKVKSQSKMASKAKKIFAEYIAIQACKEVNLDSYTREHTKDNLQSVTRGCFDLAQKRIFGLMEKDSYPRFLRSDLYLDLINQKKMSPPL

SEQ ID NO: 61272 - protein, 917 aa, Homo sapiens
MNRFNGLCKVCSERRYRQITIPRGKDGFGFTICCDSPVRVQAVDSGGPAERAGLQQLDTVLQLNERPVEHWKCVELAHEIRSCPSEIILLVWRMVPQVKPGPDGGVLRRASCKSTHDLQSPPNKREKNCTHGVQARPEQRHSCHLVCDSSDGLLLGGWERYTEVAKRGGQHTLPALSRATAPTDPNYIILAPLNPGSQLLRPVYQEDTIPEESGSPSKGKSYTGLGKKSRLMKTVQTMKGHGNYQNCPVVRPHATHSSYGTYVTLAPKVLVFPVFVQPLDLCNPARTLLLSEELLLYEGRNKAAEVTLFAYSDLLLFTKEDEPGRCDVLRNPLYLQSVKLQEGSSEDLKFCVLYLAEKAECLFTLEAHSQEQKKRVCWCLSENIAKQQQLAASPPDSKMFETEADEKREMALEEGKGPGAEDSPPSKEPSPGQELPPGQDLPPNKDSPSGQEPAPSQEPLSSKDSATSEGSPPGPDAPPSKDVPPCQEPPPAQDLSPCQDLPAGQEPLPHQDPLLTKDLPAIQESPTRDLPPCQDLPPSQVSLPAKALTEDTMSSGDLLAATGDPPAAPRPAFVIPEVRLDSTYSQKAGAEQGCSGDEEDAEEAEEVEEGEEGEEDEDEDTSDDNYGERSEAKRSSMIETGQGAEGGLSLRVQNSLRRRTHSEGSLLQEPRGPCFASDTTLHCSDGEGAASTWGMPSPSTLKKELGRNGGSMHHLSLFFTGHRKMSGADTVGDDDEASRKRKSKNLAKDMKNKLGIFRRRNESPGAPPAGKADKMMKSFKPTSEEALKWGESLEKLLVHKYGLAVFQAFLRTEFSEENLEFWLACEDFKKVKSQSKMASKAKKIFAEYIAIQACKEVNLDSYTREHTKDNLQSVTRGCFDLAQKRIFGLMEKDSYPRFLRSDLYLDLINQKKMSPPL

SEQ ID NO: 61273 - protein, 1198 aa, Homo sapiens
MPVIPALWEVEMGRSQGQEIETILANRSHSDSTPLPNFLSGSHRPECCTCRLLTASGAQDSLPFGRRLYSGPWRSCEEVCHVSVLSVLSTSCGLSLSLPIFPGWMEWLSPDIALPRRDEWTQTSPARKRITHAKVQGAGQLRLSIDAQDRVLLLHIIEGKGLISKQPGTCDPYVKISLIPEDSRLRHQKTQTVPDCRDPAFHEHFFFPVQEEDDQKRLLVTVWNRASQSRQSGLIGCMSFGVKSLLTPDKEISGWYYLLGEHLGRTKHLKVARRRLRPLRDPLLRMPGGGDTENGKKLKITIPRGKDGFGFTICCDSPVRVQAVDSGGPAERAGLQQLDTVLQLNERPVEHWKCVELAHEIRSCPSEIILLVWRMVPQVKPGPDGGVLRRASCKSTHDLQSPPNKREKNCTHGVQARPEQRHSCHLVCDSSDGLLLGGWERYTEVAKRGGQHTLPALSRATAPTDPNYIILAPLNPGSQLLRPVYQEDTIPEESGSPSKGKSYTGLGKKSRLMKTVQTMKGHGNYQNCPVVRPHATHSSYGTYVTLAPKVLVFPVFVQPLDLCNPARTLLLSEELLLYEGRNKAAEVTLFAYSDLLLFTKEDEPGRCDVLRNPLYLQSVKLQEGSSEDLKFCVLYLAEKAECLFTLEAHSQEQKKRVCWCLSENIAKQQQLAASPPDSKMFETEADEKREMALEEGKGPGAEDSPPSKEPSPGQELPPGQDLPPNKDSPSGQEPAPSQEPLSSKDSATSEGSPPGPDAPPSKDVPPCQEPPPAQDLSPCQDLPAGQEPLPHQDPLLTKDLPAIQESPTRDLPPCQDLPPSQVSLPAKALTEDTMSSGDLLAATGDPPAAPRPAFVIPEVRLDSTYSQKAGAEQGCSGDEEDAEEAEEVEEGEEGEEDEDEDTSDDNYGERSEAKRSSMIETGQGAEGGLSLRVQNSLRRRTHSEGSLLQEPRGPCFASDTTLHCSDGEGAASTWGMPSPSTLKKELGRNGGSMHHLSLFFTGHRKMSGADTVGDDDEASRKRKSKNLAKDMKNKLGIFRRRNESPGAPPAGKADKMMKSFKPTSEEALKWGESLEKLLVHKYGLAVFQAFLRTEFSEENLEFWLACEDFKKVKSQSKMASKAKKIFAEYIAIQACKEVNLDSYTREHTKDNLQSVTRGCFDLAQKRIFGLMEKDSYPRFLRSDLYLDLINQKKMSPPL

SEQ ID NO: 61274 - protein, 519 aa, Homo sapiens
MFETEADEKREMALEEGKGPGAEDSPPSKEPSPGQELPPGQDLPPNKDSPSGQEPAPSQEPLSSKDSATSEGSPPGPDAPPSKDVPPCQEPPPAQDLSPCQDLPAGQEPLPHQDPLLTKDLPAIQESPTRDLPPCQDLPPSQVSLPAKALTEDTMSSGDLLAATGDPPAAPRPAFVIPEVRLDSTYSQKAGAEQGCSGDEEDAEEAEEVEEGEEGEEDEDEDTSDDNYGERSEAKRSSMIETGQGAEGGLSLRVQNSLRRRTHSEGSLLQEPRGPCFASDTTLHCSDGEGAASTWGMPSPSTLKKELGRNGGSMHHLSLFFTGHRKMSGADTVGDDDEASRKRKSKNLAKDMKNKLGIFRRRNESPGAPPAGKADKMMKSFKPTSEEALKWGESLEKLLVHKYGLAVFQAFLRTEFSEENLEFWLACEDFKKVKSQSKMASKAKKIFAEYIAIQACKEVNLDSYTREHTKDNLQSVTRGCFDLAQKRIFGLMEKDSYPRFLRSDLYLDLINQKKMSPPL

SEQ ID NO: 61275 - protein, 1198 aa, Homo sapiens; identical to SEQ ID NO: 61273

SEQ ID NO: 61276 - protein, 591 aa, Homo sapiens
MNRFNGLCKVCSERRYRQITIPRGKDGFGFTICCDSPVRVQAVDSGGPAERAGLQQLDTVLQLNERPVEHWKCVELAHEIRSCPSEIILLVWRMVPQVKPGPDGGVLRRASCKSTHDLQSPPNKREKNCTHGVQARPEQRHSCHLVCDSSDGLLLGGWERYTEVAKRGGQHTLPALSRATAPTDPNYIILAPLNPGSQLLRPVYQEDTIPEESGSPSKGKSYTGLGKKSRLMKTVQTMKGHGNYQNCPVVRPHATHSSYGTYVTLAPKVLVFPVFVQPLDLCNPARTLLLSEELLLYEGRNKAAEVTLFAYSDLLLFTKEDEPGRCDVLRNPLYLQSVKLQEGSSEDLKFCVLYLAEKAECLFTLEAHSQEQKKRVCWCLSENIAKQQQLAASPPDSKMSGADTVGDDDEASRKRKSKNLAKDMKNKLGIFRRRNESPGAPPAGKADKMMKSFKPTSEEALKWGESLEKLLVHKYGLAVFQAFLRTEFSEENLEFWLACEDFKKVKSQSKMASKAKKIFAEYIAIQACKEVNLDSYTREHTKDNLQSVTRGCFDLAQKRIFGLMEKDSYPRFLRSDLYLDLINQKKMSPPL

SEQ ID NO: 61277 - protein, 519 aa, Homo sapiens; identical to SEQ ID NO: 61274

SEQ ID NO: 61278 - protein, 311 aa, Homo sapiens
MVTRRPVTNSWDWLPAGAAPEAVPCRHMPLSRLPLRVGQKEFFFPLPLLVPPISWLLLSESQPRLVPGSPVIRPGFQRACVAAACTVAARCPGRGVGDRSQSGASYRPICGPKVGGPTEMLRGMYLTRNGNLQRRHTMKEAKDMKNKLGIFRRRNESPGAPPAGKADKMMKSFKPTSEEALKWGESLEKLLVHKYGLAVFQAFLRTEFSEENLEFWLACEDFKKVKSQSKMASKAKKIFAEYIAIQACKEVNLDSYTREHTKDNLQSVTRGCFDLAQKRIFGLMEKDSYPRFLRSDLYLDLINQKKMSPPL

SEQ ID NO: 61279 - protein, 187 aa, Homo sapiens
MKHRLGFLLQKSDSCEHNSSHNKKDKVVICQRVSQEEVKKWAESLENLISHECGLAAFKAFLKSEYSEENIDFWISCEEYKKIKSPSKLSPKAKKIYNEFISVQATKEVNLDSCTREETSRNMLEPTITCFDEAQKKIFNLMEKDSYRRFLKSRFYLDLVNPSSCGAEKQKGAKSSADCASLVPQCA

SEQ ID NO: 61280 - protein, 93 aa, Homo sapiens
MCKGLAGLPASCLRSAKDMKHRLGFLLQKSDSCEHNSSHNKKDKVVICQRVSQEEVKKWAESLENLISHECEPGFLHQGRDKPEHARAYNNLL

SEQ ID NO: 61281 - protein, 205 aa, Homo sapiens
MCKGLAGLPASCLRSAKDMKHRLGFLLQKSDSCEHNSSHNKKDKVVICQRVSQEEVKKWAESLENLISHECGLAAFKAFLKSEYSEENIDFWISCEEYKKIKSPSKLSPKAKKIYNEFISVQATKEVNLDSCTREETSRNMLEPTITCFDEAQKKIFNLMEKDSYRRFLKSRFYLDLVNPSSCGAEKQKGAKSSADCASLVPQCA

SEQ ID NO: 61282 - protein, 302 aa, Homo sapiens
MYNMMLLIQKRKGIGSQLLRAGEAEGDRGAGTAERSSDWLDGRSWAIKETPTGLAGRRSEDSDNIFTGEEAKYAQSRSHSSSCRISFLLANSKLLNKMCKGLAGLPASCLRSAKDMKHRLGFLLQKSDSCEHNSSHNKKDKVVICQRVSQEEVKKWAESLENLISHECGLAAFKAFLKSEYSEENIDFWISCEEYKKIKSPSKLSPKAKKIYNEFISVQATKEVNLDSCTREETSRNMLEPTITCFDEAQKKIFNLMEKDSYRRFLKSRFYLDLVNPSSCGAEKQKGAKSSADCASLVPQCA

SEQ ID NO: 61283 - protein, 187 aa, Homo sapiens; identical to SEQ ID NO: 61279

SEQ ID NO: 61284 - protein, 143 aa, Homo sapiens
MKHRLGFLLQKSDSCEHNSSHNKKDKVVICQRVSQEEVKKWAESLENLISHECGLAAFKAFLKSEYSEENIDFWISCEEYKKIKSPSKLSPKAKKIYNEFISVQATKEVNLDSCTREETSRNMLEPTITCFDEAQKKIFNLME

SEQ ID NO: 61285 - protein, 181 aa, Homo sapiens
MCKGLAALPHSCLERAKEIKIKLGILLQKPDSVGDLVIPYNEKPEKPAKTQKTSLDEALQWRDSLDKLLQNNYGLASFKSFLKSEFSEENLEFWIACEDYKKIKSPAKMAEKAKQIYEEFIQTEAPKEVNIDHFTKDITMKNLVEPSLSSFDMAQKRIHALMEKDSLPRFVRSEFYQELIK

SEQ ID NO: 61286 - protein, 201 aa, Homo sapiens
MCARNISQDILILQMHSAHWHINGKYEEKSNLMFWAKEIKIKLGILLQKPDSVGDLVIPYNEKPEKPAKTQKTSLDEALQWRDSLDKLLQNNYGLASFKSFLKSEFSEENLEFWIACEDYKKIKSPAKMAEKAKQIYEEFIQTEAPKEVNIDHFTKDITMKNLVEPSLSSFDMAQKRIHALMEKDSLPRFVRSEFYQELIK

SEQ ID NO: 61287 - protein, 73 aa, Homo sapiens
MAEKAKQIYEEFIQTEAPKEVNIDHFTKDITMKNLVEPSLSSFDMAQKRIHALMEKDSLPRFVRSEFYQELIK

SEQ ID NO: 61288 - protein, 453 aa, Homo sapiens
MAQGSGDQRAVGVADPEESSPNMIVYCKIEDIITKMQDDKTGGVPIRTVKSFLSKIPSVVTGTDIVQWLMKNLSIEDPVEAIHLGSLIAAQGYIFPISDHVLTMKDDGTFYRFQAPYFWPSNCWEPENTDYAIYLCKRTMQNKARLELADYEAENLARLQRAFARKWEFIFMQAEAQVKIDRKKDKTERKILDSQERAFWDVHRPVPGCVNTTEMDIRKCRRLKNPQKVKKSVYGVTEESQAQSPVHVLSQPIRKTTKEDIRKQITFLNAQIDRHCLKMSKVAESKEPSQQRVKRWGFSFDEILKDQVGRDQFLRFLESEFSSENLRFWLAVQDLKKQPLQDVAKRVEEIWQEFLAPGAPSAINLDSHSYEITSQNVKDGGRYTFEDAQEHIYKLMKSDSYARFLRSNAYQDLLLAKKKPESEQGRRTSLEKFTRSVGKSLAGKRLTGLMQSS

SEQ ID NO: 61289 - protein, 460 aa, Homo sapiens
MAQGSGDQRAVGVADPEESSPNMIVYCKIEDIITKMQDDKTGGVPIRTVKSFLSKIPSVVTGTDIVQWLMKNLSIEDPVEAIHLGSLIAAQGYIFPISDHVLTMKDDGTFYRFQAPYFWPSNCWEPENTDYAIYLCKRTMQNKARLELADYEAENLARLQRAFARKWEFIFMQAEAQVKIDRKKDKTERKILDSQERAFWDVHRPVPGCVNTTEMDIRKCRRLKNPQKVKKSVYGVTEESQAQSPVHVLSQPIRKTTKEDIRKQITFLNAQIDRHCLKMSKVAESLIAYTEQYVEYDPLITPAEPSNPWISDDVALWDIEMSKEPSQQRVKRWGFSFDEILKDQVGRDQFLRFLESEFSSENLRFWLAVQDLKKQPLQDVAKRVEEIWQEFLAPGAPSAINLDSHSYEITSQNVKDGGRYTFEDAQEHIYKLMKSDSYARFLRSNAYQDLLLAKKKVWLL

SEQ ID NO: 61290 - protein, 472 aa, Homo sapiens
MAQGSGDQRAVGVADPEESSPNMIVYCKIEDIITKMQDDKTGGVPIRTVKSFLSKIPSVVTGTDIVQWLMKNLSIEDPVEAIHLGSLIAAQGYIFPISDHVLTMKDDGTFYRFQAPYFWPSNCWEPENTDYAIYLCKRTMQNKARLELADYEAENLARLQRAFARKWEFIFMQAEAQVKIDRKKDKTERKILDSQERAFWDVHRPVPGCVNTTEMDIRKCRRLKNPQKVKKSVYGVTEESQAQSPVHVLSQPIRKTTKEDIRKQITFLNAQIDRHCLKMSKVAESLIAYTEQYVEYDPLITPAEPSNPWISDDVALWDIEMSKEPSQQRVKRWGFSFDEILKDQVGRDQFLRFLESEFSSENLRFWLAVQDLKKQPLQDVAKRVEEIWQEFLAPGAPSAINLDSHSYEITSQNVKDGGRYTFEDAQEHIYKLMKSDSYARFLRSNAYQDLLLAKKKGKSLAGKRLTGLMQSS

SEQ ID NO: 61291 - protein, 480 aa, Homo sapiens
MAQGSGDQRAVGVADPEESSPNMIVYCKIEDIITKMQDDKTGGVPIRTVKSFLSKIPSVVTGTDIVQWLMKNLSIEDPVEAIHLGSLIAAQGYIFPISDHVLTMKDDGTFYRFQAPYFWPSNCWEPENTDYAIYLCKRTMQNKARLELADYEAENLARLQRAFARKWEFIFMQAEAQVKIDRKKDKTERKILDSQERAFWDVHRPVPGCVNTTEMDIRKCRRLKNPQKVKKSVYGVTEESQAQSPVHVLSQPIRKTTKEDIRKQITFLNAQIDRHCLKMSKVAESLIAYTEQYVEYDPLITPAEPSNPWISDDVALWDIEMSKEPSQQRVKRWGFSFDEILKDQVGRDQFLRFLESEFSSENLRFWLAVQDLKKQPLQDVAKRVEEIWQEFLAPGAPSAINLDSHSYEITSQNVKDGGRYTFEDAQEHIYKLMKSDSYARFLRSNAYQDLLLAKKKPESEQGRRTSLEKFTRSVCLQLLF

SEQ ID NO: 61292 - protein, 475 aa, Homo sapiens
MAQGSGDQRAVGVADPEESSPNMIVYCKIEDIITKMQDDKTGGVPIRTVKSFLSKIPSVVTGTDIVQWLMKNLSIEDPVEAIHLGSLIAAQGYIFPISDHVLTMKDDGTFYRFQAPYFWPSNCWEPENTDYAIYLCKRTMQNKARLELADYEAENLARLQRAFARKWEFIFMQAEAQVKIDRKKDKTERKILDSQERAFWDVHRPVPGCVNTTEMDIRKCRRLKNPQKVKKSVYGVTEESQAQSPVHVLSQPIRKTTKEDIRKQITFLNAQIDRHCLKMSKVAESLIAYTEQYVEYDPLITPAEPSNPWISDDVALWDIEMSKEPSQQRVKRWGFSFDEILKDQVGRDQFLRFLESEFSSENLRFWLAVQDLKKQPLQDVAKRVEEIWQEFLAPGAPSAINLDSHSYEITSQNVKDGGRYTFEDAQEHIYKLMKSDSYARFLRSNAYQDLLLAKKKPESEQGRRTSLEKFTRSVG

SEQ ID NO: 61293 - protein, 477 aa, Homo sapiens
MAQGSGDQRAVGVADPEESSPNMIVYCKIEDIITKMQDDKTGGVPIRTVKSFLSKIPSVVTGTDIVQWLMKNLSIEDPVEAIHLGSLIAAQGYIFPISDHVLTMKDDGTFYRFQAPYFWPSNCWEPENTDYAIYLCKRTMQNKARLELADYEAENLARLQRAFARKWEFIFMQAEAQVKIDRKKDKTERKILDSQERAFWDVHRPVPGCVNTTEMDIRKCRRLKNPQKVKKSVYGVTEESQAQSPVHVLSQPIRKTTKEDIRKQITFLNAQIDRHCLKMSKVAESLIAYTEQYVEYDPLITPAEPSNPWISDDVALWDIEMSKEPSQQRVKRWGFSFDEILKDQVGRDQFLRFLESEFSSENLRFWLAVQDLKKQPLQDVAKRVEEIWQEFLAPGAPSAINLDSHSYEITSQNVKDGGRYTFEDAQEHIYKLMKSDSYARFLRSNAYQDLLLAKKKPESEQGRRTSLEKFTRSVLLF

SEQ ID NO: 61294 - protein, 539 aa, Homo sapiens
MKNLSIEDPVEAIHLGSLIAAQGYIFPISDHVLTMKDDGTFYRFQAPYFWPSNCWEPENTDYAIYLCKRTMQNKARLELADYEAENLARLQRAFARKWEFIFMQAEAQVKIDRKKDKTERKILDSQERAFWDVHRPVPGCVNTTEMDIRKCRRLKNPQKVKKSVYGVTEESQAQSPVHVLSQPIRKTTKEDIRKQITFLNAQIDRHCLKMSKVAESLIAYTEQYVEYDPLITPAEPSNPWISDDVALWDIEMSKEPSQQRVKRWGFSFDEILKDQVGRDQFLRFLESEFSSENLRFWLAVQDLKKQPLQDVAKRVEEIWQEFLAPGAPSAINLDSHSYEITSQNVKDGGRYTFEDAQEHIYKLMKSDSYARFLRSNAYQDLLLAKKKPESEQGRRTSLEKFTRSVNVQNTRPAGAWSIFMAALPMAVWLRTPRSCHGLSESRLLGLPSLHDGLREGQSLPQSCPGSSSTAAEGARERASNGRSLARRQHCQCHGQGEETQLCLWSRLESSKRSQRASSLRTSKAKKKRQTVKQGPKAWP

SEQ ID NO: 61295 - protein, 432 aa, Homo sapiens
IEDIITKMQDDKTGGVPIRTVKSFLSKIPSVVTGTDIVQWLMKNLSIEDPVEAIHLGSLIAAQGYIFPISDHVLTMKDDGTFYRFQAPYFWPSNCWEPENTDYAIYLCKRTMQNKARLELADYEAENLARLQRAFARKWEFIFMQAEAQVKIDRKKDKTERKILDSQERAFWDVHRPVPGCVNTTEMDIRKCRRLKNPQKVKKSVYGVTEESQAQSPVHVLSQPIRKTTKEDIRKQITFLNAQIDRHCLKMSKVAESLIAYTEQYVEYDPLITPAEPSNPWISDDVALWDIEMSKEPSQQRVKRWGFSFDEILKDQVGRDQFLRFLESEFSSENLRFWLAVQDLKKQPLQDVAKRVEEIWQEFLAPGAPSAINLDSHSYEITSQNVKDGGRYTFEDAQEHIYKLMKSDSYARFLRSNAYQDLLLAKKKVWLL

SEQ ID NO: 61296 - protein, 346 aa, Homo sapiens
MQNKARLELADYEAENLARLQRAFARKWEFIFMQAEAQVKIDRKKDKTERKILDSQERAFWDVHRPVPGCVNTTEMDIRKCRRLKNPQKVKKSVYGVTEESQAQSPVHVLSQPIRKTTKEDIRKQITFLNAQIDRHCLKMSKVAESLIAYTEQYVEYDPLITPAEPSNPWISDDVALWDIEMSKEPSQQRVKRWGFSFDEILKDQVGRDQFLRFLESEFSSENLRFWLAVQDLKKQPLQDVAKRVEEIWQEFLAPGAPSAINLDSHSYEITSQNVKDGGRYTFEDAQEHIYKLMKSDSYARFLRSNAYQDLLLAKKKPESEQGRRTSLEKFTRSVLWLLFPLGKRP

SEQ ID NO: 61297 - protein, 490 aa, Homo sapiens
MAQGSGDQRAVGVADPEESSPNMIVYCKIEDIITKMQDDKTGGVPIRTVKSFLSKIPSVVTGTDIVQWLMKNLSIEDPVEAIHLGSLIAAQGYIFPISDHVLTMKDDGTFYRFQAPYFWPSNCWEPENTDYAIYLCKRTMQNKARLELADYEAENLARLQRAFARKWEFIFMQAEAQVKIDRKKDKTERKILDSQERAFWDVHRPVPGCVNTTEMDIRKCRRLKNPQKVKKSVYGVTEESQAQSPVHVLSQPIRKTTKEDIRKQITFLNAQIDRHCLKMSKVAESLIAYTEQYVEYDPLITPAEPSNPWISDDVALWDIEMSKEPSQQRVKRWGFSFDEILKDQVGRDQFLRFLESEFSSENLRFWLAVQDLKKQPLQDVAKRVEEIWQEFLAPGAPSAINLDSHSYEITSQNVKDGGRYTFEDAQEHIYKLMKSDSYARFLRSNAYQDLLLAKKKPESEQGRRTSLEKFTRSVGKSLAGKRLTGLMQSS

SEQ ID NO: 61298 - protein, 472 aa, Homo sapiens; identical to SEQ ID NO: 61290

SEQ ID NO: 61299 - protein, 346 aa, Homo sapiens
MQNKARLELADYEAENLARLQRAFARKWEFIFMQAEAQVKIDRKKDKTERKILDSQERAFWDVHRPVPGCVNTTEMDIRKCRRLKNPQKVKKSVYGVTEESQAQSPVHVLSQPIRKTTKEDIRKQITFLNAQIDRHCLKMSKVAESLIAYTEQYVEYDPLITPAEPSNPWISDDVALWDIEMSKEPSQQRVKRWGFSFDEILKDQVGRDQFLRFLESEFSSENLRFWLAVQDLKKQPLQDVAKRVEEIWQEFLAPGAPSAINLDSHSYEITSQNVKDGGRYTFEDAQEHIYKLMKSDSYARFLRSNAYQDLLLAKKKPESEQGRRTSLEKFTRSVLYSNTPLAKRP

SEQ ID NO: 61300 - protein, 472 aa, Homo sapiens; identical to SEQ ID NO: 61290

SEQ ID NO: 61301 - protein, 490 aa, Homo sapiens; identical to SEQ ID NO: 61297

SEQ ID NO: 61302 - protein, 465 aa, Homo sapiens
MAQGSGDQRAVGVADPEESSPNMIVYCKIEDIITKMQDDKTGGVPIRTVKSFLSKIPSVVTGTDIVQWLMKNLSIEDPVEAIHLGSLIAAQGYIFPISDHVLTMKDDGTFYRFQAPYFWPSNCWEPENTDYAIYLCKRTMQNKARLELADYEAENLARLQRAFARKWEFIFMQAEAQVKIDRKKDKTERKILDSQERAFWDVHRPVPGCVNTTEMDIRKCRRLKNPQKVKKSVYGVTEESQAQSPVHVLSQPIRKTTKEDIRKQITFLNAQIDRHCLKMSKVAESLIAYTEQYVEYDPLITPAEPSNPWISDDVALWDIEMSKEPSQQRVKRWGFSFDEILKDQVGRDQFLRFLESEFSSENLRFWLAVQDLKKQPLQDVAKRVEEIWQEFLAPGAPSAINLDSHSYEITSQNVKDGGRYTFEDAQEHIYKLMKSDSYARFLRSNAYQDLLLAKKKKVSKVVELP

SEQ ID NO: 61303 - protein, 451 aa, Homo sapiens
MEDVIARMQDEKNGIPIRTVKSFLSKIPSVFSGSDIVQWLIKNLTIEDPVEALHLGTLMAAHGYFFPISDHVLTLKDDGTFYRFQTPYFWPSNCWEPENTDYAVYLCKRTMQNKARLELADYEAESLARLQRAFARKWEFIFMQAEAQAKVDKKRDKIERKILDSQERAFWDVHRPVPGCVNTTEVDIKKSSRMRNPHKTRKSVYGLQNDIRSHSPTHTPTPETKPPTEDELQQQIKYWQIQLDRHRLKMSKVADSLLSYTEQYLEYDPFLLPPDPSNPWLSDDTTFWELEASKEPSQQRVKRWGFGMDEALKDPVGREQFLKFLESEFSSENLRFWLAVEDLKKRPIKEVPSRVQEIWQEFLAPGAPSAINLDSKSYDKTTQNVKEPGRYTFEDAQEHIYKLMKSDSYPRFIRSSAYQELLQAKKKGRNIPIFPCHKNCTPTLRASTNLL

SEQ ID NO: 61304 - protein, 424 aa, Homo sapiens
MAQGNNYGQTSNGVADESPNMLVYRKMEDVIARMQDEKNGIPIRTVKSFLSKIPSVFSGSDIVQWLIKNLTIEDPAVYLCKRTMQNKARLELADYEAESLARLQRAFARKWEFIFMQAEAQAKVDKKRDKIERKILDSQERAFWDVHRPVPGCVNTTEVDIKKSSRMRNPHKTRKSVYGLQNDIRSHSPTHTPTPETKPPTEDELQQQIKYWQIQLDRHRLKMSKVADSLLSYTEQYLEYDPFLLPPDPSNPWLSDDTTFWELEASKEPSQQRVKRWGFGMDEALKDPVGREQFLKFLESEFSSENLRFWLAVEDLKKRPIKEVPSRVQEIWQEFLAPGAPSAINLDSKSYDKTTQNVKEPGRYTFEDAQEHIYKLMKSDSYPRFIRSSAYQELLQAKKKGRNIPIFPCHKNCTPTLRASTNLL

SEQ ID NO: 61305 - protein, 469 aa, Homo sapiens
MAQGNNYGQTSNGVADESPNMLVYRKMEDVIARMQDEKNGIPIRTVKSFLSKIPSVFSGSDIVQWLIKNLTIEDPVEALHLGTLMAAHGYFFPISDHVLTLKDDGTFYRFQTPYFWPSNCWEPENTDYAVYLCKRTMQNKARLELADYEAESLARLQRAFARKWEFIFMQAEAQAKVDKKRDKIERKILDSQERAFWDVHRPVPGCVNTTEVDIKKSSRMRNPHKTRKSVYGLQNDIRSHSPTHTPTPETKPPTEDELQQQIKYWQIQLDRHRLKMSKVADSLLSYTEQYLEYDPFLLPPDPSNPWLSDDTTFWELEASKEPSQQRVKRWGFGMDEALKDPVGREQFLKFLESEFSSENLRFWLAVEDLKKRPIKEVPSRVQEIWQEFLAPGAPSAINLDSKSYDKTTQNVKEPGRYTFEDAQEHIYKLMKSDSYPRFIRSSAYQELLQAKKKGKSLTSKRLTSLAQSY

SEQ ID NO: 61306 - protein, 477 aa, Homo sapiens
MAQGNNYGQTSNGVADESPNMLVYRKMEDVIARMQDEKNGIPIRTVKSFLSKIPSVFSGSDIVQWLIKNLTIEDPVEALHLGTLMAAHGYFFPISDHVLTLKDDGTFYRFQTPYFWPSNCWEPENTDYAVYLCKRTMQNKARLELADYEAESLARLQRAFARKWEFIFMQAEAQAKVDKKRDKIERKILDSQERAFWDVHRPVPGCVNTTEVDIKKSSRMRNPHKTRKSVYGLQNDIRSHSPTHTPTPETKPPTEDELQQQIKYWQIQLDRHRLKMSKVADSLLSYTEQYLEYDPFLLPPDPSNPWLSDDTTFWELEASKEPSQQRVKRWGFGMDEALKDPVGREQFLKFLESEFSSENLRFWLAVEDLKKRPIKEVPSRVQEIWQEFLAPGAPSAINLDSKSYDKTTQNVKEPGRYTFEDAQEHIYKLMKSDSYPRFIRSSAYQELLQAKKKGRNIPIFPCHKNCTPTLRASTNLL

SEQ ID NO: 61307 - protein, 469 aa, Homo sapiens; identical to SEQ ID NO: 61305

SEQ ID NO: 61308 - protein, 487 aa, Homo sapiens
MAQGNNYGQTSNGVADESPNMLVYRKMEDVIARMQDEKNGIPIRTVKSFLSKIPSVFSGSDIVQWLIKNLTIEDPVEALHLGTLMAAHGYFFPISDHVLTLKDDGTFYRFQTPYFWPSNCWEPENTDYAVYLCKRTMQNKARLELADYEAESLARLQRAFARKWEFIFMQAEAQAKVDKKRDKIERKILDSQERAFWDVHRPVPGCVNTTEVDIKKSSRMRNPHKTRKSVYGLQNDIRSHSPTHTPTPETKPPTEDELQQQIKYWQIQLDRHRLKMSKVADSLLSYTEQYLEYDPFLLPPDPSNPWLSDDTTFWELEASKEPSQQRVKRWGFGMDEALKDPVGREQFLKFLESEFSSENLRFWLAVEDLKKRPIKEVPSRVQEIWQEFLAPGAPSAINLDSKSYDKTTQNVKEPGRYTFEDAQEHIYKLMKSDSYPRFIRSSAYQELLQAKKKSGNSMDRRTSFEKFAQNVGKSLTSKRLTSLAQSY

SEQ ID NO: 61309 - protein, 424 aa, Homo sapiens; identical to SEQ ID NO: 61304

SEQ ID NO: 61310 - protein, 495 aa, Homo sapiens
MAQGNNYGQTSNGVADESPNMLVYRKMEDVIARMQDEKNGIPIRTVKSFLSKIPSVFSGSDIVQWLIKNLTIEDPVEALHLGTLMAAHGYFFPISDHVLTLKDDGTFYRFQTPYFWPSNCWEPENTDYAVYLCKRTMQNKARLELADYEAESLARLQRAFARKWEFIFMQAEAQAKVDKKRDKIERKILDSQERAFWDVHRPVPGCVNTTEVDIKKSSRMRNPHKTRKSVYGLQNDIRSHSPTHTPTPETKPPTEDELQQQIKYWQIQLDRHRLKMSKVADSLLSYTEQYLEYDPFLLPPDPSNPWLSDDTTFWELEASKEPSQQRVKRWGFGMDEALKDPVGREQFLKFLESEFSSENLRFWLAVEDLKKRPIKEVPSRVQEIWQEFLAPGAPSAINLDSKSYDKTTQNVKEPGRYTFEDAQEHIYKLMKSDSYPRFIRSSAYQELLQAKKKSGNSMDRRTSFEKFAQNVGRNIPIFPCHKNCTPTLRASTNLL

SEQ ID NO: 61311 - protein, 326 aa, Homo sapiens
QAEAQAKVDKKRDKIERKILDSQERAFWDVHRPVPGCVNTTEVDIKKSSRMRNPHKTRKSVYGLQNDIRSHSPTHTPTPETKPPTEDELQQQIKYWQIQLDRHRLKMSKVADSLLSYTEQYLEYDPFLLPPDPSNPWLSDDTTFWELEASKEPSQQRVKRWGFGMDEALKDPVGREQFLKFLESEFSSENLRFWLAVEDLKKRPIKEVPSRVQEIWQEFLAPGAPSAINLDSKSYDKTTQNVKEPGRYTFEDAQEHIYKLMKSDSYPRFIRSSAYQELLQAKKKSGNSMDRRTSFEKFAQNVGRNIPIFPCHKNCTPTLRASTNLL

SEQ ID NO: 61312 - protein, 393 aa, Homo sapiens
MAAHGYFFPISDHVLTLKDDGTFYRFQTPYFWPSNCWEPENTDYAVYLCKRTMQNKARLELADYEAESLARLQRAFARKWEFIFMQAEAQAKVDKKRDKIERKILDSQERAFWDVHRPVPGCVNTTEVDIKKSSRMRNPHKTRKSVYGLQNDIRSHSPTHTPTPETKPPTEDELQQQIKYWQIQLDRHRLKMSKVADSLLSYTEQYLEYDPFLLPPDPSNPWLSDDTTFWELEASKEPSQQRVKRWGFGMDEALKDPVGREQFLKFLESEFSSENLRFWLAVEDLKKRPIKEVPSRVQEIWQEFLAPGAPSAINLDSKSYDKTTQNVKEPGRYTFEDAQEHIYKLMKSDSYPRFIRSSAYQELLQAKKKGRNIPIFPCHKNCTPTLRASTNLL

SEQ ID NO: 61313 - protein, 257 aa, Homo sapiens
MSSAPNGRKKRPSRSTRSSIFQISKPPLQSGDWERRGSGSESAHKTQRALDDCKMLVQEFNTQVALYRELVISIGDVSVSCPSLRAEMHKTRTKGCEMARQAHQKLAAISGPEDGEIHPEICRLYIQLQCCLEMYTTEMLKSICLLGSLQFHRKGKEPGGGTKSLDCKIEESAETPALEDSSSSPVDSQQHSWQVSTDIENTERDMREMKNLLSKLRETMPLPLKNQDDSSLLNLTPYPLVRRRKRRFFGLCCLISS

SEQ ID NO: 61314 - protein, 674 aa, Homo sapiens
MTIRHQGQQYRPRMAFLQKIEALVKDMQNPETGVRMQNQRVLVTSVPHAMTGSDVLQWIVQRLWISSLEAQNLGNFIVRYGYIYPLQDPKNLILKPDGSLYRFQTPYFWPTQQWPAEDTDYAIYLAKRNIKKKGILEEYEKENYNFLNQKMNYKWDFVIMQAKEQYRAGKERNKADRYALDCQEKAYWLVHRCPPGMDNVLDYGLDRVTNPNEVKVNQKQTVVAVKKEIMYYQQALMRSTVKSSVSLGGIVKYSEQFSSNDAIMSGCLPSNPWITDDTQFWDLNAKLVEIPTKMRVERWAFNFSELIRDPKGRQSFQYFLKKEFSGENLGFWEACEDLKYGDQSKVKEKAEEIYKLFLAPGARRWINIDGKTMDITVKGLKHPHRYVLDAAQTHIYMLMKKDSYARYLKSPIYKDMLAKAIEPQETTKKSSTLPFMRRHLRSSPSPVILRQLEEEAKAREAANTVDITQPGQHMAPSPHLTVYTGTCMPPSPSSPFSSSCRSPRKPFASPSRFIRRPSTTICPSPIRVALESSSGLEQKGECSGSMAPRGPSVTESSEASLDTSWPRSRPRAPPKARMALSFSRFLRRGCLASPVFARLSPKCPAVSHGRVQPLGDVGQQLPRLKSKRVANFFQIKMDVPTGSGTCLMDSEDAGTGESGDRATEKEVICPWESL

SEQ ID NO: 61315 - protein, 671 aa, Homo sapiens
MTIRHQGQQYRPRMAFLQKIEALVKDMQNPETGVRMQNQRVLVTSVPHAMTGSDVLQWIVQRLWISSLEAQNLGNFIVRYGYIYPLQDPKNLILKPDGSLYRFQTPYFWPTQQWPAEDTDYAIYLAKRNIKKKGILEEYEKENYNFLNQKMNYKWDFVIMQAKEQYRAGKERNKADRYALDCQEKAYWLVHRCPPGMDNVLDYGLDRVTNPNEVKKQTVVAVKKEIMYYQQALMRSTVKSSVSLGGIVKYSEQFSSNDAIMSGCLPSNPWITDDTQFWDLNAKLVEIPTKMRVERWAFNFSELIRDPKGRQSFQYFLKKEFSGENLGFWEACEDLKYGDQSKVKEKAEEIYKLFLAPGARRWINIDGKTMDITVKGLKHPHRYVLDAAQTHIYMLMKKDSYARYLKSPIYKDMLAKAIEPQETTKKSSTLPFMRRHLRSSPSPVILRQLEEEAKAREAANTVDITQPGQHMAPSPHLTVYTGTCMPPSPSSPFSSSCRSPRKPFASPSRFIRRPSTTICPSPIRVALESSSGLEQKGECSGSMAPRGPSVTESSEASLDTSWPRSRPRAPPKARMALSFSRFLRRGCLASPVFARLSPKCPAVSHGRVQPLGDVGQQLPRLKSKRVANFFQIKMDVPTGSGTCLMDSEDAGTGESGDRATEKEVICPWESL

SEQ ID NO: 61316 - protein, 1335 aa, Homo sapiens
MESEMLQSPLLGLGEEDEADLTDWNLPLAFMKKRHCEKIEGSKSLAQSWRMKDRMKTVSVALVLCLNVGVDPPDVVKTTPCARLECWIDPLSMGPQKALETIGANLQKQYENWQPRARYKQSLDPTVDEVKKLCTSLRRNAKEERVLFHYNGHGVPRPTVNGEVWVFNKNYTQYIPLSIYDLQTWMGSPSIFVYDCSNAGLIVKSFKQFALQREQELEVAAINPNHPLAQMPLPPSMKNCIQLAACEATELLPMIPDLPADLFTSCLTTPIKIALRWFCMQKCVSLVPGVTLDLIEKIPGRLNDRRTPLGELNWIFTAITDTIAWNVLPRDLFQKLFRQDLLVASLFRNFLLAERIMRSYNCTPVSSPRLPPTYMHAMWQAWDLAVDICLSQLPTIIEEGTAFRHSPFFAEQLTAFQVWLTMGVENRNPPEQLPIVLQVLLSQVHRLRALDLLGRFLDLGPWAVSLALSVGIFPYVLKLLQSSARELRPLLVFIWAKILAVDSSCQADLVKDNGHKYFLSVLADPYMPAEHRTMTAFILAVIVNSYHTGQEACLQGNLIAICLEQLNDPHPLLRQWVAICLGRIWQNFDSARWCGVRDSAHEKLYSLLSDPIPEVRCAAVFALGTFVGNSAERTDHSTTIDHNVAMMLAQLVSDGSPMVRKELVVALSHLVVQYESNFCTVALQFIEEEKNYALPSPATTEGGSLTPVRDSPCTPRLRSVSSYGNIRAVATARSLNKSLQNLSLTEESGGAVAFSPGNLSTSSSASSTLGSPENEEHILSFETIDKMRRASSYSSLNSLIGVSFNSVYTQIWRVLLHLAADPYPEVSDVAMKVLNSIAYKATVNARPQRVLDTSSLTQSAPASPTNKGVHIHQAGGSPPASSTSSSSLTNDVAKQPVSRDLPSGRPGTTGPAGAQYTPHSHQFPRTRKMFDKGPEQTADDADDAAGHKSFISATVQTGFCDWSARYFAQPVMKIPEEHDLESQIRKEREWRFLRNSRVRRQAQQVIQKGITRLDDQIFLNRNPGVPSVVKFHPFTPCIAVADKDSICFWDWEKGEKLDYFHNGNPRYTRVTAMEYLNGQDCSLLLTATDDGAIRVWKNFADLEKNPEMVTAWQGLSDMLPTTRGAGMVVDWEQETGLLMSSGDVRIVRIWDTDREMKVQDIPTGADSCVTSLSCDSHRSLIVAGLGDGSIRVYDRRMALSECRVMTYREHTAWVVKASLQKRPDGHIVSVSVNGDVRIFDPRMPESVNVLQIVKGLTALDIHPQADLIACGSVNQFTAIYNSSGELINNIKYYDGFMGQRVGAISCLAFHPHWPHLAVGSNDYYISVYSVEKRVR

SEQ ID NO: 61317 - protein, 329 aa, Homo sapiens
MGSPSIFVYDCSNAGLIVKSFKQFALQREQELEVAAINPNHPLAQMPLPPSMKNCIQLAACEATELLPMIPDLPADLFTSCLTTPIKIALRWFCMQKCVSLVPGVTLDLIEKIPGRLNDRRTPLGELNWIFTAITDTIAWNVLPRDLFQKLFRQDLLVASLFRNFLLAERIMRSYNCTPVSSPRLPPTYMHAMWQAWDLAVDICLSQLPTIIEEGTAFRHSPFFAEQLTAFQVWLTMGVENRNPPEQLPIVLQVLLSQVHRLRALDLLGRFLDLGPWAVSLALSVGIFPYVLKLLQSSARELRPLLVFIWAKILAVDSVSIPALLPRVM

SEQ ID NO: 61318 - protein, 1177 aa, Homo sapiens
MESEMLQSPLLGLGEEDEADLTDWNLPLAFMKKRHCEKIEGSKSLAQSWRMKDRMKTVSVALVLCLNVGVDPPDVVKTTPCARLECWIDPLSMGPQKALETIGANLQKQYENWQPRARYKQSLDPTVDEVKKLCTSLRRNAKEERVLFHYNGHGVPRPTVNGEVWVFNKNYTQYIPLSIYDLQTWMGSPSIFVYDCSNAGLIVKSFKQFALQREQELEVAAINPNHPLAQMPLPPSMKNCIQLAACEATELLPMIPDLPADLFTSCLTTPIKIALRWFCMQKCVSLVPGVTLDLIEKIPGRLNDRRTPLGELNWIFTAITDTIAWNVLPRDLFQKLFRQDLLVASLFRNFLLAERIMRSYNCTPVSSPRLPPTYMHAMWQAWDLAVDICLSQLPTIIEEGTAFRHSPFFAEQLTAFQVWLTMGVENRNPPEQLPIVLQVLLSQVHRLRALDLLGRFLDLGPWAVSLALSVGIFPYVLKLLQSSARELRPLLVFIWAKILAVDSELVVALSHLVVQYESNFCTVALQFIEEEKNYALPSPATTEGGSLTPVRDSPCTPRLRSVSSYGNIRAVATARSLNKSLQNLSLTEESGGAVAFSPGNLSTSSSASSTLGSPENEEHILSFETIDKMRRASSYSSLNSLIGVSFNSVYTQIWRVLLHLAADPYPEVSDVAMKVLNSIAYKATVNARPQRVLDTSSLTQSAPASPTNKGVHIHQAGGSPPASSTSSSSLTNDVAKQPVSRDLPSGRPGTTGPAGAQYTPHSHQFPRTRKMFDKGPEQTADDADDAAGHKSFISATVQTGFCDWSARYFAQPVMKIPEEHDLESQIRKEREWRFLRNSRVRRQAQQVIQKGITRLDDQIFLNRNPGVPSVVKFHPFTPCIAVADKDSICFWDWEKGEKLDYFHNGNPRYTRVTAMEYLNGQDCSLLLTATDDGAIRVWKNFADLEKNPEMVTAWQGLSDMLPTTRGAGMVVDWEQETGLLMSSGDVRIVRIWDTDREMKVQDIPTGADSCVTSLSCDSHRSLIVAGLGDGSIRVYDRRMALSECRVMTYREHTAWVVKASLQKRPDGHIVSVSVNGDVRIFDPRMPESVNVLQIVKGLTALDIHPQADLIACGSVNQFTAIYNSSGELINNIKYYDGFMGQRVGAISCLAFHPHWPHLAVGSNDYYISVYSVEKRVR

SEQ ID NO: 61319 - protein, 698 aa, Homo sapiens
MQNSEGGADSPASVALRPSAAAPPVPASPQRVLVQAASSNPKGAQMQPISLPRVQQVPQQVQPVQHVYPAQVQYVEGGDAVYTNGAIRTAYTYNPEPQMYAPSSTASYFEAPGGAQVTVAASSPPAVPSHSMVGITMDVGGSPIVSSAGAYLIHGGMDSTRHSLAHTSRSSPATLQWLLDNYETAEGVSLPRSSLYNHYLRHCQEHKLDPVNAASFGKLIRSVFMGLRTRRLGTRGNSKYHYYGIRLKPDSPLNRLQEDTQYMAMRQQPMHQKPRYRPAQKTDSLGDSGSHSGLHSTPEQTMAVQSQHHQQYIDVSHVFPEFPAPDLGSFLLQDGVTLHDVKALQLVYRRHCEATVDVVMNLQFHYIEKLWLSFWNSKASSSDGPTSLPASDEDPEGAVLPKDKLISLCQCDPILRWMRSCDHILYQALVEILIPDVLRPVPSTLTQAIRNFAKSLEGWLTNAMSDFPQQVIQTKVGVVSAFAQTLRRYTSLNHLAQAARAVLQNTSQINQMLSDLNRVDFANVQEQASWVCQCEESVVQRLEQDFKLTLQQQSSLDQWASWLDSVVTQVLKQHAGSPSFPKAARQFLLKWSFYSSMVIRDLTLRSAASFGSFHLIRLLYDEYMFYLVEHRVAEATGETPIAVMGEFNDLASLSLTLLDKDDMGDEQRGSEAGPDARSLGEPLVKRERSDPNHSLQGI

SEQ ID NO: 61320 - protein, 979 aa, Homo sapiens
MATQAYTELQAAPPPSQPPQAPPQAQPQPPPPPPPAAPQPPQPPTAAATPQPQYVTELQSPQPQAQPPGGQKQYVTELPAVPAPSQPTGAPTPSPAPQQYIVVTVSEGAMRASETVSEASPGSTASQTGVPTQVVQQVQGTQQRLLVQTSVQAKPGHVSPLQLTNIQVPQQALPTQRLVVQSAAPGSKGGQVSLTVHGTQQVHSPPEQSPVQANSSSSKTAGAPTGTVPQQLQVHGVQQSVPVTQERSVVQATPQAPKPGPVQPLTVQGLQPVHVAQEVQQLQQVPVPHVYSSQVQYVEGGDASYTASAIRSSTYSYPETPLYTQTASTSYYEAAGTATQVSTPATSQAVASSGSMPMYVSGSQVVASSTSTGAGASNSSGGGGSGGGGGGGGGGGGGGSGSTGGGGSGAGTYVIQGGYMLGSASQSYSHTTRASPATVQWLLDNYETAEGVSLPRSTLYCHYLLHCQEQKLEPVNAASFGKLIRSVFMGLRTRRLGTRGNSKYHYYGLRIKASSPLLRLMEDQQHMAMRGQPFSQKQRLKPIQKMEGMTNGVAVGQQPSTGLSDISAQVQQYQQFLDASRSLPDFTELDLQGKVLPEGVGPGDIKAFQVLYREHCEAIVDVMVNLQFTLVETLWKTFWRYNLSQPSEAPPLAVHDEAEKRLPKAILVLLSKFEPVLQWTKHCDNVLYQGLVEILIPDVLRPIPSALTQAIRNFAKSLESWLTHAMVNIPEEMLRVKVAAAGAFAQTLRRYTSLNHLAQAARAVLQNTAQINQMLSDLNRVDFANVQEQASWVCRCEDRVVQRLEQDFKVTLQQQNSLEQWAAWLDGVVSQVLKPYQGSAGFPKAAKLFLLKWSFYSSMVIRDLTLRSAASFGSFHLIRLLYDEYMYYLIEHRVAQAKGETPIAVMGEFANLATSLNPLDPDKDEEEEEEEESEDELPQDISLAAGGESPALGPETLEPPAKLARTDARGLFVQALPSS

SEQ ID NO: 61321 - protein, 723 aa, Homo sapiens
MQNSEGGADSPASVALRPSAAAPPVPASPQRVLVQAASSNPKGAQMQPISLPRVQQVPQQVQPVQHVYPAQVQYVEGGDAVYTNGAIRTAYTYNPEPQMYAPSSTASYFEAPGGAQVTVAASSPPAVPSHSMVGITMDVGGSPIVSSAGAYLIHGGMDSTRHSLAHTSRSSPATLEMAIENLQKSEGITSHKSGLLNSHLQWLLDNYETAEGVSLPRSSLYNHYLRHCQEHKLDPVNAASFGKLIRSVFMGLRTRRLGTRGNSKYHYYGIRLKPDSPLNRLQEDTQYMAMRQQPMHQKPRYRPAQKTDSLGDSGSHSGLHSTPEQTMAVQSQHHQQYIDVSHVFPEFPAPDLGSFLLQDGVTLHDVKALQLVYRRHCEATVDVVMNLQFHYIEKLWLSFWNSKASSSDGPTSLPASDEDPEGAVLPKDKLISLCQCDPILRWMRSCDHILYQALVEILIPDVLRPVPSTLTQAIRNFAKSLEGWLTNAMSDFPQQVIQTKVGVVSAFAQTLRRYTSLNHLAQAARAVLQNTSQINQMLSDLNRVDFANVQEQASWVCQCEESVVQRLEQDFKLTLQQQSSLDQWASWLDSVVTQVLKQHAGSPSFPKAARQFLLKWSFYSSMVIRDLTLRSAASFGSFHLIRLLYDEYMFYLVEHRVAEATGETPIAVMGEFNDLASLSLTLLDKDDMGDEQRGSEAGPDARSLGEPLVKRERSDPNHSLQGI

SEQ ID NO: 61322 - protein, 698 aa, Homo sapiens; identical to SEQ ID NO: 61319

SEQ ID NO: 61323 - protein, 616 aa, Homo sapiens
MAEDEPDAKSPKTGGRAPPGGAEAGEPTTLLQRLRGTISKAVQNKVEGILQDVQKFSDNDKLYLYLQLPSGPTTGDKSSEPSTLSNEEYMYAYRWIRNHLEEHTDTCLPKQSVYDAYRKYCESLACCRPLSTANFGKIIREIFPDIKARRLGGRGQSKYCYSGIRRKTLVSMPPLPGLDLKGSESPEMGPEVTPAPRDELVEAACALTCDWAERILKRSFSSIVEVARFLLQQHLISARSAHAHVLKAMGLAEEDEHAPRERSSKPKNGLENPEGGAHKKPERLAQPPKDLEARTGAGPLARGERKKSVVESSAPGANNLQVNALVARLPLLLPRAPRSLIPPIPVSPPILAPRLSSGALKVATLPLSSRAGAPPAAVPIINMILPTVPALPGPGPGPGRAPPGGLTQPRGTENREVGIGGDQGPHDKGVKRTAEVPVSEASGQAPPAKAAKQDIEDTASDAKRKRGRPRKKSGGSGERNSTPLKSAAAMESAQSSRLPWETWGSGGEGNSAGGAERPGPMGEAEKGAVLAQGQGDGTVSKGGRGPGSQHTKEAEDKIPLVPSKVSVIKGSRSQKEAFPLAKGEVDTAPQGNKDLKEHVLQSSLSQEHKDPKATPP

SEQ ID NO: 61324 - protein, 616 aa, Homo sapiens; identical to SEQ ID NO: 61323

SEQ ID NO: 61325 - protein, 596 aa, Homo sapiens
MAEDEPDAKSPKTGGRAPPGGAEAGEPTTLLQRLRGTISKAVQNKVEGILQDVQKFSDNDKLYLYLQLPSGPTTGDKSSEPSTLSNEEYMYAYRWIRNHLEEHTDTCLPKQSVYDAYRKYCESLACCRPLSTANFGKIIREIFPDIKARRLGGRGQSKYCYSGIRRKTLVSMPPLPGLDLKGSESPEMGPEVTPAPRDELVEAACALTCDWAERILKRSFSSIVEVARFLLQQHLISARSAHAHVLKAMGLAEEDEHAPRERSSKPKNGLENPEGGAHKKPERLAQPPKDLEARTGAGPLARGERKKSVVESSAPGANNLQVNALVARLPLLLPRAPRSLIPPIPVSPPILAPRLSSGALKVATLPLSSRAGAPPAAVPIINMILPTVPALPGPGPGPGRAPPGGLTQPRGTENREVGIGGDQGPHDKGVKRTAEVPVSEASGQAPPAKAAKQDIEDTASDAKRKRGRPRKKSGGSGERNSTPLKSAAAMESAQSSRLPWETWGSGGEGNSAGGAERPGPMGEAEKGAVLAQGQGDGTVSKGGRGPGSQHTKEAEDKIPLVPSKVSVIKGSRSQKEAFPLAKGEVDTAPQGNKDLK

SEQ ID NO: 61326 - protein, 118 aa, Homo sapiens
MAEDEPDAKSPKTGGRAPPGGAEAGEPTTLLQRLRGTISKAVQNKVEGILQDVQKFSDNDKLYLYLQLPSGPTTGDKSSEPSTLSNEEYMYAYRWIRNHLEEHTDTCLPKQSVYDAYR

SEQ ID NO: 61327 - protein, 230 aa, Homo sapiens
MAEDEPDAKSPKTGGRAPPGGAEAGEPTTLLQRLRGTISKAVQNKVEGILQDVQKFSDNDKLYLYLQLPSGPTTGDKSSEPSTLSNEEYMYAYRWIRNHLEEHTDTCLPKQSVYDAYRKYCESLACCRPLSTANFGKIIREIFPDIKARRLGGRGQSKYCYSGIRRKTLVSMPPLPGLDLKGSESPEMGPEVTPAPRDELVEAACALTCDWAERILKRSFSSIVEVARFL

SEQ ID NO: 61328 - protein, 123 aa, Homo sapiens
MAEDEPDAKSPKTGGRAPPGGAEAGEPTTLLQRLRGTISKAVQNKVEGILQDVQKFSDNDKLYLYLQLPSGPTTGDKSSEPSTLSNEEYMYAYRWIRNHLEEHTDTCLPKQSVYDAYRKYCES

SEQ ID NO: 61329 - protein, 96 aa, Homo sapiens
MAEDEPDAKSPKTGGRAPPGGAEAGEPTTLLQRLRGTISKAVQNKVEGILQDVQKFSDNDKLYLYLQLPSGPTTGDKSSEPSTLSNEEYMYAYRWI

SEQ ID NO: 61330 - protein, 106 aa, Homo sapiens
MAEDEPDAKSPKTGGRAPPGGAEAGEPTTLLQRLRGTISKAVQNKVEGILQDVQKFSDNDKLYLYLQLPSGPTTGDKSSEPSTLSNEEYMYAYRWIRNHLEEHTDT

SEQ ID NO: 61331 - protein, 184 aa, Homo sapiens
MAEDEPDAKSPKTGGRAPPGGAEAGEPTTLLQRLRGTISKAVQNKVEGILQDVQKFSDNDKLYLYLQLPSGPTTGDKSSEPSTLSNEEYMYAYRWIRNHLEEHTDTCLPKQSVYDAYRKYCESLACCRPLSTANFGKIIREIFPDIKARRLGGRGQSKYCYSGIRRKTLVSMPPLPGLDLKGSE

SEQ ID NO: 61332 - protein, 576 aa, Homo sapiens
MAEDEPDAKSPKTGGRAPPGGAEAGEPTTLLQRLRGTISKAVQNKVEGILQDVQKFSDNDKLYLYLQLPSGPTTGDKRKYCESLACCRPLSTANFGKIIREIFPDIKARRLGGRGQSKYCYSGIRRKTLVSMPPLPGLDLKGSESPEMGPEVTPAPRDELVEAACALTCDWAERILKRSFSSIVEVARFLLQQHLISARSAHAHVLKAMGLAEEDEHAPRERSSKPKNGLENPEGGAHKKPERLAQPPKDLEARTGAGPLARGERKKSVVESSAPGANNLQVNALVARLPLLLPRAPRSLIPPIPVSPPILAPRLSSGALKVATLPLSSRAGAPPAAVPIINMILPTVPALPGPGPGPGRAPPGGLTQPRGTENREVGIGGDQGPHDKGVKRTAEVPVSEASGQAPPAKAAKQDIEDTASDAKRKRGRPRKKSGGSGERNSTPLKSAAAMESAQSSRLPWETWGSGGEGNSAGGAERPGPMGEAEKGAVLAQGQGDGTVSKGGRGPGSQHTKEAEDKIPLVPSKVSVIKGSRSQKEAFPLAKGEVDTAPQGNKDLKEHVLQSSLSQEHKDPKATPP

SEQ ID NO: 61333 - protein, 616 aa, Homo sapiens; identical to SEQ ID NO: 61323

SEQ ID NO: 61334 - protein, 165 aa, Homo sapiens
MAEDEPDAKSPKTGGRAPPGGAEAGEPTTLLQRLRGTISKAVQNKVEGILQDVQKFSDNDKLYLYLQLPSGPTTGDKSSEPSTLSNEEYMYAYRWIRNHLEEHTDTCLPKQSVYDAYRKYCESLACCRPLSTANFGKIIREIFPDIKARRLGGRGQSKYCYSGIR

SEQ ID NO: 61335 - protein, 928 aa, Homo sapiens
MAKVPELEDTFLQAQPAPQLSPGIQEDCCVQLLGKGLLVYPEETVYLAAEGQPGGEQGGGEKGEDPELPGAVKSEMHLNNGNFSSEEEDADNHDSKTKAADQYLSQKKTITQIVKDKKKQTQLTLQWLEENYIVCEGVCLPRCILYAHYLDFCRKEKLEPACAATFGKTIRQKFPLLTTRRLGTRGHSKYHYYGIGIKESSAYYHSVYSGKGLTRFSGSKLKNEGGFTRKYSLSSKTGTLLPEFPSAQHLVYQGCISKDKVDTLIMMYKTHCQCILDNAINGNFEEIQHFLLHFWQGMPDHLLPLLENPVIIDIFCVCDSILYKVLTDVLIPATMQEMPESLLADIRNFAKNWEQWVVSSLENLPEALTDKKIPIVRRFVSSLKRQTSFLHLAQIARPALFDQHVVNSMVSDIERVDLNSIGSQALLTISGSTDTESGIYTEHDSITVFQELKDLLKKNATVEAFIEWLDTVVEQRVIKTSKQNGRSLKKRAQDFLLKWSFFGARVMHNLTLNNASSFGSFHLIRMLLDEYILLAMETQFNNDKEQELQNLLDKYMKNSDASKAAFTASPSSCFLANRNKGSMVSSDAVKNESHVETTYLPLPSSQPGGLGPALHQFPAGNTDNMPLTGQMELSQIAGHLMTPPISPAMASRGSVINQGPMAGRPPSVGPVLSAPSHCSTYPEPIYPTLPQANHDFYSTSSNYQTVFRAQPHSTSGLYPHHTEHGRCMAWTEQQLSRDFFSGSCAGSPYNSRPPSSYGPSLQAQDSHNMQFLNTGSFNFLSNTGAASCQGATLPPNSPNGYYGSNINYPESHRLGSMVNQHVSVISSIRSLPPYSDIHDPLNILDDSGRKQTSSFYTDTSSPVACRTPVLASSLQTPIPSSSSQCMYGTSNQYPAQETLDSHGTSSREMVSSLPPINTVFMGTAAGGT

SEQ ID NO: 61336 - protein, 1373 aa, Homo sapiens
MAEEQQQPPPQQPDAHQQLPPSAPNSGVALPALVPGLPGTEASALQHKIKNSICKTVQSKVDCILQEVEKFTDLEKLYLYLQLPSGLSNGEKSDQNAMSSSRAQQMHAFSWIRNTLEEHPETSLPKQEVYDEYKSYCDNLGYHPLSAADFGKIMKNVFPNMKARRLGTRGKSKYCYSGLRKKAFVHMPTLPNLDFHKTGDGLEGAEPSGQLQNIDEEVISSACRLVCEWAQKVLSQPFDTVLELARFLVKSHYIGTKSMAALTVMAAAPAGMKGITQPSAFIPTAESNSFQPQVKTLPSPIDAKQQLQRKIQKKQQEQKLQSPLPGESAAKKSESATSNGVTNLPNGNPSILSPQPIGIVVAAVPSPIPVQRTRQLVTSPSPMSSSDGKVLPLNVQVVTQHMQSVKQAPKTPQNVPASPGGDRSARHRYPQILPKPANTSALTIRSPTTVLFTSSPIKTAVVPASHMSSLNVVKMTTISLTPSNSNTPLKHSASVSSATGTTEESRSVPQIKNGSVVSLQSPGSRSSSAGGTSAVEVKVEPETSSDEHPVQCQENSDEAKAPQTPSALLGQKSNTDGALQKPSNEGVIEIKATKVCDQRTKCKSRCNEMLPGTSTGNNQSTITLSVASQNLTFTSSSSPPNGDSINKDPKLCTKSPRKRLSSTLQETQVPPVKKPIVEQLSAATIEGQKQGSVKKDQKVPHSGKTEGSTAGAQIPSKVSVNVSSHIGANQPLNSSALVISDSALEQQTTPSSSPDIKVKLEGSVFLLDSDSKSVGSFNPNGWQQITKDSEFISASCEQQQDISVMTIPEHSDINDLEKSVWELEGMPQDTYSQQLHSQIQESSLNQIQAHSSDQLPLQSELKEFEPSVSQTNESYFPFDDELTQDSIVEELVLMEQQMSMNNSHSYGNCLGMTLQSQSVTPGAPMSSHTSSTHFYHPIHSNGTPIHTPTPTPTPTPTPTPTPTPTSEMIAGSQSLSRESPCSRLAQTTPVDSALGSSRHTPIGTPHSNCSSSVPPSPVECRNPFAFTPISSSMAYHDASIVSSSPVKPMQRPMATHPDKTKLEWMNNGYSGVGNSSVSGHGILPSYQELVEDRFRKPHAFAVPGQSYQSQSRHHDTNFGRLTPVSPVQHQGATVNNTNKQEGFAVPAPLDNKGTNSSASSNFRCRSVSPAVHRQRNLSGSTLYPVSNIPRSNVTPFGSPVTPEVHVFTNVHTDACANNIAQRSQSVPLTVMMQTAFPNALQKQANSKKITNVLLSKLDSDNDDAVRGLGMNNLPSNYTARMNLTQILEPSTVFPSANPQNMIDSSTSVYEFQTPSYLTKSNSTGQINFSPGDNQAQSEIGEQQLDFNSTVKDLLSGDSLQTNQQLKYPDVLGE

SEQ ID NO: 61337 - protein, 1281 aa, Homo sapiens
MSSSRAQQMHAFSWIRNTLEEHPETSLPKQEVYDEYKSYCDNLGYHPLSAADFGKIMKNVFPNMKARRLGTRGKSKYCYSGLRKKAFVHMPTLPNLDFHKTGDGLEGAEPSGQLQNIDEEVISSACRLVCEWAQKVLSQPFDTVLELARFLVKSHYIGTKSMAALTVMAAAPAGMKGITQPSAFIPTAESNSFQPQVKTLPSPIDAKQQLQRKIQKKQQEQKLQSPLPGESAAKKSESATSNGVTNLPNGNPSILSPQPIGIVVAAVPSPIPVQRTRQLVTSPSPMSSSDGKVLPLNVQVVTQHMQSVKQAPKTPQNVPASPGGDRSARHRYPQILPKPANTSALTIRSPTTVLFTSSPIKTAVVPASHMSSLNVVKMTTISLTPSNSNTPLKHSASVSSATGTTEESRSVPQIKNGSVVSLQSPGSRSSSAGGTSAVEVKVEPETSSDEHPVQCQENSDEAKAPQTPSALLGQKSNTDGALQKPSNEGVIEIKATKVCDQRTKCKSRCNEMLPGTSTGNNQSTITLSVASQNLTFTSSSSPPNGDSINKDPKLCTKSPRKRLSSTLQETQVPPVKKPIVEQLSAATIEGQKQGSVKKDQKVPHSGKTEGSTAGAQIPSKVSVNVSSHIGANQPLNSSALVISDSALEQQTTPSSSPDIKVKLEGSVFLLDSDSKSVGSFNPNGWQQITKDSEFISASCEQQQDISVMTIPEHSDINDLEKSVWELEGMPQDTYSQQLHSQIQESSLNQIQAHSSDQLPLQSELKEFEPSVSQTNESYFPFDDELTQDSIVEELVLMEQQMSMNNSHSYGNCLGMTLQSQSVTPGAPMSSHTSSTHFYHPIHSNGTPIHTPTPTPTPTPTPTPTPTPTSEMIAGSQSLSRESPCSRLAQTTPVDSALGSSRHTPIGTPHSNCSSSVPPSPVECRNPFAFTPISSSMAYHDASIVSSSPVKPMQRPMATHPDKTKLEWMNNGYSGVGNSSVSGHGILPSYQELVEDRFRKPHAFAVPGQSYQSQSRHHDTNFGRLTPVSPVQHQGATVNNTNKQEGFAVPAPLDNKGTNSSASSNFRCRSVSPAVHRQRNLSGSTLYPVSNIPRSNVTPFGSPVTPEVHVFTNVHTDACANNIAQRSQSVPLTVMMQTAFPNALQKQANSKKITNVLLSKLDSDNDDAVRGLGMNNLPSNYTARMNLTQILEPSTVFPSANPQNMIDSSTSVYEFQTPSYLTKSNSTGQINFSPGDNQAQSEIGEQQLDFNSTVKDLLSGDSLQTNQQLCSCPSSLLAGMQM

SEQ ID NO: 61338 - protein, 1460 aa, Homo sapiens
MAEEQQQPPPQQPDAHQQLPPSAPNSGVALPALVPGLPGTEASALQHKIKNSICKTVQSKVDCILQEVEKFTDLEKLYLYLQLPSGLSNGEKSDQNAMSSSRAQQMHAFSWIRNTLEEHPETSLPKQEVYDEYKSYCDNLGYHPLSAADFGKIMKNVFPNMKARRLGTRGKSKYCYSGLRKKAFVHMPTLPNLDFHKTGDGLEGAEPSGQLQNIDEEVISSACRLVCEWAQKVLSQPFDTVLELARFLVKSHYIGTKSMAALTVMAAAPAGMKGITQPSAFIPTAESNSFQPQVKTLPSPIDAKQQLQRKIQKKQQEQKLQSPLPGESAAKKSESATSNGVTNLPNGNPSILSPQPIGIVVAAVPSPIPVQRTRQLVTSPSPMSSSDGKVLPLNVQVVTQHMQSVKQAPKTPQNVPASPGGDRSARHRYPQILPKPANTSALTIRSPTTVLFTSSPIKTAVVPASHMSSLNVVKMTTISLTPSNSNTPLKHSASVSSATGTTEESRSVPQIKNGSVVSLQSPGSRSSSAGGTSAVEVKVEPETSSDEHPVQCQENSDEAKAPQTPSALLGQKSNTDGALQKPSNEGVIEIKATKVCDQRTKCKSRCNEMLPGTSTGNNQSTITLSVASQNLTFTSSSSPPNGDSINKDPKLCTKSPRKRLSSTLQETQVPPVKKPIVEQLSAATIEGQKQGSVKKDQKVPHSGKTEGSTAGAQIPSKVSVNVSSHIGANQPLNSSALVISDSALEQQTTPSSSPDIKVKLEGSVFLLDSDSKSVGSFNPNGWQQITKDSEFISASCEQQQDISVMTIPEHSDINDLEKSVWELEGMPQDTYSQQLHSQIQESSLNQIQAHSSDQLPLQSELKEFEPSVSQTNESYFPFDDELTQDSIVEELVLMEQQMSMNNSHSYGNCLGMTLQSQSVTPGAPMSSHTSSTHFYHPIHSNGTPIHTPTPTPTPTPTPTPTPTPTSEMIAGSQSLSRESPCSRLAQTTPVDSALGSSRHTPIGTPHSNCSSSVPPSPVECRNPFAFTPISSSMAYHDASIVSSSPVKPMQRPMATHPDKTKLEWMNNGYSGVGNSSVSGHGILPSYQELVEDRFRKPHAFAVPGQSYQSQSRHHDTNFGRLTPVSPVQHQGATVNNTNKQEGFAVPAPLDNKGTNSSASSNFRCRSVSPAVHRQRNLSGSTLYPVSNIPRSNVTPFGSPVTPEVHVFTNVHTDACANNIAQRSQSVPLTVMMQTAFPNALQKQANSKKITNVLLSKLDSDNDDAVRGLGMNNLPSNYTARMNLTQILEPSTVFPSANPQNMIDSSTSVYEFQTPSYLTKSNSTGQINFSPGDNQAQSEIGEQQLDFNSTVKDLLSGDSLQTNQQLVGQGASDLTNTASDFSSDIRLSSELSGSINDLNTLDPNLLFDPGRQQGQDDEATLEELKNDPLFQQICSESMNSMTSSGFEWIESKDHPTVEMLG

SEQ ID NO: 61339 - protein, 1363 aa, Homo sapiens
MSSSRAQQMHAFSWIRNTLEEHPETSLPKQEVYDEYKSYCDNLGYHPLSAADFGKIMKNVFPNMKARRLGTRGKSKYCYSGLRKKAFVHMPTLPNLDFHKTGDGLEGAEPSGQLQNIDEEVISSACRLVCEWAQKVLSQPFDTVLELARFLVKSHYIGTKSMAALTVMAAAPAGMKGITQPSAFIPTAESNSFQPQVKTLPSPIDAKQQLQRKIQKKQQEQKLQSPLPGESAAKKSESATSNGVTNLPNGNPSILSPQPIGIVVAAVPSPIPVQRTRQLVTSPSPMSSSDGKVLPLNVQVVTQHMQSVKQAPKTPQNVPASPGGDRSARHRYPQILPKPANTSALTIRSPTTVLFTSSPIKTAVVPASHMSSLNVVKMTTISLTPSNSNTPLKHSASVSSATGTTEESRSVPQIKNGSVVSLQSPGSRSSSAGGTSAVEVKVEPETSSDEHPVQCQENSDEAKAPQTPSALLGQKSNTDGALQKPSNEGVIEIKATKVCDQRTKCKSRCNEMLPGTSTGNNQSTITLSVASQNLTFTSSSSPPNGDSINKDPKLCTKSPRKRLSSTLQETQVPPVKKPIVEQLSAATIEGQKQGSVKKDQKVPHSGKTEGSTAGAQIPSKVSVNVSSHIGANQPLNSSALVISDSALEQQTTPSSSPDIKVKLEGSVFLLDSDSKSVGSFNPNGWQQITKDSEFISASCEQQQDISVMTIPEHSDINDLEKSVWELEGMPQDTYSQQLHSQIQESSLNQIQAHSSDQLPLQSELKEFEPSVSQTNESYFPFDDELTQDSIVEELVLMEQQMSMNNSHSYGNCLGMTLQSQSVTPGAPMSSHTSSTHFYHPIHSNGTPIHTPTPTPTPTPTPTPTPTPTSEMIAGSQSLSRESPCSRLAQTTPVDSALGSSRHTPIGTPHSNCSSSVPPSPVECRNPFAFTPISSSMAYHDASIVSSSPVKPMQRPMATHPDKTKLEWMNNGYSGVGNSSVSGHGILPSYQELVEDRFRKPHAFAVPGQSYQSQSRHHDTNFGRLTPVSPVQHQGATVNNTNKQEGFAVPAPLDNKGTNSSASSNFRCRSVSPAVHRQRNLSGSTLYPVSNIPRSNVTPFGSPVTPEVHVFTNVHTDACANNIAQRSQSVPLTVMMQTAFPNALQKQANSKKITNVLLSKLDSDNDDAVRGLGMNNLPSNYTARMNLTQILEPSTVFPSANPQNMIDSSTSVYEFQTPSYLTKSNSTGQINFSPGDNQAQSEIGEQQLDFNSTVKDLLSGDSLQTNQQLVGQGASDLTNTASDFSSDIRLSSELSGSINDLNTLDPNLLFDPGRQQGQDDEATLEELKNDPLFQQICSESMNSMTSSGFEWIESKDHPTVEMLG

SEQ ID NO: 61340 - protein, 260 aa, Homo sapiens
MELTQPAEDLIQTQQTPASELGDPEDPGEEAADGSDTVVLSLFPCTPEPVNPEPDASVSSPQAGSSLKHSTTLTNRQRGNEVSALPATLDSLSIHQLAAQGELDQLKEHLRKGDNLVNKPDERGFTPLIWASAFGEIETVRFLLEWGADPHILAKERESALSLASTGGYTDIVGLLLERDVDINIYDWNGGTPLLYAVRGNHVKCVEALLARGADLTTEADSGYTPMDLAVALGYRKVQQVIENHILKLFQSNLVPADPE

SEQ ID NO: 61341 - protein, 237 aa, Homo sapiens
MELTQPAEDLIQTQQTPASELGDPEDPGEEAADGSDTVVLSLFPCTPEPVNPEPDASVSSPQGSSLKHSTTLTNRQRGNEVSALPATLDCDNLVNKPDERGFTPLIWASAFGEIETVRFLLEWGADPHILAKERESALSLASTGGYTDIVGLLLERDVDINIYDWNGGTPLLYAVRGNHVKCVEALLARGADLTTEADSGYTPMDLAVALGYRKVQQVIENHILKLFQSNLVPADPE

SEQ ID NO: 61342 - protein, 63 aa, Homo sapiens
MELTQPAEDLIQTQQTPASELGDPEDPGEEAADGSDTVVLSLFPCTPEPVNPEPDASVSSPQA

SEQ ID NO: 61343 - protein, 238 aa, Homo sapiens
MELTQPAEDLIQTQQTPASELGDPEDPGEEAADGSDTVVLSLFPCTPEPVNPEPDASVSSPQAGSSLKHSTTLTNRQRGNEVSALPATLDCDNLVNKPDERGFTPLIWASAFGEIETVRFLLEWGADPHILAKERESALSLASTGGYTDIVGLLLERDVDINIYDWNGGTPLLYAVRGNHVKCVEALLARGADLTTEADSGYTPMDLAVALGYRKVQQVIENHILKLFQSNLVPADPE

SEQ ID NO: 61344 - protein, 272 aa, Homo sapiens
MEAQGVAEGAGPGAASGVPHPAALAPAAAPTLAPASVAAAASQFTLLVMQPCAGQDEAAAPGGSVGAGKPVRYLCEGAGDGEEEAGEDEADLLDTSDPPGGGESAASLEDLEDEETHSGGEGSSGGARRRGSGGGSMSKTCTYEGCSETTSQVAKQRKPWMCKKHRNKMYKDKYKKKKSDQALNCGGTASTGSAGNVKLEESADNILSIVKQRTGSFGDRPARPTLLEQVLNQKRLSLLRSPEVVQFLQKQQQLLNQQVLEQRQQQFPGTSM

SEQ ID NO: 61345 - protein, 617 aa, Homo sapiens
MSSLPTSDGFNHPARSSGQSPDVGNPMSLARSVSASVCPIKPSDSDRIEPKAVKALKASAEFQLNSEKKEHLSLQDLSDHASSADHAPTDQSPAMPMQNSSEEITVAGNLEKSAERSTQGLKFHLHTRQEASLSVTSTRMHEPQMFLGEKDWHPENQNLSQVSDPQQHEEPGNEQYEVAQQKASHDQEYLCNIGDLELPEERQQNQHKIVDLEATMKGNGLPQNVDPPSAKKSIPSSECSGCSNSETFMEIDTAQQSLVTLLNSTGRQNANVKNIGALDLTLDNPLMEVETSKCNPSSEILNDSISTQDLQPPETNVEIPGTNKEYGHYSSPSLCGSCQPSVESAEESCPSITAALKELHELLVVSSKPASENTSEEVICQSETIAEGQTSIKDLSERWTQNEHLTQNEQCPQVSFHQAISVSVETEKLTGTSSDTGREAVENVNFRSLGDGLSTDKEGVPKSRESINKNRSVTVTSAKTSNQLHCTLGVEISPKLLAGEEDALNQTSEQTKSLSSNFILVKDLGQGIQNSVTDRPETRENVCPDASRPLLEYEPPTSHPSSSPAILPPLIFPATDIDRILRAGFTLQEALGALHRVGGNADLALLVLLAKNIVVPT

SEQ ID NO: 61346 - protein, 218 aa, Homo sapiens
MSSGAASGTGRGRPRGGGPGPGDPPPSETHKLVVVGGGGVGKSALTIQFIQSYFVSDYDPTIEDSYTKICSVDGIPARLDILDTAGQEEFGAMREQYMRAGHGFLLVFAINDRQSFNEVGKLFTQILRVKDRDDFPVVLVGNKADLESQRQVPRSEASAFGASHHVAYFEASAKLRLNVDEAFEQLVRAVRKYQEQELPPSPPSAPRKKGGGCPCVLL

SEQ ID NO: 61347 - protein, 204 aa, Homo sapiens
MAAAGWRDGSGQEKYRLVVVGGGGVGKSALTIQFIQSYFVTDYDPTIEDSYTKQCVIDDRAARLDILDTAGQEEFGAMREQYMRTGEGFLLVFSVTDRGSFEEIYKFQRQILRVKDRDEFPMILIGNKADLDHQRQVTQEEGQQLARQLKVTYMEASAKIRMNVDQAFHELVRVIRKFQEQECPPSPEPTRKEKDKKGCHCVIF

SEQ ID NO: 61348 - protein, 127 aa, Homo sapiens
MREQYMRTGEGFLLVFSVTDRGSFEEIYKFQRQILRVKDRDEFPMILIGNKADLDHQRQVTQEEGQQLARQLKVTYMEASAKIRMNVDQAFHELVRVIRKFQEQECPPSPEPTRKEKDKKGCHCVIF

SEQ ID NO: 61349 - protein, 127 aa, Homo sapiens; identical to SEQ ID NO: 61348

SEQ ID NO: 61350 - protein, 127 aa, Homo sapiens; identical to SEQ ID NO: 61348

SEQ ID NO: 61351 - protein, 69 aa, Homo sapiens
MREQYMRTGEGFLLVFSVTDRGSFEEIYKFQRQILRVKDRDEFPMILIGNKADLDHQRQVTQEEGQQLA

SEQ ID NO: 61352 - protein, 127 aa, Homo sapiens; identical to SEQ ID NO: 61348

SEQ ID NO: 61353 - protein, 127 aa, Homo sapiens; identical to SEQ ID NO: 61348

SEQ ID NO: 61354 - protein, 169 aa, Homo sapiens
MSYFVTDYDPTIEDSYTKQCVIDDRAARLDILDTAGQEEFGAMREQYMRTGEGFLLVFSVTDRGSFEEIYKFQRQILRVKDRDEFPMILIGNKADLDHQRQVTQEEGQQLARQLKVTYMEASAKIRMNVDQAFHELVRVIRKFQEQECPPSPEPTRKEKDKKGCHCVIF

SEQ ID NO: 61355 - protein, 210 aa, Homo sapiens
MAAAGWRDGSGQEKYRLVVVGGGGVGKSALTIQFIQFFLFLQSYFVTDYDPTIEDSYTKQCVIDDRAARLDILDTAGQEEFGAMREQYMRTGEGFLLVFSVTDRGSFEEIYKFQRQILRVKDRDEFPMILIGNKADLDHQRQVTQEEGQQLARQLKVTYMEASAKIRMNVDQAFHELVRVIRKFQEQECPPSPEPTRKEKDKKGCHCVIF

SEQ ID NO: 61356 - protein, 117 aa, Homo sapiens
MPRLFLFHLLEFCLLLNQFSRAVAAKWKDDVIKLCGRELVRAQIAICGMSTWSKRSLSQEDAPQTPRPVAGDFIQTVSLGISPDGGKALRTGSCFTREFLGALSKLYHPSSTKIQKL

SEQ ID NO: 61357 - protein, 185 aa, Homo sapiens
MPRLFLFHLLEFCLLLNQFSRAVAAKWKDDVIKLCGRELVRAQIAICGMSTWSKRSLSQEDAPQTPRPVAEIVPSFINKDTETIIIMLEFIANLPPELKAALSERQPSLPELQQYVPALKDSNLSFEEFKKLIRNRQSEAADSNPSELKYLGLDTHSQKKRRPYVALFEKCCLIGCTKRSLAKYC

SEQ ID NO: 61358 - protein, 142 aa, Homo sapiens
MARYMLLLLLAVWVLTGELWPGAEARAAPYGVRLCGREFIRAVIFTCGGSRWRRSDILAHEAMGDTFPDADADEDSLAGELDEAMGSSEWLALTKSPQAFYRGRPSWQGTPGVLRGSRDVLAGLSSSCCKWGCSKSEISSLC

SEQ ID NO: 61359 - protein, 430 aa, Homo sapiens
MKPSLLCRPLSCFLMLLPWPLATLTSTTLWQCPPGEEPDLDPGQGTLCRPCPPGTFSAAWGSSPCQPHARCSLWRRLEAQVGMATRDTLCGDCWPGWFGPWGVPRVPCQPCSWAPLGTHGCDEWGRRARRGVEVAAGASSGGETRQPGNGTRAGGPEETAAQYAVIAIVPVFCLMGLLGILVCNLLKRKGYHCTAHKEVGPGPGGGGSGINPAYRTEDANEDTIGVLVRLITEKKENAAALEELLKEYHSKQLVQTSHRPVSKLPPAPPNVPHICPHRHHLHTVQGLASLSGPCCSRCSQKKWPEVLLSPEAVAATTPVPSLLPNPTRVPKAGAKAGRQGEITILSVGRFRVARIPEQRTSSMVSEVKTITEAGPSWGDLPDSPQPGLPPEQQALLGSGGSRTKWLKPPAENKAEENRYVVRLSESNLVI

SEQ ID NO: 61360 - protein, 430 aa, Homo sapiens; identical to SEQ ID NO: 61359

SEQ ID NO: 61361 - protein, 298 aa, Homo sapiens
MHPGCWVQEALVLNHEGDMGFSEPGSHICRALGGLSPKCTCSGPLRRPGLPSAGRSWFSSGVRLPPSPGSGPFSSPGINPAYRTEDANEDTIGVLVRLITEKKENAAALEELLKEYHSKQLVQTSHRPVSKLPPAPPNVPHICPHRHHLHTVQGLASLSGPCCSRCSQKKWPEVLLSPEAVAATTPVPSLLPNPTRVPKAGAKAGRQGEITILSVGRFRVARIPEQRTSSMVSEVKTITEAGPSWGDLPDSPQPGLPPEQQALLGSGGSRTKWLKPPAENKAEENRYVVRLSESNLVI

SEQ ID NO: 61362 - protein, 101 aa, Homo sapiens
MKPSLLCRPLSCFLMLLPWPLATLTSTTLWQCPPGEEPDLDPGQGTLCRPCPPGTFSAAWGSSPCQPHARCSLWRRLEAQVGMATRDTLCGDCWPGWFGPW

SEQ ID NO: 61363 - protein, 1441 aa, Homo sapiens
MATAAAAAAVMAPPGCPGSCPNFAVVCSFLERYGPLLDLPELPFPELERVLQAPPPDVGNGEVPKELVELHLKLMRKIGKSVTADRWEKYLIKICQEFNSTWAWEMEKKGYLEMSVECKLALLKYLCECQFDDNLKFKNIINEEDADTMRLQPIGRDKDGLMYWYQLDQDHNVRMYIEEQDDQDGSSWKCIVRNRNELAETLALLKAQIDPVLLKNSSQQDNSSRESPSLEDEETKKEEETPKQEEQKESEKMKSEEQPMDLENRSTANVLEETTVKKEKEDEKELVKLPVIVKLEKPLPENEEKKIIKEESDSFKENVKPIKVEVKECRADPKDTKSSMEKPVAQEPERIEFGGNIKSSHEITEKSTEETEKLKNDQQAKIPLKKREIKLSDDFDSPVKGPLCKSVTPTKEFLKDEIKQEEETCKRISTITALGHEGKQLVNGEVSDERVAPNFKTEPIETKFYETKEESYSPSKDRNIITEGNGTESLNSVITSMKTGELEKETAPLRKDADSSISVLEIHSQKAQIEEPDPPEMETSLDSSEMAKDLSSKTALSSTESCTMKGEEKSPKTKKDKRPPILECLEKLEKSKKTFLDKDAQRLSPIPEEVPKSTLESEKPGSPEAAETSPPSNIIDHCEKLASEKEVVECQSTSTVGGQSVKKVDLETLKEDSEFTKVEMDNLDNAQTSGIEEPSETKGSMQKSKFKYKLVPEEETTASENTEITSERQKEGIKLTIRISSRKKKPDSPPKVLEPENKQEKTEKEEEKTNVGRTLRRSPRISRPTAKVAEIRDQKADKKRGEGEDEVEEESTALQKTDKKEILKKSEKDTNSKVSKVKPKGKVRWTGSRTRGRWKYSSNDESEGSGSEKSSAASEEEEEKESEEAILADDDEPCKKCGLPNHPELILLCDSCDSGYHTACLRPPLMIIPDGEWFCPPCQHKLLCEKLEEQLQDLDVALKKKERAERRKERLVYVGISIENIIPPQEPDFSEDQEEKKKDSKKSKANLLERRSTRTRKCISYRFDEFDEAIDEAIEDDIKEADGGGVGRGKDISTITGHRGKDISTILDEERKENKRPQRAAAARRKKRRRLNDLDSDSNLDEEESEDEFKISDGSQDEFVVSDENPDESEEDPPSNDDSDTDFCSRRLRRHPSRPMRQSRRLRRKTPKKKYSDDDEEEESEENSRDSESDFSDDFSDDFVETRRRRSRRNQKRQINYKEDSESDGSQKSLRRGKEIRRVHKRRLSSSESEESYLSKNSEDDELAKESKRSVRKRGRSTDEYSEADEEEEEEEGKPSRKRLHRIETDEEESCDNAHGDANQPARDSQPRVLPSEQESTKKPYRIESDEEEDFENVGKVGSPLDYSLVDLPSTNGQSPGKAIENLIGKPTEKSQTPKDNSTASASLASNGTSGGQEAGAPEEEEDELLRVTDLVDYVCNSEQL

SEQ ID NO: 61364 - protein, 1410 aa, Homo sapiens
MATAAAAAAVMAPPGCPGSCPNFAVVCSFLERYGPLLDLPELPFPELERVLQAPPPDVGNGEVPKELVELHLKLMRKIGKSVTADRWEKYLIKYLCECQFDDNLKFKNIINEEDADTMRLQPIGRDKDGLMYWYQLDQDHNVRMYIEEQDDQDGSSWKCIVRNRNELAETLALLKAQIDPVLLKNSSQQDNSSRESPSLEDEETKKEEETPKQEEQKESEKMKSEEQPMDLENRSTANVLEETTVKKEKEDEKELVKLPVIVKLEKPLPENEEKKIIKEESDSFKENVKPIKVEVKECRADPKDTKSSMEKPVAQEPERIEFGGNIKSSHEITEKSTEETEKLKNDQQAKIPLKKREIKLSDDFDSPVKGPLCKSVTPTKEFLKDEIKQEEETCKRISTITALGHEGKQLVNGEVSDERVAPNFKTEPIETKFYETKEESYSPSKDRNIITEGNGTESLNSVITSMKTGELEKETAPLRKDADSSISVLEIHSQKAQIEEPDPPEMETSLDSSEMAKDLSSKTALSSTESCTMKGEEKSPKTKKDKRPPILECLEKLEKSKKTFLDKDAQRLSPIPEEVPKSTLESEKPGSPEAAETSPPSNIIDHCEKLASEKEVVECQSTSTVGGQSVKKVDLETLKEDSEFTKVEMDNLDNAQTSGIEEPSETKGSMQKSKFKYKLVPEEETTASENTEITSERQKEGIKLTIRISSRKKKPDSPPKVLEPENKQEKTEKEEEKTNVGRTLRRSPRISRPTAKVAEIRDQKADKKRGEGEDEVEEESTALQKTDKKEILKKSEKDTNSKVSKVKPKGKVRWTGSRTRGRWKYSSNDESEGSGSEKSSAASEEEEEKESEEAILADDDEPCKKCGLPNHPELILLCDSCDSGYHTACLRPPLMIIPDGEWFCPPCQHKLLCEKLEEQLQDLDVALKKKERAERRKERLVYVGISIENIIPPQEPDFSEDQEEKKKDSKKSKANLLERRSTRTRKCISYRFDEFDEAIDEAIEDDIKEADGGGVGRGKDISTITGHRGKDISTILDEERKENKRPQRAAAARRKKRRRLNDLDSDSNLDEEESEDEFKISDGSQDEFVVSDENPDESEEDPPSNDDSDTDFCSRRLRRHPSRPMRQSRRLRRKTPKKKYSDDDEEEESEENSRDSESDFSDDFSDDFVETRRRRSRRNQKRQINYKEDSESDGSQKSLRRGKEIRRVHKRRLSSSESEESYLSKNSEDDELAKESKRSVRKRGRSTDEYSEADEEEEEEEGKPSRKRLHRIETDEEESCDNAHGDANQPARDSQPRVLPSEQESTKKPYRIESDEEEDFENVGKVGSPLDYSLVDLPSTNGQSPGKAIENLIGKPTEKSQTPKDNSTASASLASNGTSGGQEAGAPEEEEDELLRVTDLVDYVCNSEQL

SEQ ID NO: 61365 - protein, 1189 aa, Homo sapiens
MKSEEQPMDLENRSTANVLEETTVKKEKEDEKELVKLPVIVKLEKPLPENEEKKIIKEESDSFKENVKPIKVEVKECRADPKDTKSSMEKPVAQEPERIEFGGNIKSSHEITEKSTEETEKLKNDQQAKIPLKKREIKLSDDFDSPVKGPLCKSVTPTKEFLKDEIKQEEETCKRISTITALGHEGKQLVNGEVSDERVAPNFKTEPIETKFYETKEESYSPSKDRNIITEGNGTESLNSVITSMKTGELEKETAPLRKDADSSISVLEIHSQKAQIEEPDPPEMETSLDSSEMAKDLSSKTALSSTESCTMKGEEKSPKTKKDKRPPILECLEKLEKSKKTFLDKDAQRLSPIPEEVPKSTLESEKPGSPEAAETSPPSNIIDHCEKLASEKEVVECQSTSTVGGQSVKKVDLETLKEDSEFTKVEMDNLDNAQTSGIEEPSETKGSMQKSKFKYKLVPEEETTASENTEITSERQKEGIKLTIRISSRKKKPDSPPKVLEPENKQEKTEKEEEKTNVGRTLRRSPRISRPTAKVAEIRDQKADKKRGEGEDEVEEESTALQKTDKKEILKKSEKDTNSKVSKVKPKGKVRWTGSRTRGRWKYSSNDESEGSGSEKSSAASEEEEEKESEEAILADDDEPCKKCGLPNHPELILLCDSCDSGYHTACLRPPLMIIPDGEWFCPPCQHKLLCEKLEEQLQDLDVALKKKERAERRKERLVYVGISIENIIPPQEPDFSEDQEEKKKDSKKSKANLLERRSTRTRKCISYRFDEFDEAIDEAIEDDIKEADGGGVGRGKDISTITGHRGKDISTILDEERKENKRPQRAAAARRKKRRRLNDLDSDSNLDEEESEDEFKISDGSQDEFVVSDENPDESEEDPPSNDDSDTDFCSRRLRRHPSRPMRQSRRLRRKTPKKKYSDDDEEEESEENSRDSESDFSDDFSDDFVETRRRRSRRNQKRQINYKEDSESDGSQKSLRRGKEIRRVHKRRLSSSESEESYLSKNSEDDELAKESKRSVRKRGRSTDEYSEADEEEEEEEGKPSRKRLHRIETDEEESCDNAHGDANQPARDSQPRVLPSEQESTKKPYRIESDEEEDFENVGKVGSPLDYSLVDLPSTNGQSPGKAIENLIGKPTEKSQTPKDNSTASASLASNGTSGGQEAGAPEEEEDELLRVTDLVDYVCNSEQL

SEQ ID NO: 61366 - protein, 803 aa, Homo sapiens
ETLALLKAQIDPVLLKNSSQQDNSSRESPSLEDEETKKEEETPKQEEQKESEKMKSEEQPMDLENRSTANVLEETTVKKEKEDEKELVKLPVIVKLEKPLPENEEKKIIKEESDSFKENVKPIKVEVKECRADPKDTKSSMEKPVAQEPERIEFGGNIKSSHEITEKSTEETEKLKNDQQAKIPLKKREIKLSDDFDSPVKGPLCKSVTPTKEFLKDEIKQEEETCKRISTITALGHEGKQLVNGEVSDERVAPNFKTEPIETKFYETKEESYSPSKDRNIITEGNGTESLNSVITSMKTGELEKETAPLRKDADSSISVLEIHSQKAQIEEPDPPEMETSLDSSEMAKDLSSKTALSSTESCTMKGEEKSPKTKKDKRPPILECLEKLEKSKKTFLDKDAQRLSPIPEEVPKSTLESEKPGSPEAAETSPPSNIIDHCEKLASEKEVVECQSTSTVGGQSVKKVDLETLKEDSEFTKVEMDNLDNAQTSGIEEPSETKGSMQKSKFKYKLVPEEETTASENTEITSERQKEGIKLTIRISSRKKKPDSPPKVLEPENKQEKTEKEEEKTNVGRTLRRSPRISRPTAKVAEIRDQKADKKRGEGEDEVEEESTALQKTDKKEILKKSEKDTNSKVSKVKPKGKVRWTGSRTRGRWKYSSNDESEGSGSEKSSAASEEEEEKESEEAILADDDEPCKKCGLPNHPELILLCDSCDSGYHTACLRPPLMIIPDGEWFCPPCQHKLLCEKLEEQLQDLDVALKKKERAERRKERLVYVGISIENIIPPQEPDFSEDQEEKKKDSKK

SEQ ID NO: 61367 - protein, 702 aa, Homo sapiens
ATAAAAAAVMAPPGCPGSCPNFAVVCSFLERYGPLLDLPELPFPELERVLQAPPPDVGNGEVPKELVELHLKLMRKIGKSVTADRWEKYLIKICQEFNSTWAWEMEKKGYLEMSVECKLALLKYLCECQFDDNLKFKNIINEEDADTMRLQPIGRDKDGLMYWYQLDQDHNVRMYIEEQDDQDGSSWKCIVRNRNELAETLALLKAQIDPVLLKNSSQQDNSSRESPSLEDEETKKEEETPKQEEQKESEKMKSEEQPMDLENRSTANVLEETTVKKEKEDEKELVKLPVIVKLEKPLPENEEKKIIKEESDSFKENVKPIKVEVKECRADPKDTKSSMEKPVAQEPERIEFGGNIKSSHEITEKSTEETEKLKNDQQAKIPLKKREIKLSDDFDSPVKGPLCKSVTPTKEFLKDEIKQEEETCKRISTITALGHEGKQLVNGEVSDERVAPNFKTEPIETKFYETKEESYSPSKDRNIITEGNGTESLNSVITSMKTGELEKETAPLRKDADSSISVLEIHSQKAQIEEPDPPEMETSLDSSEMAKDLSSKTALSSTESCTMKGEEKSPKTKKDKRPPILECLEKLEKSKKTFLDKDAQRLSPIPEEVPKSTLESEKPGSPEAAETSPPSNIIDHCEKLASEKEVVECQSTSTVGGQSVKKVDLETLKEDSEFTKVEMDNLDNAQTSGIEEPSETKGSMQK

SEQ ID NO: 61368 - protein, 276 aa, Homo sapiens
EPCKKCGLPNHPELILLCDSCDSGYHTACLRPPLMIIPDGEWFCPPCQHKLLCEKLEEQLQDLDVALKKKERAERRKERLVYVGISIENIIPPQEPDFSEDQEEKKKDSKKSKANLLERRSTRTRKCISYRFDEFDEAIDEAIEDDIKEADGGGVGRGKDISTITGHRGKDISTILDEERKENKRPQRAAAARRKKRRRLNDLDSDSNLDEEESEDEFKISDGSQDEFVVSDENPDESEEDPPSNDDSDTDFCSRRLRRHPSRPMRQSRRLRRKTP

SEQ ID NO: 61369 - protein, 342 aa, Homo sapiens
MAQVLIVGAGMTGSLCAALLRRQTSGPLYLAVWDKAEDSGGRMTTACSPHNPQCTADLGAQYITCTPHYAKKHQRFYDELLAYGVLRPLSSPIEGMVMKEGDCNFVAPQGISSIIKHYLKESGAEVYFRHRVTQINLRDDKWEVSKQTGSPEQFDLIVLTMPVPEILQLQGDITTLISECQRQQLEAVSYSSRYALGLFYEAGTKIDVPWAGQYITSNPCIRFVSIDNKKRNIESSEIGPSLVIHTTVPFGVTYLEHSIEDVQELVFQQLENILPGLPQPIATKCQKWRHSQVTNAAANCPGQMTLHHKPFLACGGDGFTQSNFDGCITSALCVLEALKNYI

SEQ ID NO: 61370 - protein, 315 aa, Homo sapiens
MAQVLIVGAGMTGSLCAALLRRQTSGPLYLAVWDKAEDSGGRMTTACSPHNPQCTADLGAQYITCTPHYAKKHQRFYDELLAYGVLRPLSSPIEGMVMKEGDCNFVAPQGISSIIKHYLKESGAEVYFRHRVTQINLRDDKWEVSKQTGSPEQFDLIVLTMPVPEILQLQGDITTLISECQRQQLEAVSYSSRYALGLFYEAGTKIDVPWAGQYITSNPCIRFVSIDNKKRNIESSEIGPSLVIHTTVPFGVTYLEHSIEDVQELVFQQLENILPGLPQPIATKCQKWRHSQVPSAGVILGCAKSPWMMAIGFPI

SEQ ID NO: 61371 - protein, 232 aa, Homo sapiens
MAQVLIVGAGMTGSLCAALLRRQTSGPLYLAVWDKAEDSGAEVYFRHRVTQINLRDDKWEVSKQTGSPEQFDLIVLTMPVPEILQLQGDITTLISECQRQQLEAVSYSSRYALGLFYEAGTKIDVPWAGQYITSNPCIRFVSIDNKKRNIESSEIGPSLVIHTTVPFGVTYLEHSIEDVQELVFQQLENILPGLPQPIATKCQKWRHSQVPSAGVILGCAKSPWMMAIGFPI

SEQ ID NO: 61372 - protein, 406 aa, Homo sapiens
MDGWRRMPRWGLLLLLWGSCTFGLPTDTTTFKRIFLKRMPSIRESLKERGVDMARLGPEWSQPMKRLTLGNTTSSVILTNYMDTQYYGEIGIGTPPQTFKVVFDTGSSNVWVPSSKCSRLYTACVYHKLFDASDSSSYKHNGTELTLRYSTGTVSGFLSQDIITVGGITVTQMFGEVTEMPALPFMLAEFDGVVGMGFIEQAIGRVTPIFDNIISQGVLKEDVFSFYYNRDSENSQSLGGQIVLGGSDPQHYEGNFHYINLIKTGVWQIQMKGVSVGSSTLLCEDGCLALVDTGASYISGSTSSIEKLMEALGAKKRLFDYVVKCNEGPTLPDISFHLGGKEYTLTSADYVFQESYSSKKLCTLAIHAMDIPPPTGPTWALGATFIRKFYTEFDRRNNRIGFALAR

SEQ ID NO: 61373 - protein, 403 aa, Homo sapiens
MDGWRRMPRWGLLLLLWGSCTFGLPTDTTTFKRIFLKRMPSIRESLKERGVDMARLGPEWSQPMKRLTLGNTTSSVILTNYMDTQYYGEIGIGTPPQTFKVVFDTGSSNVWVPSSKCSRLYTACVYHKLFDASDSSSYKHNGTELTLRYSTGTVSGFLSQDIITVGGITVTQMFGEVTEMPALPFMLAEFDGVVGMGFIEQAIGRVTPIFDNIISQGVLKEDVFSFYYNRNSQSLGGQIVLGGSDPQHYEGNFHYINLIKTGVWQIQMKGVSVGSSTLLCEDGCLALVDTGASYISGSTSSIEKLMEALGAKKRLFDYVVKCNEGPTLPDISFHLGGKEYTLTSADYVFQESYSSKKLCTLAIHAMDIPPPTGPTWALGATFIRKFYTEFDRRNNRIGFALAR

SEQ ID NO: 61374 - protein, 325 aa, Homo sapiens
MDTQYYGEIGIGTPPQTFKVVFDTGSSNVWVPSSKCSRLYTACVYHKLFDASDSSSYKHNGTELTLRYSTGTVSGFLSQDIITVGGITVTQMFGEVTEMPALPFMLAEFDGVVGMGFIEQAIGRVTPIFDNIISQGVLKEDVFSFYYNRDGENSQSLGGQIVLGGSDPQHYEGNFHYINLIKTGVWQIQMKGVSVGSSTLLCEDGCLALVDTGASYISGSTSSIEKLMEALGAKKRLFDYVVKCNEGPTLPDISFHLGGKEYTLTSADYVFQESYSSKKLCTLAIHAMDIPPPTGPTWALGATFIRKFYTEFDRRNNRIGFALAR

SEQ ID NO: 61375 - protein, 427 aa, Homo sapiens
MSKGLPARQDMEKERETLQAWKERVGQELDRVVAFWMEHSHDQEHGGFFTCLGREGRVYDDLKYVWLQGRQVWMYCRLYRTFERFRHAQLLDAAKAGGEFLLRYARVAPPGKKCAFVLTRDGRPVKVQRTIFSECFYTMAMNELWRATGEVRYQTEAVEMMDQIVHWVQEDASGLGRPQLQGAPAAEPMAVPMMLLNLVEQLGEADEELAGKYAELGDWCARRILQHVQRDGQAVLENVSEGGKELPGCLGRQQNPGHTLEAGWFLLRHCIRKGDPELRAHVIDKFLLLPFHSGWDPDHGGLFYFQDADNFCPTQLEWAMKLWWPHSEAMIAFLMGYSDSGDPVLLRLFYQVAEYTFRQFRDPEYGEWFGYLSREGKVALSIKGGPFKGCFHVPRCLAMCEEMLGALLSRPAPAPSPAPTPACRGAE

SEQ ID NO: 61376 - protein, 254 aa, Homo sapiens
MSKGLPARQDMEKERETLQAWKERVGQELDRVVAFWMEHSHDQEHGGFFTCLGREGRVYDDLKYVWLQGRQVWMYCRLYRTFERFRHAQLLDAAKAGGEFLLRYARVAPPGKKCAFVLTRDGRPVKVQRTIFSECFYTMAMNELWRATGEVRYQTEAVEMMDQIVHWVQEDASGLGRPQLQGAPAAEPMAVPMMLLNLVEQLGEADEELAGKYAELGDWCARRILQHVQATRWKPAGFCSVIAFGKATPNFEPT

SEQ ID NO: 61377 - protein, 784 aa, Homo sapiens
MAQLLNSILSVIDVFHKYAKGNGDCALLCKEELKQLLLAEFGDILQRPNDPETVETILNLLDQDRDGHIDFHEYLLLVFQLVQACYHKLDNKSHGGRTSQQERGQEGAQDCKFPGNTGRQHRQRHEEERQNSHHSQPERQDGDSHHGQPERQDRDSHHGQSEKQDRDSHHSQPERQDRDSHHNQSERQDKDFSFDQSERQSQDSSSGKKVSHKSTSGQAKWQGHIFALNRCEKPIQDSHYGQSERHTQQSETLGQASHFNQTNQQKSGSYCGQSERLGQELGCGQTDRQGQSSHYGQTDRQDQSYHYGQTDRQGQSSHYSQTDRQGQSSHYSQPDRQGQSSHYGQMDRKGQCYHYDQTNRQGQGSHYSQPNRQGQSSHYGQPDTQDQSSHYGQTDRQDQSSHYGQTERQGQSSHYSQMDRQGQGSHYGQTDRQGQSSHYGQPDRQGQNSHYGQTDRQGQSSHYGQTDRQGQSSHYSQPDKQGQSSHYGKIDRQDQSYHYGQPDGQGQSSHYGQTDRQGQSFHYGQPDRQGQSSHYSQMDRQGQSSHYGQTDRQGQSSHYGQTDRQGQSYHYGQTDRQGQSSHYIQSQTGEIQGQNKYFQGTEGTRKASYVEQSGRSGRLSQQTPGQEGYQNQGQGFQSRDSQQNGHQVWEPEEDSQHHQHKLLAQIQQERPLCHKGRDWQSCSSEQGHRQAQTRQSHGEGLSHWAEEEQGHQTWDRHSHESQEGPCGTQDRRTHKDEQNHQRRDRQTHEHEQSHQRRDRQTHEDKQNRQRRDRQTHEDEQNHQR

SEQ ID NO: 61378 - protein, 439 aa, Homo sapiens
MDRKGQCYHYDQTNRQGQGSHYSQPNRQGQSSHYGQPDTQDQSSHYGQTDRQDQSSHYGQTERQGQSSHYSQMDRQGQGSHYGQTDRQGQSSHYGQPDRQGQNSHYGQTDRQGQSSHYGQTDRQGQSSHYSQPDKQGQSSHYGKIDRQDQSYHYGQPDGQGQSSHYGQTDRQGQSFHYGQPDRQGQSSHYSQMDRQGQSSHYGQTDRQGQSSHYGQTDRQGQSYHYGQTDRQGQSSHYIQSQTGEIQGQNKYFQGTEGTRKASYVEQSGRSGRLSQQTPGQEGYQNQGQGFQSRDSQQNGHQVWEPEEDSQHHQHKLLAQIQQERPLCHKGRDWQSCSSEQGHRQAQTRQSHGEGLSHWAEEEQGHQTWDRHSHESQEGPCGTQDRRTHKDEQNHQRRDRQTHEHEQSHQRRDRQTHEDKQNRQRRDRQTHEDEQNHQR

SEQ ID NO: 61379 - protein, 354 aa, Homo sapiens
MEVEAVCGGAGEVEAQDSDPAPAFSKAPGSAGHYELPWVEKYRPVKLNEIVGNEDTVSRLEVFAREGNVPNIIIAGPPGTGKTTSILCLARALLGPALKDAMLELNASNDRGIDVVRNKIKMFAQQKVTLPKGRHKIIILDEADSMTDGAQQALRRTMEIYSKTTRFALACNASDKIIEPIQSRCAVLRYTKLTDAQILTRLMNVIEKERVPYTDDGLEAIIFTAQGDMRQALNNLQSTFSGFGFINSENVFKVCDEPHPLLVKEMIQHCVNANIDEAYKILAHLWHLGYSPEDIIGNIFRVCKTFQMAEYLKLEFIKEIGYTHMKIAEGVNSLLQMAGLLARLCQKTMAPVAS

SEQ ID NO: 61380 - protein, 320 aa, Homo sapiens
MEVEAVCGGAGEVEAQDSDPAPAFSKAPGSAGHYELPWVEKYRPVKLNEIVGNEDTVSRLEVFAREGNVPNIIIAGPPGTGKTTSILCLARALLGPALKDAMLELNASNDSMTDGAQQALRRTMEIYSKTTRFALACNASDKIIEPIQSRCAVLRYTKLTDAQILTRLMNVIEKERVPYTDDGLEAIIFTAQGDMRQALNNLQSTFSGFGFINSENVFKVCDEPHPLLVKEMIQHCVNANIDEAYKILAHLWHLGYSPEDIIGNIFRVCKTFQMAEYLKLEFIKEIGYTHMKIAEGVNSLLQMAGLLARLCQKTMAPVAS

SEQ ID NO: 61381 - protein, 356 aa, Homo sapiens
MSLWVDKYRPCSLGRLDYHKEQAAQLRNLVQCGDFPHLLVYGPSGAGKKTRIMCILRELYGVGVEKLRIEHQTITTPSKKKIEISTIASNYHLEVNPSDAGNSDRVVIQEMLKTVAQSQQLETNSQRDFKVVLLTEVDKLTKDAQHALRRTMEKYMSTCRLILCCNSTSKVIPPIRSRCLAVRVPAPSIEDICHVLSTVCKKEGLNLPSQLAHRLAEKSCRNLRKALLMCEACRVQQYPFTADQEIPETDWEVYLRETANAIVSQQTPQRLLEVRGRLYELLTHCIPPEIIMKGLLSELLHNCDGQLKGEVAQMAAYYEHRLQLGSKAIYHLEAFVAKFMALYKKFMEDGLEGMMF

SEQ ID NO: 61382 - protein, 305 aa, Homo sapiens
MSLWVDKYRPCSLGRLDYHKEQAAQLRNLVQCGDFPHLLVYGPSGAGKKTRIMCILRELYGVGVEKLRIEHQTITTPSKKKIEISTIASNYHLEVNPSDAGNSDRVVIQEMLKTVAQSQQLETNSQRDFKVVLLTEVDKLTKDAQHALRRTMEKYMSTCRLILCCNSTSKVIPPIRSRCLAVRVPAPSIEDICHVLSTVCKKEGLNLPSQLAHRLAEKSCRNLRKALLMCEACRVQQYPFTADQEIPETDWEVYLRETANAIVSQQTPQRLLEVRGRLYELLTHCIPPEIIMKACKEESRSCDIF

SEQ ID NO: 61383 - protein, 363 aa, Homo sapiens
MQAFLKGTSISTKPPLTKDRGVAASAGSSGENKKAKPVPWVEKYRPKCVDEVAFQEEVVAVLKKSLEGADLPNLLFYGPPGTGKTSTILAAARELFGPELFRLRVLELNASDERGIQVVREKVKNFAQLTVSGSRSDGKPCPPFKIVILDEADSMTSAAQAALRRTMEKESKTTRFCLICNYVSRIIEPLTSRCSKFRFKPLSDKIQQQRLLDIAKKENVKISDEGIAYLVKVSEGDLRKAITFLQSATRLTGGKEITEKVITDIAGVIPAEKIDGVFAACQSGSFDKLEAVVKDLIDEGHAATQLVNQLHDVVVENNLSDKQKSIITEKLAEVDKCLADGADEHLQLISLCATVMQQLSQNC

SEQ ID NO: 61384 - protein, 363 aa, Homo sapiens; identical to SEQ ID NO: 61383

SEQ ID NO: 61385 - protein, 43 aa, Homo sapiens
MQAFLKGTSISTKPPLTKDRGVAASAGSSGENKKAKPVPWVEK

SEQ ID NO: 61386 - protein, 214 aa, Homo sapiens
MQAFLKGTSISTKPPLTKDRGVAASAGSSGENKKAKPVPWVEKYRPKCVDEVAFQEEVVAVLKKSLEGADLPNLLFYGPPGTGKTSTILAAARELFGPELFRLRVLELNASDERGIQVVREKVKNFAQLTVSGSRSDGKPCPPFKIVILDEADSMTSAAQAALRRTMEKESKTTRFCLICNYVSRIIEPLTSRCSKFRFKPLSDKIQQQRLLDI

SEQ ID NO: 61387 - protein, 123 aa, Homo sapiens
MQAFLKGTSISTKPPLTKDRGVAASAGSSGENKKAKPVPWVEKYRPKCVDEVAFQEEVVAVLKKSLEGADLPNLLFYGPPGTGKTSTILAAARELFGPELFRLRVLELNASDERGIQVVREKV

SEQ ID NO: 61388 - protein, 167 aa, Homo sapiens
MQAFLKGTSISTKPPLTKDRGVAASAGSSGENKKAKPVPWVEKYRPKCVDEVAFQEEVVAVLKKSLEGADLPNLLFYGPPGTGKTSTILAAARELFGPELFRLRVLELNASDERGIQVVREKVKNFAQLTVSGSRSDGKPCPPFKIVILDEADSMTSAAQAALRRTM

SEQ ID NO: 61389 - protein, 95 aa, Homo sapiens
MQAFLKGTSISTKPPLTKDRGVAASAGSSGENKKAKPVPWVEKYRPKCVDEVAFQEEVVAVLKKSLEGADLPNLLFYGPPGTGKTSTILAAAREL

SEQ ID NO: 61390 - protein, 255 aa, Homo sapiens
MVLELNASDDRGIDIIRGPILSFASTRTIFKKGFKLVILDEADAMTQDAQNALRRVIEKFTENTRFCLICNYLSKIIPALQSRCTRFRFGPLTPELMVPRLEHVVEEEKVDISEDGMKALVTLSSGDMRRALNILQSTNMAFGKVTEETVYTCTGHPLKSDIANILDWMLNQDFTTAYRNITELKTLKGLALHDILTEIHLFVHRVDFPSSVRIHLLTKMADIEYRLSVGTNEKIQLSSLIAAFQVTRDLIVAEA

SEQ ID NO: 61391 - protein, 319 aa, Homo sapiens
MVEKYRPQTLNDLISHQDILSTIQKFINEDRLPHLLLYGPPGTGKTSTILACAKQLYKDKEFGSMVLELNASDDRGIDIIRGPILSFASTRTIFKKGFKLVILDEADAMTQDAQNALRRVIEKFTENTRFCLICNYLSKIIPALQSRCTRFRFGPLTPELMVPRLEHVVEEEKVDISEDGMKALVTLSSGDMRRALNILQSTNMAFGKVTEETVYTCTGHPLKSDIANILDWMLNQDFTTAYRNITELKTLKGLALHDILTEIHLFVHRVDFPSSVRIHLLTKMADIEYRLSVGTNEKIQLSSLIAAFQVTRDLIVAEA

SEQ ID NO: 61392 - protein, 104 aa, Homo sapiens
MVEKYRPQTLNDLISHQDILSTIQKFINEDRLPHLLLYGPPGTGKTSTILACAKQLYKDKEFGSMVLELNASDDRGIDIIRGPILSFASTRTIFKKGFKLVILD

SEQ ID NO: 61393 - protein, 340 aa, Homo sapiens
METSALKQQEQPAATKIRNLPWVEKYRPQTLNDLISHQDILSTIQKFINEDRLPHLLLYGPPGTGKTSTILACAKQLYKDKEFGSMVLELNASDDRGIDIIRGPILSFASTRTIFKKGFKLVILDEADAMTQDAQNALRRVIEKFTENTRFCLICNYLSKIIPALQSRCTRFRFGPLTPELMVPRLEHVVEEEKVDISEDGMKALVTLSSGDMRRALNILQSTNMAFGKVTEETVYTCTGHPLKSDIANILDWMLNQDFTTAYRNITELKTLKGLALHDILTEIHLFVHRVDFPSSVRIHLLTKMADIEYRLSVGTNEKIQLSSLIAAFQVTRDLIVAEA

SEQ ID NO: 61394 - protein, 63 aa, Homo sapiens
MVEKYRPQTLNDLISHQDILSTIQKFINEDRLPHLLLYGPPGTGKTSTILACAKQLYKDKEFG

SEQ ID NO: 61395 - protein, 358 aa, Homo sapiens
MWNSNDGGAGWRRKRIAGGFSKRASLGSERRVVAGEEGRERSWGVWGSPAGRRRGRLGRLGQCLKGRSLREPAGFSEAWDVAQALILLFKTGGFESYGSSSYGGAGGYTQSPGGFGSPAPSQAEKKSRARAQHIVPCTISQLLSATLVDEVFRIGNVEISQVTIVGIIRHAEKAPTNIVYKIDDMTAAPMDVRQWVDTDDTSSENTVVPPETYVKVAGHLRSFQNKKSLVAFKIMPLEDMNEFTTHILEVINAHMVLSKANSQPSAGRAPISNPGMSEAGNFGGNSFMPANGLTVAQNQVLNLIKACPRPEGLNFQDLKNQLKHMSVSSIKQAVDFLSNEGHIYSTVDDDHFKSTDAE

SEQ ID NO: 61396 - protein, 278 aa, Homo sapiens
MGRGDRNKRSIRGFESYGSSSYGGAGGYTQSPGGFGSPAPSQAEKKSRARAQHIVPCTISQLLSATLVDEVFRIGNVEISQVTIVGIIRHAEKAPTNIVYKIDDMTAAPMDVRQWVDTDDTSSENTVVPPETYVKVAGHLRSFQNKKSLVAFKIMPLEDMNEFTTHILEVINAHMVLSKANSQPSAGRAPISNPGMSEAGNFGGNSFMPANGLTVAQNQVLNLIKACPRPEGLNFQDLKNQLKHMSVSSIKQAVDFLSNEGHIYSTVDDDHFKSTDAE

SEQ ID NO: 61397 - protein, 270 aa, Homo sapiens
MWNSGFESYGSSSYGGAGGYTQSPGGFGSPAPSQAEKKSRARAQHIVPCTISQLLSATLVDEVFRIGNVEISQVTIVGIIRHAEKAPTNIVYKIDDMTAAPMDVRQWVDTDDTSSENTVVPPETYVKVAGHLRSFQNKKSLVAFKIMPLEDMNEFTTHILEVINAHMVLSKANSQPSAGRAPISNPGMSEAGNFGGNSFMPANGLTVAQNQVLNLIKACPRPEGLNFQDLKNQLKHMSVSSIKQAVDFLSNEGHIYSTVDDDHFKSTDAE

SEQ ID NO: 61398 - protein, 122 aa, Homo sapiens
LEDMNEFTTHILEVINAHMVLSKANSQPSAGRAPISNPGMSEAGNFGGNSFMPANGLTVAQNQVLNLIKACPRPEGLNFQDLKNQLKHMSVSSIKQAVDFLSNEGHIYSTVDDDHFKSTDAE

SEQ ID NO: 61399 - protein, 179 aa, Homo sapiens
MWNSNDGGGFESYGSSSYGGAGGYTQSPGGFGSPAPSQAEKKSRARAQHIVPCTISQLLSATLVDEVFRIGNVEISQVTIVGIIRHAEKAPTNIVYKIDDMTAAPMDVRQWVDTDDTSSENTVVPPETYVKVAGHLRSFQNKKSLVAFKIMPLEDMNEFTTHILEVINAHMVLSKANSQ

SEQ ID NO: 61400 - protein, 261 aa, Homo sapiens
MSKSGFGSYGSISAADGASGGSDQLCERDATPAIKTQRPKVRIQDVVPCNVNQLLSSTVFDPVFKVRGIIVSQVSIVGVIRGAEKASNHICYKIDDMTAKPIEARQWFGREKVKQVTPLSVGVYVKVFGILKCPTGTKSLEVLKIHVLEDMNEFTVHILETVNAHMMLDKARRDTTVESVPVSPSEVNDAGDNDESHRNFIQDEVLRLIHECPHQEGKSIHELRAQLCDLSVKAIKEAIDYLTVEGHIYPTVDREHFKSAD

SEQ ID NO: 61401 - protein, 109 aa, Homo sapiens
MNPALGNQTDVAGLFLANSSEALERAVRCCTQASVVTDDGFAEGGPDERSLYIMRVVQIAVMCVLSLTVVFGIFFLGCNLLIKSEGMINFLVKDRRPSKEVEAVVVGPY

SEQ ID NO: 61402 - protein, 108 aa, Homo sapiens
MKALCLLLLPVLGLLVSSKTLCSMEEAINERIQEVAGSLIFRAISSIGLECQSVTSRGDLATCPRGFAVTGCTCGSACGSWDVRAETTCHCQCAGMDWTGARCCRVQP

SEQ ID NO: 61403 - protein, 82 aa, Homo sapiens
MKALCLLLLPVLGLLVSSKTLCSMEEAINERIQEVAGSLSFAVTGCTCGSACGSWDVRAETTCHCQCAGMDWTGARCCRVQP

SEQ ID NO: 61404 - protein, 317 aa, Homo sapiens
MKRLSLVTTNRLSPHGNFLPLCTFPLAVDMAALFQEASSCPVCSDYLEKPMSLECGCAVCFKCINSLQKEPHGEDLLCCCCSMVSQKNKIRPSWQLERLASHIKELEPKLKKILQMNPRMRKFQVDMTLDADTANNFLLISDDLRSVRSGCITQNRQDLAERFDVSICILGSPRFTCGRHYWEVDVGTSTEWDLGVCRESVHRKGRIHLTTERGFWTVSLRDGSRLSASTVPLTFLFVDRKLQRVGIFLDMGMQNVSFFDAEGGSHVYTFRSVSAEEPLHLFFAPPSPPNGDKSVLSICPVINPGTTDAPVHPGEAK

SEQ ID NO: 61405 - protein, 317 aa, Homo sapiens
MKRLSLVTTNRLSPHGNFFTLCTFPLAVDMAALFQEASSCPVCSDYLEKPMSLECGCAVCLKCINSLQKEPHGEDLLCCCSSMVSRKNKIRRNRQLERLASHIKELEPKLKKILQMNPRMRKFQVDMTLDANTANNFLLISDDLRSVRSGRIRQNRQDLAERFDVSVCILGSPRFTCGRHCWEVDVGTSTEWDLGVCRESVHRKGRIQLTTELGFWTVSLRDGGRLSATTVPLTFLFVDRKLQRVGIFLDMGMQNVSFFDAESGSHVYTFRSVSAEEPLRPFLAPSVPPNGDQGVLSICPLMNSGTTDAPVRPGEAK

SEQ ID NO: 61406 - protein, 288 aa, Homo sapiens
MAALFQEASSCPVCSDYLEKPMSLECGCAVCLKCINSLQKEPHGEDLLCCCSSMVSRKNKIRRNRQLERLASHIKELEPKLKKILQMNPRMRKFQVDMTLDANTANNFLLISDDLRSVRSGRIRQNRQDLAERFDVSVCILGSPRFTCGRHCWEVDVGTSTEWDLGVCRESVHRKGRIQLTTELGFWTVSLRDGGRLSATTVPLTFLFVDRKLQRVGIFLDMGMQNVSFFDAESGSHVYTFRSVSAEEPLRPFLAPSVPPNGDQGVLSICPLMNSGTTDAPVRPGEAK

SEQ ID NO: 61407 - protein, 288 aa, Homo sapiens; identical to SEQ ID NO: 61406

SEQ ID NO: 61408 - protein, 378 aa, Homo sapiens
MEVAELGFPETAVSQSRICLCAVLCGHWDFADMMVIRSLSLIRLEGVEGRDPVGGGNLTNKRPSCAPSPQDLSAQWKQLEDRGASSRRVDMAALFQEASSCPVCSDYLEKPMSLECGCAVCLKCINSLQKEPHGEDLLCCCSSMVSRKNKIRRNRQLERLASHIKELEPKLKKILQMNPRMRKFQVDMTLDANTANNFLLISDDLRSVRSGRIRQNRQDLAERFDVSVCILGSPRFTCGRHCWEVDVGTSTEWDLGVCRESVHRKGRIQLTTELGFWTVSLRDGGRLSATTVPLTFLFVDRKLQRVGIFLDMGMQNVSFFDAESGSHVYTFRSVSAEEPLRPFLAPSVPPNGDQGVLSICPLMNSGTTDAPVRPGEAK

SEQ ID NO: 61409 - protein, 317 aa, Homo sapiens
MKRLSLVTTNRLSPQGNFLPLCTFPLAVDMAALFQEASSCPVCSDYLEKPMSLECGCTVCLKCINSLQKEPHGEDLLCCCCSMVSQRNKIRPNRQLERLVSHIKELEPKLKKILQMNPRMRKFQVDMTLDADTANNFLLISDDLRSVRSGLITQNRQDLAERFDVSVCILGSPRFTCGRHYWEVDVGTSTEWDLGVCRESVHCKGKIQLTTELGFWTVSLRDGSRLSASTVPLTFLLVDRKLQRVGIFLDMGMQNVSFFDAESGSHVYTFRSVSAEEPLRPFLAPSIPPNGDQGVLSICPLMNSGTTDAPVRPGEAK

SEQ ID NO: 61410 - protein, 288 aa, Homo sapiens
MAALFQEASSCPVCSDYLEKPMSLECGCTVCLKCINSLQKEPHGEDLLCCCCSMVSQRNKIRPNRQLERLVSHIKELEPKLKKILQMNPRMRKFQVDMTLDADTANNFLLISDDLRSVRSGLITQNRQDLAERFDVSVCILGSPRFTCGRHYWEVDVGTSTEWDLGVCRESVHCKGKIQLTTELGFWTVSLRDGSRLSASTVPLTFLLVDRKLQRVGIFLDMGMQNVSFFDAESGSHVYTFRSVSAEEPLRPFLAPSIPPNGDQGVLSICPLMNSGTTDAPVRPGEAK

SEQ ID NO: 61411 - protein, 288 aa, Homo sapiens; identical to SEQ ID NO: 61410

SEQ ID NO: 61412 - protein, 1072 aa, Homo sapiens
MAKATSGAAGLRLLLLLLLPLLGKVALGLYFSRDAYWEKLYVDQAAGTPLLYVHALRDAPEEVPSFRLGQHLYGTYRTRLHENNWICIQEDTGLLYLNRSLDHSSWEKLSVRNRGFPLLTVYLKVFLSPTSLREGECQWPGCARVYFSFFNTSFPACSSLKPRELCFPETRPSFRIRENRPPGTFHQFRLLPVQFLCPNISVAYRLLEGEGLPFRCAPDSLEVSTRWALDREQREKYELVAVCTVHAGAREEVVMVPFPVTVYDEDDSAPTFPAGVDTASAVVEFKRKEDTVVATLRVFDADVVPASGELVRRYTSTLLPGDTWAQQTFRVEHWPNETSVQANGSFVRATVHDYRLVLNRNLSISENRTMQLAVLVNDSDFQGPGAGVLLLHFNVSVLPVSLHLPSTYSLSVSRRARRFAQIGKVCVENCQAFSGINVQYKLHSSGANCSTLGVVTSAEDTSGILFVNDTKALRRPKCAELHYMVVATDQQTSRQAQAQLLVTVEGSYVAEEAGCPLSCAVSKRRLECEECGGLGSPTGRCEWRQGDGKGITRNFSTCSPSTKTCPDGHCDVVETQDINICPQDCLRGSIVGGHEPGEPRGIKAGYGTCNCFPEEEKCFCEPEDIQDPLCDELCRTVIAAAVLFSFIVSVLLSAFCIHCYHKFAHKPPISSAEMTFRRPAQAFPVSYSSSGARRPSLDSMENQVSVDAFKILEDPKWEFPRKNLVLGKTLGEGEFGKVVKATAFHLKGRAGYTTVAVKMLKENASPSELRDLLSEFNVLKQVNHPHVIKLYGACSQDGPLLLIVEYAKYGSLRGFLRESRKVGPGYLGSGGSRNSSSLDHPDERALTMGDLISFAWQISQGMQYLAEMKLVHRDLAARNILVAEGRKMKISDFGLSRDVYEEDSYVKRSQGRIPVKWMAIESLFDHIYTTQSDVWSFGVLLWEIVTLGGNPYPGIPPERLFNLLKTGHRMERPDNCSEEMYRLMLQCWKQEPDKRPVFADISKDLEKMMVKRRDYLDLAASTPSDSLIYDDGLSEEETPLVDCNNAPLPRALPSTWIENKLYGRISHAFTRF

SEQ ID NO: 61413 - protein, 1114 aa, Homo sapiens
MAKATSGAAGLRLLLLLLLPLLGKVALGLYFSRDAYWEKLYVDQAAGTPLLYVHALRDAPEEVPSFRLGQHLYGTYRTRLHENNWICIQEDTGLLYLNRSLDHSSWEKLSVRNRGFPLLTVYLKVFLSPTSLREGECQWPGCARVYFSFFNTSFPACSSLKPRELCFPETRPSFRIRENRPPGTFHQFRLLPVQFLCPNISVAYRLLEGEGLPFRCAPDSLEVSTRWALDREQREKYELVAVCTVHAGAREEVVMVPFPVTVYDEDDSAPTFPAGVDTASAVVEFKRKEDTVVATLRVFDADVVPASGELVRRYTSTLLPGDTWAQQTFRVEHWPNETSVQANGSFVRATVHDYRLVLNRNLSISENRTMQLAVLVNDSDFQGPGAGVLLLHFNVSVLPVSLHLPSTYSLSVSRRARRFAQIGKVCVENCQAFSGINVQYKLHSSGANCSTLGVVTSAEDTSGILFVNDTKALRRPKCAELHYMVVATDQQTSRQAQAQLLVTVEGSYVAEEAGCPLSCAVSKRRLECEECGGLGSPTGRCEWRQGDGKGITRNFSTCSPSTKTCPDGHCDVVETQDINICPQDCLRGSIVGGHEPGEPRGIKAGYGTCNCFPEEEKCFCEPEDIQDPLCDELCRTVIAAAVLFSFIVSVLLSAFCIHCYHKFAHKPPISSAEMTFRRPAQAFPVSYSSSGARRPSLDSMENQVSVDAFKILEDPKWEFPRKNLVLGKTLGEGEFGKVVKATAFHLKGRAGYTTVAVKMLKENASPSELRDLLSEFNVLKQVNHPHVIKLYGACSQDGPLLLIVEYAKYGSLRGFLRESRKVGPGYLGSGGSRNSSSLDHPDERALTMGDLISFAWQISQGMQYLAEMKLVHRDLAARNILVAEGRKMKISDFGLSRDVYEEDSYVKRSQGRIPVKWMAIESLFDHIYTTQSDVWSFGVLLWEIVTLGGNPYPGIPPERLFNLLKTGHRMERPDNCSEEMYRLMLQCWKQEPDKRPVFADISKDLEKMMVKRRDYLDLAASTPSDSLIYDDGLSEEETPLVDCNNAPLPRALPSTWIENKLYGMSDPNWPGESPVPLTRADGTNTGFPRYPNDSVYANWMLSPSAAKLMDTFDS

SEQ ID NO: 61414 - protein, 458 aa, Homo sapiens
MAKATSGAAGLRLLLLLLLPLLGKVALGLYFSRDAYWEKLYVDQAAGTPLLYVHALRDAPEEVPSFRLGQHLYGTYRTRLHENNWICIQEDTGLLYLNRSLDHSSWEKLSVRNRGFPLLTVYLKVFLSPTSLREGECQWPGCARVYFSFFNTSFPACSSLKPRELCFPETRPSFRIRENRPPGTFHQFRLLPVQFLCPNISVAYRLLEGEGLPFRCAPDSLEVSTRWALDREQREKYELVAVCTVHAGAREEVVMVPFPVTVYDEDDSAPTFPAGVDTASAVVEFKRKEDTVVATLRVFDADVVPASGELVRRYTSTLLPGDTWAQQTFRVEHWPNETSVQANGSFVRATVHDYRLVLNRNLSISENRTMQLAVLVNDSDFQGPGAGVLLLHFNVSVLPVSLHLPSTYSLSVSRRARRFAQIGKVCVENCLADLTGDAVSGRDEARSSGLGSQKHPGS

SEQ ID NO: 61415 - protein, 261 aa, Homo sapiens
MDEALETQLKTSRGRFSATESLPTLELLSQVDMDCRVHMRPIGLTWVLQLTLAWILLEACGGSRPLQARSQQHHGLAADLGKGKLHLAGPCCPSEMDTTETSGPGNHPERCGVPSPECESFLEHLQRALRSRFRLRLLGVRQAQPLCEELCQAWFANCEDDITCGPTWLPLSEKRGCEPSCLTYGQTFADGTDLCRSALGHALPVAAPGARHCFNISISAVPRPRPGRRGREAPSRRSRSPRTSILDAAGSGSGSGSGSGP

SEQ ID NO: 61416 - protein, 224 aa, Homo sapiens
MGWQLIWAKASCTWQDLVVPQRWTQQRHRALETIQNAVECRALNANPSWNTSNVPFAVASACGYWGYARHSRSARSSARPGSPTAKMISPAARLGSHSQKKGAVSPAALPMDRLECSGAISARCNLRLRGSSDSPAATSRIAGISGACHHAQLIFVFLVESAFHHVGQAGFELLTSGDPPTSASQSVGITGVSHRPRPPPSSFLPCLDPRDRIGTPQVPAPTLP

SEQ ID NO: 61417 - protein, 229 aa, Homo sapiens
MDCRVHMRPIGLTWVLQLTLAWILLEACGGSRPLQARSQQHHGLAADLGKGKLHLAGPCCPSEMDTTETSGPGNHPERCGVPSPECESFLEHLQRALRSRFRLRLLGVRQAQPLCEELCQAWFANCEDDITCGPTWLPLSEKRGCEPSCLTYGQTFADGTDLCRSALGHALPVAAPGARHCFNISISAVPRPRPGRRGREAPSRRSRSPRTSILDAAGSGSGSGSGSGP

SEQ ID NO: 61418 - protein, 205 aa, Homo sapiens
MDEALETQLKTSRGRFSATESLPTLELLSQVDMDCRVHMRPIGLTWVLQLTLAWILLEACGGSRPLQARSQQHHGLAADLGKGKLHLAGPCCPSEMDTTETSGPGNHPERCGVPSPECESFLEHLQRALRSRFRLRLLGVRQAQPLCEELCQAWFANCEDDITCGPTWLPLSEKRGCEPSCLTYGQAGVQWRDLSSMQPPPPGFK

SEQ ID NO: 61419 - protein, 239 aa, Homo sapiens
MARQLLSQVDMDCRVHMRPIGLTWVLQLTLAWILLEACGGSRPLQARSQQHHGLAADLGKGKLHLAGPCCPSEMDTTETSGPGNHPERCGVPSPECESFLEHLQRALRSRFRLRLLGVRQAQPLCEELCQAWFANCEDDITCGPTWLPLSEKRGCEPSCLTYGQTFADGTDLCRSALGHALPVAAPGARHCFNISISAVPRPRPGRRGREAPSRRSRSPRTSILDAAGSGSGSGSGSGP

SEQ ID NO: 61420 - protein, 331 aa, Homo sapiens
MARGGRGRRLGLALGLLLALVLAPRVLRAKPTVRKERVVRPDSELGERPPEDNQSFQYDHEAFLGKEDSKTFDQLTPDESKERLGKIVDRIDNDGDGFVTTEELKTWIKRVQKRYIFDNVAKVWKDYDRDKDDKISWEEYKQATYGYYLGNPAEFHDSSDHHTFKKMLPRDERRFKAADLNGDLTATREEFTAFLHPEEFEHMKEIVVLETLEDIDKNGDGFVDQDEYIADMFSHEENGPEPDWVLSEREQFNEFRDLNKDGKLDKDEIRHWILPQDYDHAQAEARHLVYESDKNKDEKLTKEEILENWNMFVGSQATNYGEDLTKNHDEL

SEQ ID NO: 61421 - protein, 28 aa, Homo sapiens
EILENWNMFVGSQATNYGEDLTKNHDEL

SEQ ID NO: 61422 - protein, 317 aa, Homo sapiens
MRLGPRTAALGLLLLCAAAAGAGKAEELHYPLGERRSDYDREALLGVQEDVDEYVKLGHEEQQKRLQAIIKKIDLDSDGFLTESELSSWIQMSFKHYAMQEAKQQFVEYDKNSDDTVTWDEYNIQMYDRVIDFDENTALDDAEEESFRKLHLKDKKRFEKANQDSGPGLSLEEFIAFEHPEEVDYMTEFVIQEALEEHDKNGDGFVSLEEFLGDYRWDPTANEDPEWILVEKDRFVNDYDKDNDGRLDPQELLPWVVPNNQGIAQEEALHLIDEMDLNGDKKLSEEEILENPDLFLTSEATDYGRQLHDDYFYHDEL

SEQ ID NO: 61423 - protein, 776 aa, Homo sapiens
MAAPGDPQDELLPLAGPGSQWLRHRGEGENEAVTPKGATPAPQAGEPSPGLGARAREAASREAGSGPARQSPVAMETASTGVAGVSSAMDHTFSTTSKDGEGSCYTSLISDICYPPQEDSTYFTGILQKENGHVTISESPEELGTPGPSLPDVPGIESRGLFSSDSGIEMTPAESTEVNKILADPLDQMKAEAYKYIDITRPEEVKHQEQHHPELEDKDLDFKNKDTDISIKPEGVREPDKPAPVEGKIIKDHLLEESTFAPYIDDLSEEQRRAPQITTPVKITLTEIEPSVETTTQEKTPEKQDICLKPSPDTVPTVTVSEPEDDSPGSITPPSSGTEPSAAESQGKGSISEDELITAIKEAKGLSYETAENPRPVGQLADRPEVKARSGPPTIPSPLDHEASSAESGDSEIELVSEDPMAAEDALPSGYVSFGHVGGPPPSPASPSIQYSILREEREAELDSELIIESCDASSASEESPKREQDSPPMKPSALDAIREETGVRAEERAPSRRGLAEPGSFLDYPSTEPQPGPELPPGDGALEPETPMLPRKPEEDSSSNQSPAATKGPGPLGPGAPPPLLFLNKQKAIDLLYWRDIKQTGIVFGSFLLLLFSLTQFSVVSVVAYLALAALSATISFRIYKSVLQAVQKTDEGHPFKAYLELEITLSQEQIQKYTDCLQFYVNSTLKELRRLFLVQDLVDSLKFAVLMWLLTYVGALFNGLTLLLMAVVSMFTLPVVYVKHQAQIDQYLGLVRTHINAVVAKIQAKIPGAKRHAE

SEQ ID NO: 61424 - protein, 208 aa, Homo sapiens
MQATADSTKMDCVWSNWKSQAIDLLYWRDIKQTGIVFGSFLLLLFSLTQFSVVSVVAYLALAALSATISFRIYKSVLQAVQKTDEGHPFKAYLELEITLSQEQIQKYTDCLQFYVNSTLKELRRLFLVQDLVDSLKFAVLMWLLTYVGALFNGLTLLLMAVVSMFTLPVVYVKHQAQIDQYLGLVRTHINAVVAKIQAKIPGAKRHAE

SEQ ID NO: 61425 - protein, 356 aa, Homo sapiens
MAAEDALPSGYVSFGHVGGPPPSPASPSIQYSILREEREAELDSELIIESCDASSASEESPKREQDSPPMKPSALDAIREETGVRAEERAPSRRGLAEPGSFLDYPSTEPQPGPELPPGDGALEPETPMLPRKPEEDSSSNQSPAATKGPGPLGPGAPPPLLFLNKQKAIDLLYWRDIKQTGIVFGSFLLLLFSLTQFSVVSVVAYLALAALSATISFRIYKSVLQAVQKTDEGHPFKAYLELEITLSQEQIQKYTDCLQFYVNSTLKELRRLFLVQDLVDSLKFAVLMWLLTYVGALFNGLTLLLMAVVSMFTLPVVYVKHQAQIDQYLGLVRTHINAVVAKIQAKIPGAKRHAE

SEQ ID NO: 61426 - protein, 702 aa, Homo sapiens
METASTGVAGVSSAMDHTFSTTSKDGEGSCYTSLISDICYPPQEDSTYFTGILQKENGHVTISESPEELGTPGPSLPDVPGIESRGLFSSDSGIEMTPAESTEVNKILADPLDQMKAEAYKYIDITRPEEVKHQEQHHPELEDKDLDFKNKDTDISIKPEGVREPDKPAPVEGKIIKDHLLEESTFAPYIDDLSEEQRRAPQITTPVKITLTEIEPSVETTTQEKTPEKQDICLKPSPDTVPTVTVSEPEDDSPGSITPPSSGTEPSAAESQGKGSISEDELITAIKEAKGLSYETAENPRPVGQLADRPEVKARSGPPTIPSPLDHEASSAESGDSEIELVSEDPMAAEDALPSGYVSFGHVGGPPPSPASPSIQYSILREEREAELDSELIIESCDASSASEESPKREQDSPPMKPSALDAIREETGVRAEERAPSRRGLAEPGSFLDYPSTEPQPGPELPPGDGALEPETPMLPRKPEEDSSSNQSPAATKGPGPLGPGAPPPLLFLNKQKAIDLLYWRDIKQTGIVFGSFLLLLFSLTQFSVVSVVAYLALAALSATISFRIYKSVLQAVQKTDEGHPFKAYLELEITLSQEQIQKYTDCLQFYVNSTLKELRRLFLVQDLVDSLKFAVLMWLLTYVGALFNGLTLLLMAVVSMFTLPVVYVKHQAQIDQYLGLVRTHINAVVAKIQAKIPGAKRHAE

SEQ ID NO: 61427 - protein, 545 aa, Homo sapiens
MGQVLPVFAHCKEAPSTASSTPDSTEGGNDDSDFRELHTAREFSEEDEEETTSQDWGTPRELTFSYIAFDGVVGSGGRRDSTARRPRPQGRSVSEPRDQHPQPSLGDSLESIPSLSQSPEPGRRGDPDTAPPSERPLEDLRLRLDHLGWVARGTGSGEDSSTSSSTPLEDEEPQEPNRLETGEAGEELDLRLRLAQPSSPEVLTPQLSPGSGTPQAGTPSPSRSRDSNSGPEEPLLEEEEKQWGPLEREPVRGQCLDSTDQLEFTVEPRLLGTAMEWLKTSLLLAVYKTVPILELSPPLWTAIGWVQRGPTPPTPVLRVLLKWAKSPRSSGVPSLSLGADMGSKVADLLYWKDTRTSGVVFTGLMVSLLCLLHFSIVSVAAHLALLLLCGTISLRVYRKVLQAVHRGDGANPFQAYLDVDLTLTREQTERLSHQITSRVVSAATQLRHFFLVEDLVDSLKLALLFYILTFVGAIFNGLTLLILGVIGLFTIPLLYRQHQAQIDQYVGLVTNQLSHIKAKIRAKIPGTGALASAAAAVSGSKAKAE

SEQ ID NO: 61428 - protein, 472 aa, Homo sapiens
MGQVLPVFAHCKEAPSTASSTPDSTEGGNDDSDFRELHTAREFSEEDEEETTSQDWGTPRELTFSYIAFDGVVGSGGRRDSTARRPRPQGRSVSEPRDQHPQPSLGDSLESIPSLSQSPEPGRRGDPDTAPPSERPLEDLRLRLDHLGWVARGTGSGEDSSTSSSTPLEDEEPQEPNRLETGEAGEELDLRLRLAQPSSPEVLTPQLSPGSGTPQAGTPSPSRSRDSNSGPEEPLLEEEEKQWGPLEREPVRGQCLDSTDQLEFTVEPRLLVADLLYWKDTRTSGVVFTGLMVSLLCLLHFSIVSVAAHLALLLLCGTISLRVYRKVLQAVHRGDGANPFQAYLDVDLTLTREQTERLSHQITSRVVSAATQLRHFFLVEDLVDSLKLALLFYILTFVGAIFNGLTLLILGVIGLFTIPLLYRQHQAQIDQYVGLVTNQLSHIKAKIRAKIPGTGALASAAAAVSGSKAKAE

SEQ ID NO: 61429 - protein, 205 aa, Homo sapiens
MGSKVADLLYWKDTRTSGVVFTGLMVSLLCLLHFSIVSVAAHLALLLLCGTISLRVYRKVLQAVHRGDGANPFQAYLDVDLTLTREQTERLSHQITSRVVSAATQLRHFFLVEDLVDSLKLALLFYILTFVGAIFNGLTLLILGVIGLFTIPLLYRQHQAQIDQYVGLVTNQLSHIKAKIRAKIPGTGALASAAAAVSGSKAKAE

SEQ ID NO: 61430 - protein, 1013 aa, Homo sapiens
MAEPSAATQSHSISSSSFGAEPSAPGGGGSPGACPALGTKSCSSSCAEGLSSLCSDEPSSEIMTSSFLSSSEIHNTGLTILHGEKSHVLGSQPILAKEGKDHLDLLDMKKMEKPQGTSNNVSDSSVSLAAGVHCDRPSIPASFPEHPAFLSKKIGQVEEQIDKETKNPNGVSSREAKTALDADDRFTLLTAQKPPTEYSKVEGIYTYSLSPSKVSGDDVIEKDSPESPFEVIIDKAAFDKEFKDSYKESTDDFGSWSVHTDKESSEDISETNDKLFPLRNKEAGRYPMSALLSRQFSHTNAALEEVSRCVNDMHNFTNEILTWDLVPQVKQQTDKSSDCITKTTGLDMSEYNSEIPVVNLKTSTHQKTPVCSIDGSTPITKSTGDWAEASLQQENAITGKPVPDSLNSTKEFSIKGVQGNMQKQDDTLAELPGSPPEKCDSLGSGVATVKVVLPDDHLKDEMDWQSSALGEITEADSSGESDDTVIEDITADTSFENNKIQAEKPVSIPSAVVKTGEREIKEIPSCEREEKTSKNFEELVSDSELHQDQPDILGRSPASEAACSKVPDTNVSLEDVSEVAPEKPITTENPKLPSTVSPNVFNETEFSLNVTTSAYLESLHGKNVKHIDDSSPEDLIAAFTETRDKGIVDSERNAFKAISEKMTDFKTTPPVEVLHENESGGSEIKDIGSKYSEQSKETNGSEPLGVFPTQGTPVASLDLEQEQLTIKALKELGERQVEKSTSAQRDAELPSEEVLKQTFTFAPESWPQRSYDILERNVKNGSDLGISQKPITIRETTRVDAVSSLSKTELVKKHVLARLLTDFSVHDLIFWRDVKKTGFVFGTTLIMLLSLAAFSVISVVSYLILALLSVTISFRIYKSVIQAVQKSEEGHPFKAYLDVDITLSSEAFHNYMNAAMVHINRALKLIIRLFLVEDLVDSLKLAVFMWLMTYVGAVFNGITLLILAELLIFSVPIVYEKYKTQIDHYVGIARDQTKSIVEKIQAKLPGIAKKKAE

SEQ ID NO: 61431 - protein, 241 aa, Homo sapiens
MAEPSAATQSHSISSSSFGAEPSAPGGGGSPGACPALGTKSCSSSCAVHDLIFWRDVKKTGFVFGTTLIMLLSLAAFSVISVVSYLILALLSVTISFRIYKSVIQAVQKSEEGHPFKAYLDVDITLSSEAFHNYMNAAMVHINRALKLIIRLFLVEDLVDSLKLAVFMWLMTYVGAVFNGITLLILAELLIFSVPIVYEKYKDPSKTPWNRQKKGRISTWKPEMQQLLKHHLIVITSLLVL

SEQ ID NO: 61432 - protein, 214 aa, Homo sapiens
MAEPSAATQSHSISSSSFGAEPSAPGGGGSPGACPALGTKSCSSSCAVHDLIFWRDVKKTGFVFGTTLIMLLSLAAFSVISVVSYLILALLSVTISFRIYKSVIQAVQKSEEGHPFKPRLITMLASPEIRPSQLLKRSKQNSLESPKKRQNKYMETRNATVTKTPFNSYNVVTCTMKENTQCQLEPAFQAFFLIWCFLPSFPFNPQYQAQKLMD

SEQ ID NO: 61433 - protein, 255 aa, Homo sapiens
MAEPSAATQSHSISSSSFGAEPSAPGGGGSPGACPALGTKSCSSSCADSFVSSSSSQPVSLFSTSQVHDLIFWRDVKKTGFVFGTTLIMLLSLAAFSVISVVSYLILALLSVTISFRIYKSVIQAVQKSEEGHPFKAYLDVDITLSSEAFHNYMNAAMVHINRALKLIIRLFLVEDLVDSLKLAVFMWLMTYVGAVFNGITLLILAELLIFSVPIVYEKYKTQIDHYVGIARDQTKSIVEKIQAKLPGIAKKKAE

SEQ ID NO: 61434 - protein, 1032 aa, Homo sapiens
MAEPSAATQSHSISSSSFGAEPSAPGGGGSPGACPALGTKSCSSSCADSFVSSSSSQPVSLFSTSQEGLSSLCSDEPSSEIMTSSFLSSSEIHNTGLTILHGEKSHVLGSQPILAKEGKDHLDLLDMKKMEKPQGTSNNVSDSSVSLAAGVHCDRPSIPASFPEHPAFLSKKIGQVEEQIDKETKNPNGVSSREAKTALDADDRFTLLTAQKPPTEYSKVEGIYTYSLSPSKVSGDDVIEKDSPESPFEVIIDKAAFDKEFKDSYKESTDDFGSWSVHTDKESSEDISETNDKLFPLRNKEAGRYPMSALLSRQFSHTNAALEEVSRCVNDMHNFTNEILTWDLVPQVKQQTDKSSDCITKTTGLDMSEYNSEIPVVNLKTSTHQKTPVCSIDGSTPITKSTGDWAEASLQQENAITGKPVPDSLNSTKEFSIKGVQGNMQKQDDTLAELPGSPPEKCDSLGSGVATVKVVLPDDHLKDEMDWQSSALGEITEADSSGESDDTVIEDITADTSFENNKIQAEKPVSIPSAVVKTGEREIKEIPSCEREEKTSKNFEELVSDSELHQDQPDILGRSPASEAACSKVPDTNVSLEDVSEVAPEKPITTENPKLPSTVSPNVFNETEFSLNVTTSAYLESLHGKNVKHIDDSSPEDLIAAFTETRDKGIVDSERNAFKAISEKMTDFKTTPPVEVLHENESGGSEIKDIGSKYSEQSKETNGSEPLGVFPTQGTPVASLDLEQEQLTIKALKELGERQVEKSTSAQRDAELPSEEVLKQTFTFAPESWPQRSYDILERNVKNGSDLGISQKPITIRETTRVDAVSSLSKTELVKKHVLARLLTDFSVHDLIFWRDVKKTGFVFGTTLIMLLSLAAFSVISVVSYLILALLSVTISFRIYKSVIQAVQKSEEGHPFKAYLDVDITLSSEAFHNYMNAAMVHINRALKLIIRLFLVEDLVDSLKLAVFMWLMTYVGAVFNGITLLILAELLIFSVPIVYEKYKTQIDHYVGIARDQTKSIVEKIQAKLPGIAKKKAE

SEQ ID NO: 61435 - protein, 123 aa, Homo sapiens
MAEPSAATQSHSISSSSFGAEPSAPGGGGSPGACPALGTKSCSSSCAVHDLIFWRDVKKTGFVFGTTLIMLLSLAAFSVISVVSYLILALLSVTISFRIYKSVIQAVQKSEEGHPFNWLSSCG

SEQ ID NO: 61436 - protein, 236 aa, Homo sapiens
MAEPSAATQSHSISSSSFGAEPSAPGGGGSPGACPALGTKSCSSSCAVHDLIFWRDVKKTGFVFGTTLIMLLSLAAFSVISVVSYLILALLSVTISFRIYKSVIQAVQKSEEGHPFKAYLDVDITLSSEAFHNYMNAAMVHINRALKLIIRLFLVEDLVDSLKLAVFMWLMTYVGAVFNGITLLILAELLIFSVPIVYEKYKTQIDHYVGIARDQTKSIVEKIQAKLPGIAKKKAE

SEQ ID NO: 61437 - protein, 373 aa, Homo sapiens
MEDLDQSPLVSSSDSPPRPQPAFKYQFVREPEDEEEEEEEEEEDEDEDLEELEVLERKPAAGLSAAPVPTAPAAGAPLMDFGNDFVPPAPRGPLPAAPPVAPERQPSWDPSPVSSTVPAPSPLSAAAVSPSKLPEDDEPPARPPPPPPASVSPQAEPVWTPPAPAPAAPPSTPAAPKRRGSSGSVVVDLLYWRDIKKTGVVFGASLFLLLSLTVFSIVSVTAYIALALLSVTISFRIYKGVIQAIQKSDEGHPFRAYLESEVAISEELVQKYSNSALGHVNCTIKELRRLFLVDDLVDSLKFAVLMWVFTYVGALFNGLTLLILALISLFSVPVIYERHQAQIDHYLGLANKNVKDAMAKIQAKIPGLKRKAE

SEQ ID NO: 61438 - protein, 1192 aa, Homo sapiens
MEDLDQSPLVSSSDSPPRPQPAFKYQFVREPEDEEEEEEEEEEDEDEDLEELEVLERKPAAGLSAAPVPTAPAAGAPLMDFGNDFVPPAPRGPLPAAPPVAPERQPSWDPSPVSSTVPAPSPLSAAAVSPSKLPEDDEPPARPPPPPPASVSPQAEPVWTPPAPAPAAPPSTPAAPKRRGSSGSVDETLFALPAASEPVIRSSAENMDLKEQPGNTISAGQEDFPSVLLETAASLPSLSPLSAASFKEHEYLGNLSTVLPTEGTLQENVSEASKEVSEKAKTLLIDRDLTEFSELEYSEMGSSFSVSPKAESAVIVANPREEIIVKNKDEEEKLVSNNILHNQQELPTALTKLVKEDEVVSSEKAKDSFNEKRVAVEAPMREEYADFKPFERVWEVKDSKEDSDMLAAGGKIESNLESKVDKKCFADSLEQTNHEKDSESSNDDTSFPSTPEGIKDRSGAYITCAPFNPAATESIATNIFPLLGDPTSENKTDEKKIEEKKAQIVTEKNTSTKTSNPFLVAAQDSETDYVTTDNLTKVTEEVVANMPEGLTPDLVQEACESELNEVTGTKIAYETKMDLVQTSEVMQESLYPAAQLCPSFEESEATPSPVLPDIVMEAPLNSAVPSAGASVIQPSSSPLEASSVNYESIKHEPENPPPYEEAMSVSLKKVSGIKEEIKEPENINAALQETEAPYISIACDLIKETKLSAEPAPDFSDYSEMAKVEQPVPDHSELVEDSSPDSEPVDLFSDDSIPDVPQKQDETVMLVKESLTETSFESMIEYENKEKLSALPPEGGKPYLESFKLSLDNTKDTLLPDEVSTLSKKEKIPLQMEELSTAVYSNDDLFISKEAQIRETETFSDSSPIEIIDEFPTLISSKTDSFSKLAREYTDLEVSHKSEIANAPDGAGSLPCTELPHDLSLKNIQPKVEEKISFSDDFSKNGSATSKVLLLPPDVSALATQAEIESIVKPKVLVKEAEKKLPSDTEKEDRSPSAIFSAELSKTSVVDLLYWRDIKKTGVVFGASLFLLLSLTVFSIVSVTAYIALALLSVTISFRIYKGVIQAIQKSDEGHPFRAYLESEVAISEELVQKYSNSALGHVNCTIKELRRLFLVDDLVDSLKFAVLMWVFTYVGALFNGLTLLILALISLFSVPVIYERHQAQIDHYLGLANKNVKDAMAKIQAKIPGLKRKAE

SEQ ID NO: 61439 - protein, 960 aa, Homo sapiens
MEDLDQSPLVSSSDSPPRPQPAFKYQFVREPEDEEEEEEEEEEDEDEDLEELEVLERKQFSELEYSEMGSSFSVSPKAESAVIVANPREEIIVKNKDEEEKLVSNNILHNQQELPTALTKLVKEDEVVSSEKAKDSFNEKRVAVEAPMREEYADFKPFERVWEVKDSKEDSDMLAAGGKIESNLESKVDKKCFADSLEQTNHEKDSESSNDDTSFPSTPEGIKDRSGAYITCAPFNPAATESIATNIFPLLGDPTSENKTDEKKIEEKKAQIVTEKNTSTKTSNPFLVAAQDSETDYVTTDNLTKVTEEVVANMPEGLTPDLVQEACESELNEVTGTKIAYETKMDLVQTSEVMQESLYPAAQLCPSFEESEATPSPVLPDIVMEAPLNSAVPSAGASVIQPSSSPLEASSVNYESIKHEPENPPPYEEAMSVSLKKVSGIKEEIKEPENINAALQETEAPYISIACDLIKETKLSAEPAPDFSDYSEMAKVEQPVPDHSELVEDSSPDSEPVDLFSDDSIPDVPQKQDETVMLVKESLTETSFESMIEYENKEKLSALPPEGGKPYLESFKLSLDNTKDTLLPDEVSTLSKKEKIPLQMEELSTAVYSNDDLFISKEAQIRETETFSDSSPIEIIDEFPTLISSKTDSFSKLAREYTDLEVSHKSEIANAPDGAGSLPCTELPHDLSLKNIQPKVEEKISFSDDFSKNGSATSKVLLLPPDVSALATQAEIESIVKPKVLVKEAEKKLPSDTEKEDRSPSAIFSAELSKTSVVDLLYWRDIKKTGVVFGASLFLLLSLTVFSIVSVTAYIALALLSVTISFRIYKGVIQAIQKSDEGHPFRAYLESEVAISEELVQKYSNSALGHVNCTIKELRRLFLVDDLVDSLKFAVLMWVFTYVGALFNGLTLLILALISLFSVPVIYERHQAQIDHYLGLANKNVKDAMAKIQAKIPGLKRKAE

SEQ ID NO: 61440 - protein, 986 aa, Homo sapiens
MDLKEQPGNTISAGQEDFPSVLLETAASLPSLSPLSAASFKEHEYLGNLSTVLPTEGTLQENVSEASKEVSEKAKTLLIDRDLTEFSELEYSEMGSSFSVSPKAESAVIVANPREEIIVKNKDEEEKLVSNNILHNQQELPTALTKLVKEDEVVSSEKAKDSFNEKRVAVEAPMREEYADFKPFERVWEVKDSKEDSDMLAAGGKIESNLESKVDKKCFADSLEQTNHEKDSESSNDDTSFPSTPEGIKDRSGAYITCAPFNPAATESIATNIFPLLGDPTSENKTDEKKIEEKKAQIVTEKNTSTKTSNPFLVAAQDSETDYVTTDNLTKVTEEVVANMPEGLTPDLVQEACESELNEVTGTKIAYETKMDLVQTSEVMQESLYPAAQLCPSFEESEATPSPVLPDIVMEAPLNSAVPSAGASVIQPSSSPLEASSVNYESIKHEPENPPPYEEAMSVSLKKVSGIKEEIKEPENINAALQETEAPYISIACDLIKETKLSAEPAPDFSDYSEMAKVEQPVPDHSELVEDSSPDSEPVDLFSDDSIPDVPQKQDETVMLVKESLTETSFESMIEYENKEKLSALPPEGGKPYLESFKLSLDNTKDTLLPDEVSTLSKKEKIPLQMEELSTAVYSNDDLFISKEAQIRETETFSDSSPIEIIDEFPTLISSKTDSFSKLAREYTDLEVSHKSEIANAPDGAGSLPCTELPHDLSLKNIQPKVEEKISFSDDFSKNGSATSKVLLLPPDVSALATQAEIESIVKPKVLVKEAEKKLPSDTEKEDRSPSAIFSAELSKTSVVDLLYWRDIKKTGVVFGASLFLLLSLTVFSIVSVTAYIALALLSVTISFRIYKGVIQAIQKSDEGHPFRAYLESEVAISEELVQKYSNSALGHVNCTIKELRRLFLVDDLVDSLKFAVLMWVFTYVGALFNGLTLLILALISLFSVPVIYERHQAQIDHYLGLANKNVKDAMAKIQAKIPGLKRKAE

SEQ ID NO: 61441 - protein, 392 aa, Homo sapiens
MEDLDQSPLVSSSDSPPRPQPAFKYQFVREPEDEEEEEEEEEEDEDEDLEELEVLERKPAAGLSAAPVPTAPAAGAPLMDFGNDFVPPAPRGPLPAAPPVAPERQPSWDPSPVSSTVPAPSPLSAAAVSPSKLPEDDEPPARPPPPPPASVSPQAEPVWTPPAPAPAAPPSTPAAPKRRGSSGSVDETLFALPAASEPVIRSSAVVDLLYWRDIKKTGVVFGASLFLLLSLTVFSIVSVTAYIALALLSVTISFRIYKGVIQAIQKSDEGHPFRAYLESEVAISEELVQKYSNSALGHVNCTIKELRRLFLVDDLVDSLKFAVLMWVFTYVGALFNGLTLLILALISLFSVPVIYERHQAQIDHYLGLANKNVKDAMAKIQAKIPGLKRKAE

SEQ ID NO: 61442 - protein, 199 aa, Homo sapiens
MDGQKKNWKDKVVDLLYWRDIKKTGVVFGASLFLLLSLTVFSIVSVTAYIALALLSVTISFRIYKGVIQAIQKSDEGHPFRAYLESEVAISEELVQKYSNSALGHVNCTIKELRRLFLVDDLVDSLKFAVLMWVFTYVGALFNGLTLLILALISLFSVPVIYERHQAQIDHYLGLANKNVKDAMAKIQAKIPGLKRKAE

SEQ ID NO: 61443 - protein, 986 aa, Homo sapiens; identical to SEQ ID NO: 61440

SEQ ID NO: 61444 - protein, 345 aa, Homo sapiens [sequence omitted]

SEQ ID NO: 61445 - protein, 986 aa, Homo sapiens; identical to SEQ ID NO: 61440

SEQ ID NO: 61446 - protein, 986 aa, Homo sapiens; identical to SEQ ID NO: 61440

SEQ ID NO: 61447 - protein, 91 aa, Homo sapiens
MDLKEQPGNTISAGQEDFPSVLLETAASLPSLSPLSAASFKEHEYLGNLSTVLPTEGTLQENVSEASKEVSEKAKTLLIDRDLTEFSELEY

SEQ ID NO: 61448 - protein, 396 aa, Homo sapiens
MEFLKTCVLRRNACTAVCFWRSKVVQKPSVRRISTTSPRSTVMPAWVIDKYGKNEVLRFTQNMMMPIIHYPNEVIVKVHAASVNPIDVNMRSGYGATALNMKRDPLHVKIKGEEFPLTLGRDVSGVVMECGLDVKYFKPGDEVWAAVPPWKQGTLSEFVVVSGNEVSHKPKSLTHTQAASLPYVALTAWSAINKVGGLNDKNCTGKRVLILGASGGVGTFAIQVMKAWDAHVTAVCSQDASELVRKLGADDVIDYKSGSVEEQLKSLKPFDFILDNVGGSTETWAPDFLKKWSGATYVTLVTPFLLNMDRLGIADGMLQTGVTVGSKALKHFWKGVHYRWAFFMASGPCLDDIAELVDAGKIRPVIEQTFPFSKVPEAFLKVERGHARGKTVINVV

SEQ ID NO: 61449 - protein, 226 aa, Homo sapiens
MEFLKTCVLRRNACTAVCFWRSKVVQKPSVRRISTTSPRSTVMPAWVIDKYGKNEVLRFTQNMMMPIIHYPNEVIVKVHAASVNPIDVNMRSGYGATALNMKRDPLHVKIKGEEFPLTLGRDVSGVVMECGLDVKYFKPGDEVWAAVPPWKQGTLSEFVVVSGNEVSHKPKSLTHTQAASLPYVALTAWSAINKVGGLNDKNCTGKRISGKESIIAGHFSWPVAHV

SEQ ID NO: 61450 - protein, 473 aa, Homo sapiens
MKRASAGGSRLLAWVLWLQAWQVAAPCPGACVCYNEPKVTTSCPQQGLQAVPVGIPAASQRIFLHGNRISHVPAASFRACRNLTILWLHSNVLARIDAAAFTGLALLEQLDLSDNAQLRSVDPATFHGLGRLHTLHLDRCGLQELGPGLFRGLAALQYLYLQDNALQALPDDTFRDLGNLTHLFLHGNRISSVPERAFRGLHSLDRLLLHQNRVAHVHPHAFRDLGRLMTLYLFANNLSALPTEALAPLRALQYLRLNDNPWVCDCRARPLWAWLQKFRGSSSEVPCSLPQRLAGRDLKRLAANDLQGCAVATGPYHPIWTGRATDEEPLGLPKCCQPDAADKASVLEPGRPASAGNALKGRVPPGDSPPGNGSGPRHINDSPFGTLPGSAEPPLTAVRPEGSEPPGFPTSGPRRRPGCSRKNRTRSHCRLGQAGSGGGGTGDSEGSGALPSLTCSLTPLGLALVLWTVLGPC

SEQ ID NO: 61451 - protein, 346 aa, Homo sapiens
MHLPGCAPAMADGSFSLAGHLLRSPGGSTSRLHSIEAILGFTKDDGILGTFPAERGARGAKERDRRLGARPACPKAPEEGSEPSPPPAPAPAPEYEAPRPYCPKEPGEARPSPGLPVGPATGEAKLSEEEQPKKKHRRNRTTFTTYQLHELERAFEKSHYPDVYSREELAGKVNLPEVRVQVWFQNRRAKWRRQEKLEVSSMKLQDSPLLSFSRSPPSATLSPLGAGPGSGGGPAGGALPLESWLGPPLPGGGATALQSLPGFGPPAQSLPASYTPPPPPPPFLNSPPLGPGLQPLAPPPPSYPCGPGFGDKFPLDEADPRNSSIAALRLKAKEHIQAIGKPWQAL

SEQ ID NO: 61452 - protein, 74 aa, Homo sapiens
MHLPGCAPAMADGSFSLAGHLLRSPGGSTSRLHSIEAILGFTKDDGILGTFPAERGARGAKERDRRLGARPACP

SEQ ID NO: 61453 - protein, 195 aa, Homo sapiens
MSLISWLRWNEAPSRLSTRSPAEMVLETLMMELTGQMREAERQQRERSNAVRKVCTGVDYSWLASTPRSTYDLSPIERLQLEDVCVKIHPSYCGPAILRFRQLLAEQEPEVQEVSQLFRSVLQEVLERMKQEEEAHKLTRQWSLRPRGSLATFKTRARISPFASDIRTISEDVERDTPPPLRSWSMPEFRAPKAD

SEQ ID NO: 61454 - protein, 253 aa, Homo sapiens
MAETSALPTGFGELEVLAVGMVLLVEALSGLSLNTLTIFSFCKTPELRTPCHLLVLSLALADSGISLNALVAATSSLLRRWPYGSDGCQAHGFQGFVTALASICSSAAIAWGRYHHYCTRSQLAWNSAVSLVLFVWLSSAFWAALPLLGWGHYDYEPLGTCCTLDYSKGDRNFTSFLFTMSFFNFAMPLFITITSYSLMEQKLGKSGHLQVPALIAKMVPTINAINYALGNEMVCRGIWQCLSPQKREKDRTK

SEQ ID NO: 61455 - protein, 295 aa, Homo sapiens
MAETSALPTGFGELEVLAVGMVLLVEALSGLSLNTLTIFSFCKTPELRTPCHLLVLSLALADSGISLNALVAATSSLLRVSHRRWPYGSDGCQAHGFQGFVTALASICSSAAIAWGRYHHYCTRSQLAWNSAVSLVLFVWLSSAFWAALPLLGWGHYDYEPLGTCCTLDYSKGDRNFTSFLFTMSFFNFAMPLFITITSYSLMEQKLGKSGHLQVNTTLPARTLLLGWGPYAILYLYAVIADVTSISPKLQMVPALIAKMVPTINAINYALGNEMVCRGIWQCLSPQKREKDRTK

SEQ ID NO: 61456 - protein, 120 aa, Homo sapiens
MAETSALPTGFGELEVLAVGMVLLVEDPGAADSLPPTGAELGSCGQWDQPECPRCSHIQPSPCLPQALALRLGRLPGSRLPGLCDSVGQHLQQCSHRMGALSPLLHPPKCCHRSHHFEWR

SEQ ID NO: 61457 - protein, 351 aa, Homo sapiens
MAPVLPLVLPLQPRIRLAQGLWLLSWLLALAGGVILLCSGHLLVQLRHLGTFLAPSCQFPVLPQAALAAGAVALGTGLVGVGASRASLNAALYPPWRGVLGPLLVAGTAGGGGLLVVGLGLALALPGSLDEALEEGLVTALAHYKDTEVPGHCQAKRLVDELQLRYHCCGRHGYKDWFGVQWVSSRYLDPGDRDVADRIQSNVEGLYLTDGVPFSCCNPHSPRPCLQNRLSDSYAHPLFDPRQPNQNLWAQGCHEVLLEHLQDLAGTLGSMLAVTFLLQALVLLGLRYLQTALEGLGGVIDAGGETQGYLFPSGLKDMLKTAWLQGGVACRPAPEEAPPGEAPPKEDLSEA

SEQ ID NO: 61458 - protein, 533 aa, Homo sapiens
MSIQVEHPAGGYKKLFETVEELSSPLTAHVTGRIPLWLTGSLLRCGPGLFEVGSEPFYHLFDGQALLHKFDFKEGHVTYHRRFIRTDAYVRAMTEKRIVITEFGTCAFPDPCKNIFSRFFSYFRGVEVTDNALVNVYPVGEDYYACTETNFITKINPETLETIKQVDLCNYVSVNGATAHPHIENDGTVYNIGNCFGKNFSIAYNIVKIPPLQADKEDPISKSEIVVQFPCSDRFKPSYVHSFGLTPNYIVFVETPVKINLFKFLSSWSLWGANYMDCFESNETMGVWLHIADKKRKKYLNNKYRTSPFNLFHHINTYEDNGFLIVDLCCWKGFEFVYNYLYLANLRENWEEVKKNARKAPQPEVRRYVLPLNIDKADTGKNLVTLPNTTATAILCSDETIWLEPEVLFSGPRQAFEFPQINYQKYCGKPYTYAYGLGLNHFVPDRLCKLNVKTKETWVWQEPDSYPSEPIFVSHPDALEEDDGVVLSVVVSPGAGQKPAYLLILNAKDLSEVARAEVEINIPVTFHGLFKKS

SEQ ID NO: 61459 - protein, 317 aa, Homo sapiens
MSEGVGTFRMVPEEEQELRAQLEQLTTKDHGPVFGPCSQLPRHTLQKAKDELNEREETREEAVRELQEMVQAQAASGEELAVAVAERVQEKDSGFFLRFIRARKFNVGRAYELLRGYVNFRLQYPELFDSLSPEAVRCTIEAGYPGVLSSRDKYGRVVMLFNIENWQSQEITFDEILQAYCFILEKLLENEETQINGFCIIENFKGFTMQQAASLRTSDLRKMVDMLQDSFPARFKAIHFIHQPWYFTTTYNVVKPFLKSKLLERVFVHGDDLSGFYQEIDENILPSDFGGTLPKYDGKAVAEQLFGPQAQAENTAF

SEQ ID NO: 61460 - protein, 2156 aa, Homo sapiens
MSDTPSTGFSIIHPTSSEGQVPPPRHLSLTHPVVAKRISFYKSGDPQFGGVRVVVNPRSFKSFDALLDNLSRKVPLPFGVRNISTPRGRHSITRLEELEDGESYLCSHGRKVQPVDLDKARRRPRPWLSSRAISAHSPPHPVAVAAPGMPRPPRSLVVFRNGDPKTRRAVLLSRRVTQSFEAFLQHLTEVMQRPVVKLYATDGRRVPSLQAVILSSGAVVAAGREPFKPGNYDIQKYLLPARLPGISQRVYPKGNAKSESRKISTHMSSSSRSQIYSVSSEKTHNNDCYLDYSFVPEKYLALEKNDSQNLPIYPSEDDIEKSIIFNQDGTMTVEMKVRFRIKEEETIKWTTTVSKTGPSNNDEKSEMSFPGRTESRSSGLKLAACSFSADVSPMERSSNQEGSLAEEINIQMTDQVAETCSSASWENATVDTDIIQGTQDQAKHRFYRPPTPGLRRVRQKKSVIGSVTLVSETEVQEKMIGQFSYSEERESGENKSEYHMFTHSCSKMSSVSNKPVLVQINNNDQMEESSLERKKENSLLKSSAISAGVIEITSQKMLEMSHNNGLPSTISNNSIVEEDVVDCVVLDNKTGIKNFKTYGNTNDRFSPISADATHFSSNNSGTDKNISEAPASEASSTVTARIDRLINEFAQCGLTKLPKNEKKILSSVASKKKKKSRQQAINSRYQDGQLATKGILNKNERINTKGRITKEMIVQDSDSPLKGGILCEEDLQKSDTVIESNTFCSKSNLNSTISKNFHRNKLNTTQNSKVQGLLTKRKSRSLNKISLGAPKKREIGQRDKVFPHNESKYCKSTFENKSLFHVFNILEQKPKDFYAPQSQAEVASGYLRGMAKKSLVSKVTDSHITLKSQKKRKGDKVKASAILSKQHATTRANSLASLKKPDFPEAIAHHSIQNYIQSWLQNINPYPTLKPIKSAPVCRNETSVVNCSNNSFSGNDPHTNSGKISNFVMESNKHITKIAGLTGDNLCKEGDKSFIANDTGEEDLHETQVGSLNDAYLVPLHEHCTLSQSAINDHNTKSHIAAEKSGPEKKLVYQEINLARKRQSVEAAIQVDPIEEETPKDLLPVLMLHQLQASVPGIHKTQNGVVQMPGSLAGVPFHSAICNSSTNLLLAWLLVLNLKGSMNSFCQVDAHKATNKSSETLALLEILKHIAITEEADDLKAAVANLVESTTSHFGLSEKEQDMVPIDLSANCSTVNIQSVPKCSENERTQGISSLDGGCSASEACAPEVCVLEVTCSPCEMCTVNKAYSPKETCNPSDTFFPSDGYGVDQTSMNKACFLGEVCSLTDTVFSDKACAQKENHTYEGACPIDETYVPVNVCNTIDFLNSKENTYTDNLDSTEELERGDDIQKDLNILTDPEYKNGFNTLVSHQNVSNLSSCGLCLSEKEAELDKKHSSLDDFENCSLRKFQDENAYTSFDMEEPRTSEEPGSITNSMTSSERNISELESFEELENHDTDIFNTVVNGGEQATEELIQEEVEASKTLELIDISSKNIMEEKRMNGIIYEIISKRLATPPSLDFCYDSKQNSEKETNEGETKMVKMMVKTMETGSYSESSPDLKKCIKSPVTSDWSDYRPDSDSEQPYKTSSDDPNDSGELTQEKEYNIGFVKRAIEKLYGKADIIKPSFFPGSTRKSQVCPYNSVEFQCSRKASLYDSEGQSFGSSEQVSSSSSMLQEFQEERQDKCDVSAVRDNYCRGDIVEPGTKQNDDSRILTDIEEGVLIDKGKWLLKENHLLRMSSENPGMCGNADTTSVDTLLDNNSSEVPYSHFGNLAPGPTMDELSSSELEELTQPLELKCNYFNMPHGSDSEPFHEDLLDVRNETCAKERIANHHTEEKGSHQSERVCTSVTHSFISAGNKVYPVSDDAIKNQPLPGSNMIHGTLQEADSLDKLYALCGQHCPILTVIIQPMNEEDRGFAYRKESDIENFLGFYLWMKIHPYLLQTDKNVFREENNKASMRQNLIDNAIGDIFDQFYFSNTFDLMGKRRKQKRINFLGLEEEGNLKKFQPDLKERFCMNFLHTSLLVVGNVDSNTQDLSGQTNEIFKAVDENNNLLNNRFQGSRTNLNQVVRENINCHYFFEMLGQACLLDICQVETSLNISNRNILELCMFEGENLFIWEEEDILNLTDLESSREQEDL

SEQ ID NO: 61461 - protein, 916 aa, Homo sapiens
MQRPVVKLYATDGRRVPSLQAVILSSGAVVAAGREPFKPGNYDIQKYLLPARLPGISQRVYPKGNAKSESRKSSNWKVFIITSDLPDAGTSSQIYIILYGQHRSSAPIYLYGTDGARFQVGHEDIFTITVGDIGALFKIRIGHTNSGSSPSWHCKEIQLHNMNSGKQFYVPVQRWLARDQEDGEICREFPLLSKGQPVLPVTIYEVNVATGELWNAGTVANVYISIHGEKGDTGSRQLFRSKSSFNFLRGQTDTFFLEAVHLGDLCKIVIGHDGLGPGNGWFLDDVVIKDPTTNYEYAFFCHRWLDQGEDDCKIVRELYARDNSIFSARQKLELKRKETWTAESWKFTKGNTLQFYNKLTGGFVRLHPDGTVDAIGEKTDKYGVFDVIFNKRNICIFQSHEMRHLSLALDNGIVTGMVSGEATTELRVLYQPNRCALLESALVPGHTVVFDRHGKIADASSAGYANLSKEFVIFVKGVFLNSAVVLLATSLCQALCLQPDGSCTGVGSQSEKSYWKVHKISSGICMFESVKNAQMYLRIKDGRCDGTGTGDVDCHFKIKKNLKNASISLESTKSPGLFVGLQSDGQAKPMIYTKDENVCFYPQVIQFGRENPMGMSATPSQEEEKIHESKKQKKIPPESEARSPLPSSTAKEIRHFQSSETLLSEDEWKVLVLTGNTGTQANVTLWVYGDKGVTGPISLRKDSSEQLFLPGHEDEFQVEIRNTGNIYKIRIGHDGTSEQPEWNLQRVTMQHMKSKKILDFAANVWLSRIQADGDVVCELPVVKGGQAIFPLVRYQVDVYTGQLKHAETESEVFLCLFGERGDSGLRQLYKSNMQVKFQRGQIDKFQVAAVSLGKLQKVLLRCEASDKSQYWYCEQVIVREPGTTSESIFTCQRWLPFMSQGIIHSEIELYLQGEDY

SEQ ID NO: 61462 - protein, 2400 aa, Homo sapiens
MNSTPRNAQAPSHRECFLPSVARTPSVTKVTPAKKITFLKRGDPRFAGVRLAVHQRAFKTFSALMDELSQRVPLSFGVRSVTTPRGLHSLSALEQLEDGGCYLCSDKKPPKTPSGPGRPQERNPTAQQLRDVEGQREAPGTSSSRKSLKTPRRILLIKNMDPRLQQTVVLSHRNTRNLAAFLGKASDLLRFPVKQLYTTSGKKVDSLQALLHSPSVLVCAGHEAFRTPAMKNARRSEAETLSGLTSRNKNGSWGPKTKPSVIHSRSPPGSTPRLPERPGPSNPPVGPAPGRHPQDTPAQSGPLVAGDDMKKKVRMNEDGSLSVEMKVRFHLVGEDTLLWSRRMGRASALTAASGEDPVLGEVDPLCCVWEGYPWGFSEPGVWGPRPCRVGCREVFGRGGQPGPKYEIWTNPLHASQGERVAARKRWGLAQHVRCSGLWGHGTAGRERCSQDSASPASSTGLPEGSEPESSCCPRTPEDGVDSASPSAQIGAERKAGGSLGEDPGLCIDGAGLGGPEQGGRLTPRARSEEGASSDSSASTGSHEGSSEWGGRPQGCPGKARAETSQQEASEGGDPASPALSLSSLRSDDLQAETQGQGTEQATGAAVTREPLVLGLSCSWDSEGASSTPSTCTSSQQGQRRHRSRASAMSSPSSPGLGRVAPRGHPRHSHYRKDTHSPLDSSVTKQVPRPPERRRACQDGSVPRYSGSSSSTRTQASGNLRPPSSGSLPSQDLLGTSSATVTPAVHSDFVSGVSPHNAPSAGWAGDAGSRTCSPAPIPPHTSDSCSKSGAASLGEEARDTPQPSSPLVLQVGRPEQGAVGPHRSHCCSQPGTQPAQEAQRGPSPEASWLCGRYCPTPPRGRPCPQRRSSSCGSTGSSHQSTARGPGGSPQEGTRQPGPTPSPGPNSGASRRSSASQGAGSRGLSEEKTLRSGGGPQGQEEASGVSPSSLPRSSPEAVVREWLDNIPEEPILMTYELADETTGAAGGGLRGPEVDPGDDHSLEGLGEPAQAGQQSLEGDPGQDPEPEGALLGSSDTGPQSGEGVPQGAAPEGVSEAPAEAGADREAPAGCRVSLRALPGRVSASTQIMRALMGSKQGRPSSVPEVSRPMARRLSCSAGALITCLASLQLFEEDLGSPASKVRFKDSPRYQELLSISKDLWPGCDVGEDQLDSGLWELTWSQALPDLGSHAMTENFTPTSSSGVDISSGSGGSGESSVPCAMDGTLVTQGTELPLKTSNQRPDSRTYESPGDLENQQQCCFPTFLNARACACATNEDEAERDSEEQRASSNLEQLAENTVQEEVQLEETKEGTEGEGLQEEAVQLEETKTEEGLQEEGVQLEETKETEGEGQQEEEAQLEEIEETGGEGLQEEGVQLEEVKEGPEGGLQGEALEEGLKEEGLPEEGSVHGQELSEASSPDGKGSQEDDPVQEEEAGRASASAEPCPAEGTEEPTEPPSHLSETDPSASERQSGSQLEPGLEKPPGATMMGQEHTQAQPTQGAAERSSSVACSAALDCDPIWVSVLLKKTEKAFLAHLASAVAELRARWGLQDNDLLDQMAAELQQDVAQRLQDSTKRELQKLQGRAGRMVLEPPREALTGELLLQTQQRRHRLRGLRNLSAFSERTLGLGPLSFTLEDEPALSTALGSQLGEEAEGEEFCPCEACVRKKVSPMSPKATMGATRGPIKEAFDLQQILQRKRGEHTDGEAAEVAPGKTHTDPTSTRTVQGAEGGLGPGLSQGPGVDEGEDGEGSQRLNRDKDPKLGEAEGDAMAQEREGKTHNSETSAGSELGEAEQEGEGISERGETGGQGSGHEDNLQGEAAAGGDQDPGQSDGAEGIEAPEAEGEAQPESEGVEAPEAEGDAQEAEGEAQPESEDVEAPEAEGEAQPESEDVETPEAEWEVQPESEGAEAPEAEKEAQPETESVEALETEGEDEPESEGAEAQEAEEAAQEAEGQTQPESEVIESQEAEEEAQPESEDVEALEVEVETQEAEGEAQPESEDVEAPEAEGEMQEAEEEAQPESDGVEAQPKSEGEEAQEVEGETQKTEGDAQPESDGVEAPEAEEEAQEAEGEVQEAEGEAHPESEDVDAQEAEGEAQPESEGVEAPEAEGEAQKAEGIEAPETEGEAQPESEGIEAPEAEGEAQPESEGVEAQDAEGEAQPESEGIEAQEAEEEAQPELEGVEAPEAEGEAQPESEGIEAPEAEGEAQPELEGVEAPEAEEEAQPEPEGVETPEAEGEAQPESEGETQGEKKGSPQVSLGDGQSEEASESSSPVPEDRPTPPPSPGGDTPHQRPGSQTGPSSSRASSWGNCWQKDSENDHVLGDTRSPDAKSTGTPHAERKATRMYPESSTSEQEEAPLGSRTPEQGASEGYDLQEDQALGSLAPTEAVGRADGFGQDDLDF

SEQ ID NO: 61463 - protein, 350 aa, Homo sapiens
MGCFFSKRRKADKESRPENEEERPKQYSWDQREKVDPKDYMFSGLKDETVGRLPGTVAGQQFLIQDCENCNIYIFDHSATVTIDDCTNCIIFLGPVKGSVFFRNCRDCKCTLACQQFRVRDCRKLEVFLCCATQPIIESSSNIKFGCFQWYYPELAFQFKDAGLSIFNNTWSNIHDFTPVSGELNWSLLPEDAVVQDYVPIPTTEELKAVRVSTEANRSIVPISRGQRQKSSDESCLVVLFAGDYTIANARKLIDEMVGKGFFLVQTKEVSMKAEDAQRVFREKAPDFLPLLNKGPVIALEFNGDGAVEVCQLIVNEIFNGTKMFVSESKETASGDVDSFYNFADIQMGI

SEQ ID NO: 61464 - protein, 221 aa, Homo sapiens
MSSRPGREDVGAAGARRPREPPEQELQRRREQKRRRHDAQQLQQLKHLESFYEKPPPGLIKEDETKPEDCIPDVPGNEHAREFLAHAPTKGLWMPLGKEVKVMQCWRCKRYGHRTGDKECPFFIKGNQKLEQFRVAHEDPMYDIIRDNKRHEKDVRIQQLKQLLEDSTSDEDRSSSSSSEGKEKHKKKKKKEKHKKRKKEKKKKKKRKHKSSKSNEGSDSE

SEQ ID NO: 61465 - protein, 753 aa, Homo sapiens
MREPEELMPDSGAVFTFGKSKFAENNPGKFWFKNDVPVHLSCGDEHSAVVTGNNKLYMFGSNNWGQLGLGSKSAISKPTCVKALKPEKVKLAACGRNHTLVSTEGGNVYATGGNNEGQLGLGDTEERNTFHVISFFTSEHKIKQLSAGSNTSAALTEDGRLFMWGDNSEGQIGLKNVSNVCVPQQVTIGKPVSWISCGYYHSAFVTTDGELYVFGEPENGKLGLPNQLLGNHRTPQLVSEIPEKVIQVACGGEHTVVLTENAVYTFGLGQFGQLGLGTFLFETSEPKVIENIRDQTISYISCGENHTALITDIGLMYTFGDGRHGKLGLGLENFTNHFIPTLCSNFLRFIVKLERSPDSFSMRRTLPPIEGTLGLSACFLPNSVFPRCSERNLQESVLSEQDLMQPEEPDYLLDEMTKEAEIDNSSTVESLGETTDILNMTHIMSLNSNEKSLKLSPVQKQKKQQTIGELTQDTALTENDDSDEYEEMSEMKEGKACKQHVSQGIFMTQPATTIEAFSDEEVEIPEEKEGAEDSKGNGIEEQEVEANEENVKVHGGRKEKTEILSDDLTDKAEDHEFSKTEELKLEDVDEEINAENVESKKKTVGDDESVPTGYHSKTEGAERTNDDSSAETIEKKEKANLEERAICEYNENPKGYMLDDADSSSLEILENSETTPSKDMKKTKKIFLFKRVPSINQKIVKNNNEPLPEIKSIGDQIILKSDNKDADQNHMSQNHQNIPPTNTERRSKSCTIL

SEQ ID NO: 61466 - protein, 815 aa, Homo sapiens
MREPEELMPDSGAVFTFGKSKFAENNPGKFWFKNDVPVHLSCGDEHSAVVTGNNKLYMFGSNNWGQLGLGSKSAISKPTCVKALKPEKVKLAACGRNHTLVSTEGGNVYATGGNNEGQLGLGDTEERNTFHVISFFTSEHKIKQLSAGSNTSAALTEDGRLFMWGDNSEGQIGLKNVSNVCVPQQVTIGKPVSWISCGYYHSAFVTTDGELYVFGEPENGKLGLPNQLLGNHRTPQLVSEIPEKVIQVACGGEHTVVLTENAVYTFGLGQFGQLGLGTFLFETSEPKVIENIRDQTISYISCGENHTALITDIGLMYTFGDGRHGKLGLGLENFTNHFIPTLCSNFLRFIVKLVACGGCHMVVFAAPHRGVAKEIEFDEINDTCLSVATFLPYSSLTSGNVLQRTLSARMRRRERERSPDSFSMRRTLPPIEGTLGLSACFLPNSVFPRCSERNLQESVLSEQDLMQPEEPDYLLDEMTKEAEIDNSSTVESLGETTDILNMTHIMSLNSNEKSLKLSPVQKQKKQQTIGELTQDTALTENDDSDEYEEMSEMKEGKACKQHVSQGIFMTQPATTIEAFSDEEVEIPEEKEGAEDSKGNGIEEQEVEANEENVKVHGGRKEKTEILSDDLTDKAEDHEFSKTEELKLEDVDEEINAENVESKKKTVGDDESVPTGYHSKTEGAERTNDDSSAETIEKKEKANLEERAICEYNENPKGYMLDDADSSSLEILENSETTPSKDMKKTKKIFLFKRVPSINQKIVKNNNEPLPEIKSIGDQIILKSDNKDADQNHMSQNHQNIPPTNTERRSKSCTIL

SEQ ID NO: 61467 - protein, 480 aa, Homo sapiens
MREPEELMPDSGAVFTFGKSKFAENNPGKFWFKNDVPVHLSCGDEHSAVVTGNNKLYMFGSNNWGQLGLGSKSAISKPTCVKALKPEKVKLAACGRNHTLVSTEGGNVYATGGNNEGQLGLGDTEERNTFHVISFFTSEHKIKQLSAGSNTSAALTEDGRLFMWGDNSEGQIGLKNVSNVCVPQQVTIGKPVSWISCGYYHSAFVTTDGELYVFGEPENGKLGLPNQLLGNHRTPQLVSEIPEKVIQVACGGEHTVVLTENAVYTFGLGQFGQLGLGTFLFETSEPKVIENIRDQTISYISCGENHTALITDIGLMYTFGDGRHGKLGLGLENFTNHFIPTLCSNFLRFIVKLVACGGCHMVVFAAPHRGVAKEIEFDEINDTCLSVATFLPYSSLTSGNVLQRTLSARMRRRERERSPDSFSMRRTLPPIEGTLGLSACFLPNSVFPRCSERNLQESVLSEQDLMQPEEPDTHHEPEFQ

SEQ ID NO: 61468 - protein, 1020 aa, Homo sapiens
MREPEELMPDSGAVFTFGKSKFAENNPGKFWFKNDVPVHLSCGDEHSAVVTGNNKLYMFGSNNWGQLGLGSKSAISKPTCVKALKPEKVKLAACGRNHTLVSTEGGNVYATGGNNEGQLGLGDTEERNTFHVISFFTSEHKIKQLSAGSNTSAALTEDGRLFMWGDNSEGQIGLKNVSNVCVPQQVTIGKPVSWISCGYYHSAFVTTDGELYVFGEPENGKLGLPNQLLGNHRTPQLVSEIPEKVIQVACGGEHTVVLTENAVYTFGLGQFGQLGLGTFLFETSEPKVIENIRDQTISYISCGENHTALITDIGLMYTFGDGRHGKLGLGLENFTNHFIPTLCSNFLRFIVKLVACGGCHMVVFAAPHRGVAKEIEFDEINDTCLSVATFLPYSSLTSGNVLQRTLSARMRRRERERSPDSFSMRRTLPPIEGTLGLSACFLPNSVFPRCSERNLQESVLSEQDLMQPEEPDYLLDEMTKEAEIDNSSTVESLGETTDILNMTHIMSLNSNEKSLKLSPVQKQKKQQTIGELTQDTALTENDDSDEYEEMSEMKEGKACKQHVSQGIFMTQPATTIEAFSDEEVGNDTGQVGPQADTDGEGLQKEVYRHENNNGVDQLDAKEIEKESDGGHSQKESEAEEIDSEKETKLAEIAGMKDLREREKSTKKMSPFFGNLPDRGMNTESEENKDFVKKRESCKQDVIFDSERESVEKPDSYMEGASESQQGIADGFQQPEAIEFSSGEKEDDEVETDQNIRYGRKLIEQGNEKETKPIISKSMAKYDFKCDRLSEIPEEKEGAEDSKGNGIEEQEVEANEENVKVHGGRKEKTEILSDDLTDKAEDHEFSKTEELKLEDVDEEINAENVESKKKTVGDDESVPTGYHSKTEGAERTNDDSSAETIEKKEKANLEERAICEYNENPKGYMLDDADSSSLEILENSETTPSKDMKKTKKIFLFKRVPSINQKIVKNNNEPLPEIKSIGDQIILKSDNKDADQNHMSQNHQNIPPTNTERRSKSCTIL

SEQ ID NO: 61469 - protein, 646 aa, Homo sapiens
MREPEELMPDSGAVFTFGKSKFAENNPGKFWFKNDVPVHLSCGDEHSAVVTGNNKLYMFGSNNWGQLGLGSKSAISKPTCVKALKPEKVKLAACGRNHTLVSTEGGNVYATGGNNEGQLGLGDTEERNTFHVISFFTSEHKIKQLSAGSNTSAALTEDGRLFMWGDNSEGQIGLKNVSNVCVPQQVTIGKPVSWISCGYYHSAFVTTDGELYVFGEPENGKLGLPNQLLGNHRTPQLVSEIPEKVIQVACGGEHTVVLTENAVYTFGLGQFGQLGLGTFLFETSEPKVIENIRDQTISYISCGENHTALITDIGLMYTFGDGRHGKLGLGLENFTNHFIPTLCSNFLRFIVKLVACGGCHMVVFAAPHRGVAKEIEFDEINDTCLSVATFLPYSSLTSGNVLQRTLSARMRRRERERSPDSFSMRRTLPPIEGTLGLSACFLPNSVFPRCSERNLQESVLSEQDLMQPEEPDYLLDEMTKEAEIDNSSTVESLGETTDILNMTHIMSLNSNEKSLKLSPVQKQKKQQTIGELTQDTALTENDDSDEYEEMSEMKEGKACKQHVSQGIFMTQPATTIEAFSDEEVEIPEEKEGAEDSKGNGIEEQEVEANEENVKVHGGRKEKTEILSDDLTDKAEYSASHSQIVSV

SEQ ID NO: 61470 - protein, 1152 aa, Homo sapiens
MREPEELMPDSGAVFTFGKSKFAENNPGKFWFKNDVPVHLSCGDEHSAVVTGNNKLYMFGSNNWGQLGLGSKSAISKPTCVKALKPEKVKLAACGRNHTLVSTEGGNVYATGGNNEGQLGLGDTEERNTFHVISFFTSEHKIKQLSAGSNTSAALTEDGRLFMWGDNSEGQIGLKNVSNVCVPQQVTIGKPVSWISCGYYHSAFVTTDGELYVFGEPENGKLGLPNQLLGNHRTPQLVSEIPEKVIQVACGGEHTVVLTENAVYTFGLGQFGQLGLGTFLFETSEPKVIENIRDQTISYISCGENHTALITDIGLMYTFGDGRHGKLGLGLENFTNHFIPTLCSNFLRFIVKLVACGGCHMVVFAAPHRGVAKEIEFDEINDTCLSVATFLPYSSLTSGNVLQRTLSARMRRRERERSPDSFSMRRTLPPIEGTLGLSACFLPNSVFPRCSERNLQESVLSEQDLMQPEEPDYLLDEMTKEAEIDNSSTVESLGETTDILNMTHIMSLNSNEKSLKLSPVQKQKKQQTIGELTQDTALTENDDSDEYEEMSEMKEGKACKQHVSQGIFMTQPATTIEAFSDEEVEIPEEKEGAEDSKGNGIEEQEVEANEENVKVHGGRKEKTEILSDDLTDKAEVSEGKAKSVGEAEDGPEGRGDGTCEEGSSGAEHWQDEEREKGEKDKGRGEMERPGEGEKELAEKEEWKKRDGEEQEQKEREQGHQKERNQEMEEGGEEEHGEGEEEEGDREEEEEKEGEGKEEGEGEEVEGEREKEEGERKKEERAGKEEKGEEEGDQGEGEEEETEGRGEEKEEGGEVEGGEVEEGKGEREEEEEEGEGEEEEGEGEEEEGEGEEEEGEGKGEEEGEEGEGEEEGEEGEGEGEEEEGEGEGEEEGEGEGEEEEGEGEGEEEGEGEGEEEEGEGKGEEEGEEGEGEGEEEEGEGEGEDGEGEGEEEEGEWEGEEEEGEGEGEEEGEGEGEEGEGEGEEEEGEGEGEEEEGEEEGEEEGEGEEEGEGEGEEEEEGEVEGEVEGEEGEGEGEEEEGEEEGEEREKEGEGEENRRNREEEEEEEGKYQETGEEENERQDGEEYKKVSKIKGSVKYGKHKTYQKKSVTNTQGNGKEQRSKMPVQSKRLLKNGPSGSKKFWNNVLPHYLELK

SEQ ID NO: 61471 - protein, 1286 aa, Homo sapiens
MSHLVDPTSGDLPVRDIDAIPLVLPASKGKNMKTQPPLSRMNREELEDSFFRLREDHMLVKELSWKQQDEIKRLRTTLLRLTAAGRDLRVAEEAAPLSETARRGQKAGWRQRLSMHQRPQMHRLQGHFHCVGPASPRRAQPRVQVGHRQLHTAGAPVPEKPKRGPRDRLSYTAPPSFKEHATNENRGEVASKPSELVSGSNSIISFSSVISMAKPIGLCMPNSAHIMASNTMQVEEPPKSPEKMWPKDENFEQRSSLECAQKAAELRASIKEKVELIRLKKLLHERNASLVMTKAQLTEVQEACTFLLTQNQGILSAAHEALLKQVNELRAELKEESKKAVSLKSQLEDVSILQMTLKEFQERVEDLEKERKLLNDNYDKLLESMLDSSDSSSQPHWSNELIAEQLQQQVSQLQDQLDAELEDKRKVLLELSREKAQNEDLKLEVTNILQKHKQEVELLQNAATISQPPDRQSEPATHPAVLQENTQIEPSEPKNQEEKKLSQVLNELQVSHAETTLELEKTRDMLILQRKINVCYQEELEAMMTKADNDNRDHKEKLERLTRLLDLKNNRIKQLEGILRSHDLPTSEQLKDVAYGTRPLSLCLETLPAHGDEDKVDISLLHQGENLFELHIHQAFLTSAALAQAGDTQPTTFCTYSFYDFETHCTPLSVGPQPLYDFTSQYVMETDSLFLHYLQEASARLDIHQAMASEHSTLAAGWICFDRVLETVEKVHGLATLIGAGGEEFGVLEYWMRLRFPIKPSLQACNKRKKAQVYLSTDVLGGRKAQEEEFRSESWEPQNELWIEITKCCGLRSRWLGTQPSPYAVYRFFTFSDHDTAIIPASNNPYFRDQARFPVLVTSDLDHYLRREALSIHVFDDEDLEPGSYLGRARVPLLPLAKNESIKGDFNLTDPAEKPNGSIQVQLDWKFPYIPPESFLKPEAQTKGKDTKDSSKISSEEEKASFPSQDQMASPEVPIEAGQYRSKRKPPHGGERKEKEHQVVSYSRRKHGKRIGVQGKNRMEYLSLNILNGNTPEQVNYTEWKFSETNSFIGDGFKNQHEEEEMTLSHSALKQKEPLHPVNDKESSEQGSEVSEAQTTDSDDVIVPPMSQKYPKADSEKMCIEIVSLAFYPEAEVMSDENIKQVYVEYKFYDLPLSETETPVSLRKPRAGEEIHFHFSKVIDLDPQEQQGRRRFLFDMLNGQDPDQGHLKFTVVSDPLDEEKKECEEVGYAYLQLWQILESGRDILEQELDIVSPEDLATPIGRLKVSLQAAAVLHAIYKEMTEDLFS

SEQ ID NO: 61472 - protein, 645 aa, Homo sapiens
MLLMAPDRCRYVWKHCQPMEMRIKWIFLCCIRPLYDFTSQYVMETDSLFLHYLQEASARLDIHQAMASEHSTLAAGWICFDRVLETVEKVHGLATLIGAGGEEFGVLEYWMRLRFPIKPSLQACNKRKKAQVYLSTDVLGGRKAQEEEFRSESWEPQNELWIEITKCCGLRSRWLGTQPSPYAVYRFFTFSDHDTAIIPASNNPYFRDQARFPVLVTSDLDHYLRREALSIHVFDDEDLEPGSYLGRARVPLLPLAKNESIKGDFNLTDPAEKPNGSIQVQLDWKFPYIPPESFLKPEAQTKGKDTKDSSKISSEEEKASFPSQDQMASPEVPIEAGQYRSKRKPPHGGERKEKEHQVVSYSRRKHGKRIGVQGKNRMEYLSLNILNGNTPEQVNYTEWKFSETNSFIGDGFKNQHEEEEMTLSHSALKQKEPLHPVNDKESSEQGSEVSEAQTTDSDDVIVPPMSQKYPKADSEKMCIEIVSLAFYPEAEVMSDENIKQVYVEYKFYDLPLSETETPVSLRKPRAGEEIHFHFSKVIDLDPQEQQGRRRFLFDMLNGQDPDQGHLKFTVVSDPLDEEKKECEEVGYAYLQLWQILESGRDILEQELDIVSPEDLATPIGRLKVSLQAAAVLHAIYKEMTEDLFS

SEQ ID NO: 61473 - protein, 612 aa, Homo sapiens
MLKLDNKDVISHPLGYPSESLLSIASMLDSSDSSSQPHWSNELIAEQLQQQVSQLQDQLDAELEDKRKVLLELSREKAQNEDLKLEVTNILQKHKQEVELLQNAATISQPPDRQSEPATHPAVLQENTQIEPSEPKNQEEKKLSQVLNELQVSHAETTLELEKTRDMLILQRKINVCYQEELEAMMTKADNDNRDHKEKLERLTRLLDLKNNRIKQLEGILRSHDLPTSGDFNLTDPAEKPNGSIQVQLDWKFPYIPPESFLKPEAQTKGKDTKDSSKISSEEEKASFPSQDQMASPEVPIEAGQYRSKRKPPHGGERKEKEHQVVSYSRRKHGKRIGVQGKNRMEYLSLNILNGNTPEQVNYTEWKFSETNSFIGDGFKNQHEEEEMTLSHSALKQKEPLHPVNDKESSEQGSEVSEAQTTDSDDVIVPPMSQKYPKADSEKMCIEIVSLAFYPEAEVMSDENIKQVYVEYKFYDLPLSETETPVSLRKPRAGEEIHFHFSKVIDLDPQEQQGRRRFLFDMLNGQDPDQGHLKFTVVSDPLDEEKKECEEVGYAYLQLWQILESGRDILEQELDIVSPEDLATPIGRLKVSLQAAAVLHAIYKEMTEDLFS

SEQ ID NO: 61474 - protein, 1286 aa, Homo sapiens
MSHLVDPTSGDLPVRDIDAIPLVLPASKGKNMKTQPPLSRMNREELEDSFFRLREDHMLVKELSWKQQDEIKRLRTTLLRLTAAGRDLRVAEEAAPLSETARRGQKAGWRQRLSMHQRPQMHRLQGHFHCVGPASPRRAQPRVQVGHRQLHTAGAPVPEKPKRGPRDRLSYTAPPSFKEHATNENRGEVASKPSELVSGSNSIISFSSVISMAKPIGLCMPNSAHIMASNTMQVEEPPKSPEKMWPKDENFEQRSSLECAQKAAELRASIKEKVELIRLKKLLHERNASLVMTKAQLTEVQEAYETLLQKNQGILSAAHEALLKQVNELRAELKEESKKAVSLKSQLEDVSILQMTLKEFQERVEDLEKERKLLNDNYDKLLESMLDSSDSSSQPHWSNELIAEQLQQQVSQLQDQLDAELEDKRKVLLELSREKAQNEDLKLEVTNILQKHKQEVELLQNAATISQPPDRQSEPATHPAVLQENTQIEPSEPKNQEEKKLSQVLNELQVSHAETTLELEKTRDMLILQRKINVCYQEELEAMMTKADNDNRDHKEKLERLTRLLDLKNNRIKQLEGILRSHDLPTSEQLKDVAYGTRPLSLCLETLPAHGDEDKVDISLLHQGENLFELHIHQAFLTSAALAQAGDTQPTTFCTYSFYDFETHCTPLSVGPQPLYDFTSQYVMETDSLFLHYLQEASARLDIHQAMASEHSTLAAGWICFDRVLETVEKVHGLATLIGAGGEEFGVLEYWMRLRFPIKPSLQACNKRKKAQVYLSTDVLGGRKAQEEEFRSESWEPQNELWIEITKCCGLRSRWLGTQPSPYAVYRFFTFSDHDTAIIPASNNPYFRDQARFPVLVTSDLDHYLRREALSIHVFDDEDLEPGSYLGRARVPLLPLAKNESIKGDFNLTDPAEKPNGSIQVQLDWKFPYIPPESFLKPEAQTKGKDTKDSSKISSEEEKASFPSQDQMASPEVPIEAGQYRSKRKPPHGGERKEKEHQVVSYSRRKHGKRIGVQGKNRMEYLSLNILNGNTPEQVNYTEWKFSETNSFIGDGFKNQHEEEEMTLSHSALKQKEPLHPVNDKESSEQGSEVSEAQTTDSDDVIVPPMSQKYPKADSEKMCIEIVSLAFYPEAEVMSDENIKQVYVEYKFYDLPLSETETPVSLRKPRAGEEIHFHFSKVIDLDPQEQQGRRRFLFDMLNGQDPDQGHLKFTVVSDPLDEEKKECEEVGYAYLQLWQILESGRDILEQELDIVSPEDLATPIGRLKVSLQAAAVLHAIYKEMTEDLFS

SEQ ID NO: 61475 - protein, 538 aa, Homo sapiens
MNLELLESFGQNYPEEADGTLDCISMALTCTFNRWGTLLAVGCNDGRIVIWDFLTRGIAKIISAHIHPVCSLCWSRDGHKLVSASTDNIVSQWDVLSGDCDQRFRFPSPILKVQYHPRDQNKVLVCPMKSAPVMLTLSDSKHVVLPVDDDSDLNVVASFDRRGEYIYTGNAKGKILVLKTDSQDLVASFRVTTGTSNTTAIKSIEFARKGSCFLINTADRIIRVYDGREILTCGRDGEPEPMQKLQDLVNRTPWKKCCFSGDGEYIVAGSARQHALYIWEKSIGNLVKILHGTRGELLLDVAWHPVRPIIASISSGVVSIWAQNQVENWSAFAPDFKELDENVEYEERESEFDIEDEDKSEPEQTGADAAEDEEVDVTSVDPIAAFCSSDEELEDSKALLYLPIAPEVEDPEENPYGPPPDAVQTSLMDEGASSEKKRQSSADGSQPPKKKPKTTNIELQGVPNDEVHPLLGVKGDGKSKKKQAGRPKGSKGKEKDSPFKPKLYKGDRGLPLEGSAKGKVQAELSQPLTAGGAISELL

SEQ ID NO: 61476 - protein, 500 aa, Homo sapiens
MNLELLESFGQNYPEEADGTLDCISMALTCTFNRWGTLLAVGCNDGRIVIWDFLTRGIAKIISAHIHPVCSLCWSRDGHKLVSASTDNIVSQWDVLSGDCDQRFRFPSPILKVQYHPRDQNKVLVCPMKSAPVMLTLSDSKHVVLPVDDDSDLNVVASFDRRGEYIYTGNAKGKILVLKTDSQDLVASFRVTTGTSNTTAIKSIEFARKGSCFLINTADRIIRVYDGREILTCGRDGEPEPMQKLQDLVNRTPWKKCCFSGDGEYIVAGSARQHALYIWEKSIGNLVKILHGTRGELLLDVAWHPVRPIIASISSGVVSIWAQNQVENWSAFAPDFKELDENVEYEERESEFDIEDEDKSEPEQTGADAAEDEEVDVTSVDPIAAFCSSDEELEDSKALLYLPIAPEVEDPEENPYGPPPDAVQTSLMDEGASSEKKRQSSADGSQPPKKKPKTTNIELQGVPNDEVHPLLGVKGDGKSKKKQAGRPKGSKAGGAISELL

SEQ ID NO: 61477 - protein, 1792 aa, Homo sapiens
MSCVHYKFSSKLNYDTVTFDGLHISLCDLKKQIMGREKLKAADCDLQITNAQTKEEYTDDNALIPKNSSVIVRRIPIGGVKSTSKTYVISRTEPAMATTKAIDDSSASISLAQLTKTANLAEANASEEDKIKAMMSQSGHEYDPINYMKKPLGPPPPSYTCFRCGKPGHYIKNCPTNGDKNFESGPRIKKSTGIPRSFMMEVKDPNMKGAMLTNTGKYAIPTIDAEAYAIGKKEKPPFLPEEPSSSSEEDDPIPDELLCLICKDIMTDAVVIPCCGNSYCDECIRTALLESDEHTCPTCHQNDVSPDALIANKFLRQAVNNFKNETGYTKRLRKQLPPPPPPIPPPRPLIQRNLQPLMRSPISRQQDPLMIPVTSSSTHPAPSISSLTSNQSSLAPPVSGNPSSAPAPVPDITATVSISVHSEKSDGPFRDSDNKILPAAALASEHSKGTSSIAITALMEEKGYQVPVLGTPSLLGQSLLHGQLIPTTGPVRINTARPGGGRPGWEHSNKLGYLVSPPQQIRRGERSCYRSINRGRHHSERSQRTQGPSLPATPVFVPVPPPPLYPPPPHTLPLPPGVPPPQFSPQFPPGQPPPAGYSVPPPGFPPAPANLSTPWVSSGVQTAHSNTIPTTQAPPLSREEFYREQRRLKEEEKKKSKLDEFTNDFAKELMEYKKIQKERRRSFSRSKSPYSGSSYSRSSYTYSKSRSGSTRSRSYSRSFSRSHSRSYSRSPPYPRRGRGKSRNYRSRSRSHGYHRSRSRSPPYRRYHSRSRSPQAFRGQSPNKRNVPQGETEREYFNRYREVPPPYDMKAYYGRSVDFRDPFEKERYREWERKYREWYEKYYKGYAAGAQPRPSANRENFSPERFLPLNIRNSPFTRGRREDYVGGQSHRSRNIGSNYPEKLSARDGHNQKDNTKSKEKESENAPGDGKGNKHKKHRKRRKGEESEGFLNPELLETSRKSREPTGVEENKTDSLFVLPSRDDATPVRDEPMDAESITFKSVSEKDKRERDKPKAKGDKTKRKNDGSAVSKKENIVKPAKGPQEKVDGERERSPRSEPPIKKAKEETPKTDNTKSSSSSQKDEKITGTPRKAHSKSAKEHQETKPVKEEKVKKDYSKDVKSEKLTTKEEKAKKPNEKNKPLDNKGEKRKRKTEEKGVDKDFESSSMKISKLEVTEIVKPSPKRKMEPDTEKMDRTPEKDKISLSAPAKKIKLNRETGKKIGSTENISNTKEPSEKLESTSSKVKQEKVKGKVRRKVTGTEGSSSTLVDYTSTSSTGGSPVRKSEEKTDTKRTVIKTMEEYNNDNTAPAEDVIIMIQVPQSKWDKDDFESEEEDVKSTQPISSVGKPASVIKNVSTKPSNIVKYPEKESEPSEKIQKFTKDVSHEIIQHEVKSSKNSASSEKGKTKDRDYSVLEKENPEKRKNSTQPEKESNLDRLNEQGNFKSLSQSSKEARTSDKHDSTRASSNKDFTPNRDKKTDYDTREYSSSKRRDEKNELTRRKDSPSRNKDSASGQKNKPREERDLPKKGTGDSKKSNSSPSRDRKPHDHKATYDTKRPNEETKSVDKNPCKDREKHVLEARNNKESSGNKLLYILNPPETQVEKEQITGQIDKSTVKPKPQLSHSSRLSSDLTRETDEAAFEPDYNESDSESNVSVKEEESSGNISKDLKDKIVEKAKESLDTAAVVQVGISRNQSHSSPSVSPSRSHSPSGSQTRSHSSSASSAESQDSKKKKKKKEKKKHKKHKKHKKHKKHAGTEVELEKSQKHKHKKKKSKKNKDKEKEKEKDDQKVKSVTV

SEQ ID NO: 61478 - protein, 1758 aa, Homo sapiens
MSCVHYKFSSKLNYDTVTFDGLHISLCDLKKQIMGREKLKAADCDLQITNAQTKEEYTDDNALIPKNSSVIVRRIPIGGVKSTSKTYVISRTEPAMATTKAIDDSSASISLAQLTKTANLAEANASEEDKIKAMMSQSGHEYDPINYMKKPLGPPPPSYTCFRCGKPGHYIKNCPTNGDKNFESGPRIKKSTGIPRSFMMEVKDPNMKGAMLTNTGKYAIPTIDAEAYAIGKKEKPPFLPEEPSSSSEEDDPIPDELLCLICKDIMTDAVVIPCCGNSYCDECIRTALLESDEHTCPTCHQNDVSPDALIANKFLRQAVNNFKNETGYTKRLRKQLPPPPPPIPPPRPLIQRNLQPLMRSPISRQQDPLMIPVTSSSTHPAPSISSLTSNQSSLAPPVSGNPSSAPAPVPDITATVSISVHSEKSDGPFRDSDNKILPAAALASEHSKGTSSIAITALMEEKGYQVPVLGTPSLLGQSLLHGQLIPTTGPVRINTARPGGGRPGWEHSNKLGYLVSPPQQIRRGERSCYRSINRGRHHSERSQRTQGPSLPATPVFVPVPPPPLYPPPPHTLPLPPGVPPPQFSPQFPPGQPPPAGYSVPPPGFPPAPANLSTPWVSSGVQTAHSNTIPTTQAPPLSREEFYREQRRLKEESKSPYSGSSYSRSSYTYSKSRSGSTRSRSYSRSFSRSHSRSYSRSPPYPRRGRGKSRNYRSRSRSHGYHRSRSRSPPYRRYHSRSRSPQAFRGQSPNKRNVPQGETEREYFNRYREVPPPYDMKAYYGRSVDFRDPFEKERYREWERKYREWYEKYYKGYAAGAQPRPSANRENFSPERFLPLNIRNSPFTRGRREDYVGGQSHRSRNIGSNYPEKLSARDGHNQKDNTKSKEKESENAPGDGKGNKHKKHRKRRKGEESEGFLNPELLETSRKSREPTGVEENKTDSLFVLPSRDDATPVRDEPMDAESITFKSVSEKDKRERDKPKAKGDKTKRKNDGSAVSKKENIVKPAKGPQEKVDGERERSPRSEPPIKKAKEETPKTDNTKSSSSSQKDEKITGTPRKAHSKSAKEHQETKPVKEEKVKKDYSKDVKSEKLTTKEEKAKKPNEKNKPLDNKGEKRKRKTEEKGVDKDFESSSMKISKLEVTEIVKPSPKRKMEPDTEKMDRTPEKDKISLSAPAKKIKLNRETGKKIGSTENISNTKEPSEKLESTSSKVKQEKVKGKVRRKVTGTEGSSSTLVDYTSTSSTGGSPVRKSEEKTDTKRTVIKTMEEYNNDNTAPAEDVIIMIQVPQSKWDKDDFESEEEDVKSTQPISSVGKPASVIKNVSTKPSNIVKYPEKESEPSEKIQKFTKDVSHEIIQHEVKSSKNSASSEKGKTKDRDYSVLEKENPEKRKNSTQPEKESNLDRLNEQGNFKSLSQSSKEARTSDKHDSTRASSNKDFTPNRDKKTDYDTREYSSSKRRDEKNELTRRKDSPSRNKDSASGQKNKPREERDLPKKGTGDSKKSNSSPSRDRKPHDHKATYDTKRPNEETKSVDKNPCKDREKHVLEARNNKESSGNKLLYILNPPETQVEKEQITGQIDKSTVKPKPQLSHSSRLSSDLTRETDEAAFEPDYNESDSESNVSVKEEESSGNISKDLKDKIVEKAKESLDTAAVVQVGISRNQSHSSPSVSPSRSHSPSGSQTRSHSSSASSAESQDSKKKKKKKEKKKHKKHKKHKKHKKHAGTEVELEKSQKHKHKKKKSKKNKDKEKEKEKDDQKVKSVTV

SEQ ID NO: 61479 - protein, 952 aa, Homo sapiens
MSCVHYKFSSKLNYDTVTFDGLHISLCDLKKQIMGREKLKAADCDLQITNAQTKEEYTDDNALIPKNSSVIVRRIPIGGVKSTSKTYVISRTEPAMATTKAIDDSSASISLAQLTKTANLAEANASEEDKIKAMMSQSGHEYDPINYMKKPLGPPPPSYTCFRCGKPGHYIKNCPTNGDKNFESGPRIKKSTGIPRSFMMEVKDPNMKGAMLTNTGKYAIPTIDAEAYAIGKKEKPPFLPEEPSSSSEEDDPIPDELLCLICKDIMTDAVVIPCCGNSYCDECIRTALLESDEHTCPTCHQNDVSPDALIANKFLRQAVNNFKNETGYTKRLRKQLPPPPPPIPPPRPLIQRNLQPLMRSPISRQQDPLMIPVTSSSTHPAPSISSLTSNQSSLAPPVSGNPSSAPAPVPDITATVSISVHSEKSDGPFRTSSTGGSPVRKSEEKTDTKRTVIKTMEEYNNDNTAPAEDVIIMIQVPQSKWDKDDFESEEEDVKSTQPISSVGKPASVIKNVSTKPSNIVKYPEKESEPSEKIQKFTKDVSHEIIQHEVKSSKNSASSEKGKTKDRDYSVLEKENPEKRKNSTQPEKESNLDRLNEQGNFKSLSQSSKEARTSDKHDSTRASSNKDFTPNRDKKTDYDTREYSSSKRRDEKNELTRRKDSPSRNKDSASGQKNKPREERDLPKKGTGDSKKSNSSPSRDRKPHDHKATYDTKRPNEETKSVDKNPCKDREKHVLEARNNKESSGNKLLYILNPPETQVEKEQITGQIDKSTVKPKPQLSHSSRLSSDLTRETDEAAFEPDYNESDSESNVSVKEEESSGNISKDLKDKIVEKAKESLDTAAVVQVGISRNQSHSSPSVSPSRSHSPSGSQTRSHSSSASSAESQDSKKKKKKKEKKKHKKHKKHKKHKKHAGTEVELEKSQKHKHKKKKSKKNKDKEKEKEKDDQKVKSVTV

SEQ ID NO: 61480 - protein, 118 aa, Homo sapiens
MSCVHYKFSSKLNYDTVTFDGLHISLCDLKKQIMGREKLKAADCDLQITNAQTKEEYTDDNALIPKNSSVIVRRIPIGGVKSTSKTYVISRTEPAMATTKAVCKNTISHFFYTLLLPL

SEQ ID NO: 61481 - protein, 469 aa, Homo sapiens
MAAEAGVVGAGASPDGDWRDQACGLLLHVHLSSRLGRAAPVRTGRHLRTVFEDTVEERVINEEYKIWKKNTPFLYDLVMTHALQWPSLTVQWLPEVTKPEGKDYALHWLVLGTHTSDEQNHLVVARVHIPNDDAQFDASHCDSDKGEFGGFGSVTGKIECEIKINHEGEVNRARYMPQNPHIIATKTPSSDVLVFDYTKHPAKPDPSGECNPDLRLRGHQKEGYGLSWNSNLSGHLLSASDDHTVCLWDINAGPKEGKIVDAKAIFTGHSAVVEDVAWHLLHESLFGSVADDQKLMIWDTRSNTTSKPSHLVDAHTAEVNCLSFNPYSEFILATGSADKTVALWDLRNLKLKLHTFESHKDEIFQVHWSPHNETILASSGTDRRLNVWDLSKIGEEQSAEDAEDGPPELLFIHGGHTAKISDFSWNPNEPWVICSVSEDNIMQIWQMAENIYNDEESDVTTSELEGQGS

SEQ ID NO: 61482 - protein, 425 aa, Homo sapiens
MASKEMFEDTVEERVINEEYKIWKKNTPFLYDLVMTHALQWPSLTVQWLPEVTKPEGKDYALHWLVLGTHTSDEQNHLVVARVHIPNDDAQFDASHCDSDKGEFGGFGSVTGKIECEIKINHEGEVNRARYMPQNPHIIATKTPSSDVLVFDYTKHPAKPDPSGECNPDLRLRGHQKEGYGLSWNSNLSGHLLSASDDHTVCLWDINAGPKEGKIVDAKAIFTGHSAVVEDVAWHLLHESLFGSVADDQKLMIWDTRSNTTSKPSHLVDAHTAEVNCLSFNPYSEFILATGSADKTVALWDLRNLKLKLHTFESHKDEIFQVHWSPHNETILASSGTDRRLNVWDLSKIGEEQSAEDAEDGPPELLFIHGGHTAKISDFSWNPNEPWVICSVSEDNIMQIWQMAENIYNDEESDVTTSELEGQGS

SEQ ID NO: 61483 - protein, 416 aa, Homo sapiens
MASKEMFEDTVEERVINEEYKIWKKNTPFLYDLVMTHALQWPSLTVQWLPEVTKPEGKDYALHWLVLGTHTSDEQNHLVVARVHIPNDDAQFDASHCDSDKGGKIECEIKINHEGEVNRARYMPQNPHIIATKTPSSDVLVFDYTKHPAKPDPSGECNPDLRLRGHQKEGYGLSWNSNLSGHLLSASDDHTVCLWDINAGPKEGKIVDAKAIFTGHSAVVEDVAWHLLHESLFGSVADDQKLMIWDTRSNTTSKPSHLVDAHTAEVNCLSFNPYSEFILATGSADKTVALWDLRNLKLKLHTFESHKDEIFQVHWSPHNETILASSGTDRRLNVWDLSKIGEEQSAEDAEDGPPELLFIHGGHTAKISDFSWNPNEPWVICSVSEDNIMQIWQMAENIYNDEESDVTTSELEGQGS

SEQ ID NO: 61484 - protein, 186 aa, Homo sapiens
MASPSKAVIVPGNGGGDVTTHGWYGWVKKELEKIPGFQCLAKNMPDPITARESIWLPFMETELHCDEKTIIIGHSSGAIAAMRYAETHRVYAIVLVSAYTSDLGDENERASGYFTRPWQWEKIKANCPYIVQFGSTDDPFLPWKEQQEVADRLETKLHKFTDCGHFQNTEFHELITVVKSLLKVPA

SEQ ID NO: 61485 - protein, 172 aa, Homo sapiens
MASPSKAVIVPGNGGGDVTTHGWYGWVKKELEKIPGFQCLAKNMPDPITARESIWLPFMETELHCDEKTIIIGHSSGAIAAMRYAETHRVYAIVLVSAYTSDLGDENERASGYFTRPWQWEKIKANCPYIVQFGSTDDPFLPWKEQQEVADWKPNCTNSLTVATFRTQSFMN

SEQ ID NO: 61486 - protein, 246 aa, Homo sapiens
MAAAAIPALLLCLPLLFLLFGWSRARRDDPHSLCYDITVIPKFRPGPRWCAVQGQVDEKTFLHYDCGNKTVTPVSPLGKKLNVTMAWKAQNPVLREVVDILTEQLLDIQLENYTPKEPLTLQARMSCEQKAEGHSSGSWQFSIDGQTFLLFDSEKRMWTTVHPGARKMKEKWENDKDVAMSFHYISMGDCIGWLEDFLMGMDSTLEPSAGAPLAMSSGTTQLRATATTLILCCLLIILPCFILPGI

SEQ ID NO: 61487 - protein, 246 aa, Homo sapiens; identical to SEQ ID NO: 61486

SEQ ID NO: 61488 - protein, 1640 aa, Homo sapiens
MQSFRERCGFHGKQQNYQQTSQETSRLENYRQPSQAGLSCDRQRLLAKDYYNPQPYPSYEGGAGTPSGTAAAVAADKYHRGSKALPTQQGLQGRPAFPGYGVQDSSPYPGRYAGEESLQAWGAPQPPPPQPQPLPAGVAKYDENLMKKTAVPPSRQYAEQGAQVPFRTHSLHVQQPPPPQQPLAYPKLQRQKLQNDIASPLPFPQGTHFPQHSQSFPTSSTYSSSVQGGGQGAHSYKSCTAPTAQPHDRPLTASSSLAPGQRVQNLHAYQSGRLSYDQQQQQQQQQQQQQQALQSRHHAQETLHYQNLAKYQHYGQQGQGYCQPDAAVRTPEQYYQTFSPSSSHSPARSVGRSPSYSSTPSPLMPNLENFPYSQQPLSTGAFPAGITDHSHFMPLLNPSPTDATSSVDTQAGNCKPLQKDKLPENLLSDLSLQSLTALTSQVENISNTVQQLLLSKAAVPQKKGVKNLVSRTPEQHKSQHCSPEGSGYSAEPAGTPLSEPPSSTPQSTHAEPQEADYLSGSEDPLERSFLYCNQARGSPARVNSNSKAKPESVSTCSVTSPDDMSTKSDDSFQSLHGSLPLDSFSKFVAGERDCPRLLLSALAQEDLASEILGLQEAIGEKADKAWAEAPSLVKDSSKPPFSLENHSACLDSVAKSAWPRPGEPEALPDSLQLDKGGNAKDFSPGLFEDPSVAFATPDPKKTTGPLSFGTKPTLGVPAPDPTTAAFDCFPDTTAASSADSANPFAWPEENLGDACPRWGLHPGELTKGLEQGGKASDGISKGDTHEASACLGFQEEDPPGEKVASLPGDFKQEEVGGVKEEAGGLLQCPEVAKADRWLEDSRHCCSTADFGDLPLLPPTSRKEDLEAEEEYSSLCELLGSPEQRPGMQDPLSPKAPLICTKEEVEEVLDSKAGWGSPCHLSGESVILLGPTVGTESKVQSWFESSLSHMKPGEEGPDGERAPGDSTTSDASLAQKPNKPAVPEAPIAKKEPVPRGKSLRSRRVHRGLPEAEDSPCRAPVLPKDLLLPESCTGPPQGQMEGAGAPGRGASEGLPRMCTRSLTALSEPRTPGPPGLTTTPAPPDKLGGKQRAAFKSGKRVGKPSPKAASSPSNPAALPVASDSSPMGSKTKETDSPSTPGKDQRSMILRSRTKTQEIFHSKRRRPSEGRLPNCRATKKLLDNSHLPATFKVSSSPQKEGRVSQRARVPKPGAGSKLSDRPLHALKRKSAFMAPVPTKKRNLVLRSRSSSSSNASGNGGDGKEERPEGSPTLFKRMSSPKKAKPTKGNGEPATKLPPPETPDACLKLASRAAFQGAMKTKVLPPRKGRGLKLEAIVQKITSPSLKKFACKAPGASPGNPLSPSLSDKDRGLKGAGGSPVGVEEGLVNVGTGQKLPTSGADPLCRNPTNRSLKGKLMNSKKLSSTDCFKTEAFTSPEALQPGGTALAPKKRSRKGRAGAHGLSKGPLEKRPYLGPALLLTPRDRASGTQGASEDNSGGGGKKPKMEELGLASQPPEGRPCQPQTRAQKQPGHTNYSSYSKRKRLTRGRAKNTTSSPCKGRAKRRRQQQVLPLDPAEPEIRLKYISSCKRLRSDSRTPAFSPFEPSLGAQNPRSGQNAPPAPADARPLCTTRDRRAYSAREQGQR

SEQ ID NO: 61489 - protein, 1862 aa, Homo sapiens
MQSFRERCGFHGKQQNYQQTSQETSRLENYRQPSQAGLSCDRQRLLAKDYYNPQPYPSYEGGAGTPSGTAAAVAADKYHRGSKALPTQQGLQGRPAFPGYGVQDSSPYPGRYAGEESLQAWGAPQPPPPQPQPLPAGVAKYDENLMKKTAVPPSRQYAEQGAQVPFRTHSLHVQQPPPPQQPLAYPKLQRQKLQNDIASPLPFPQGWWAGHSYKSCTAPTAQPHDRPLTASSSLAPGQRVQNLHAYQSGRLSYDQQQQQQQQQQQQQQALQSRHHAQETLHYQNLAKYQHYGQQGQGYCQPDAAVRTPEQYYQTFSPSSSHSPARSVGRSPSYSSTPSPLMPNLENFPYSQQPLSTGAFPAGITDHSHFMPLLNPSPTDATSSVDSLTALTSQVENISNTVQQLLLSKAAVPQKKGVKNLVSRTPEQHKSQHCSPEGSGYSAEPAGTPLSEPPSSTPQSTHAEPQEADYLSGSEDPLERSFLYCNQARGSPARVNSNSKAKPESVSTCSVTSPDDMSTKSDDSFQSLHGSLPLDSFSKFVAGERDCPRLLLSALAQEDLASEILGLQEAIGEKADKAWAEAPSLVKDSSKPPFSLENHSACLDSVAKSAWPRPGEPEALPDSLQLDKGGNAKDFSPGLFEDPSVAFATPDPKKTTGPLSFGTKPTLGVPAPDPTTAAFDCFPDTTAASSADSANPFAWPEENLGDACPRWGLHPGELTKGLEQGGKASDGISKGDTHEASACLGFQEEDPPGEKVASLPGDFKQEEVGGVKEEAGGLLQCPEVAKADRWLEDSRHCCSTADFGDLPLLPPTSRKEDLEAEEEYSSLCELLGSPEQRPGMQDPLSPKAPLICTKEEVEEVLDSKAGWGSPCHLSGESVILLGPTVGTESKVQSWFESSLSHMKPGEEGPDGERAPGDSTTSDASLAQKPNKPAVPEAPIAKKEPVPRGKSLRSRRVHRGLPEAEDSPCRAPVLPKDLLLPESCTGPPQGQMEGAGAPGRGASEGLPRMCTRSLTALSEPRTPGPPGLTTTPAPPDKLGGKQRAAFKSGKRVGKPSPKAASSPSNPAALPVASDSSPMGSKTKETDSPSTPGKDQRSMILRSRTKTQEIFHSKRRRPSEGRLPNCRATKKLLDNSHLPATFKVSSSPQKEGRVSQRARVPKPGAGSKLSDRPLHALKRKSAFMAPVPTKKRNLVLRSRSSSSSNASGNGGDGKEERPEGSPTLFKRMSSPKKAKPTKGNGEPATKLPPPETPDACLKLASRAAFQGAMKTKVLPPRKGRGLKLEAIVQKITSPSLKKFACKAPGASPGNPLSPSLSDKDRGLKGAGGSPVGVEEGLVNVGTGQKLPTSGADPLCRNPTNRSLKGKLMNNRASGTQGASEDNSGGGGKKPKMEELGLASQPPEGRPCQPQTRAQKQPGHTNYSSYSKRKRLTRGRAKNTTSSPCKGRAKRRRQQQVLPLDPAEPEIRLKYISSCKRLRSDSRTPAFSPFVRVEKRDAFTTICTVVNSPGDAPKPHRKPSSSASSSSSSSSFSLDAAGASLATLPGGSILQPRPSLPLSSTMHLGPVVSKALSTSCLVCCLCQNPANFKDLGDLCGPYYPEHCLPKKKPKLKEKVRPEGTCEEASLPLERTLKGPECAAAATAGKPPRPDGPADPAKQGPLRTSARGLSRRLQSCYCCDGREDGGEEAAPADKGHWVHEACAVWTGGVYLVAGKLFGLQEAMKVAVDMHGGTVALAPGDFSLPGLRFASLFQGPSWCDCPVLATSTPSSWSRCVPAAKKPGPPLGAATKDASTPTTTRVPAMQVRARPGTGGHWSPSKQSRGTLPGHSSPNPGPISLFSFPPLLPQQFFYPSVCLDLCWAMPGTWK

SEQ ID NO: 61490 - protein, 1906 aa, Homo sapiens
MQSFRERCGFHGKQQNYQQTSQETSRLENYRQPSQAGLSCDRQRLLAKDYYNPQPYPSYEGGAGTPSGTAAAVAADKYHRGSKALPTQQGLQGRPAFPGYGVQDSSPYPGRYAGEESLQAWGAPQPPPPQPQPLPAGVAKYDENLMKKTAVPPSRQYAEQGAQVPFRTHSLHVQQPPPPQQPLAYPKLQRQKLQNDIASPLPFPQGTHFPQHSQSFPTSSTYSSSVQGGGQGAHSYKSCTAPTAQPHDRPLTASSSLAPGQRVQNLHAYQSGRLSYDQQQQQQQQQQQQQQALQSRHHAQETLHYQNLAKYQHYGQQGQGYCQPDAAVRTPEQYYQTFSPSSSHSPARSVGRSPSYSSTPSPLMPNLENFPYSQQPLSTGAFPAGITDHSHFMPLLNPSPTDATSSVDTQAGNCKPLQKDKLPENLLSDLSLQSLTALTSQVENISNTVQQLLLSKAAVPQKKGVKNLVSRTPEQHKSQHCSPEGSGYSAEPAGTPLSEPPSSTPQSTHAEPQEADYLSGSEDPLERSFLYCNQARGSPARVNSNSKAKPESVSTCSVTSPDDMSTKSDDSFQSLHGSLPLDSFSKFVAGERDCPRLLLSALAQEDLASEILGLQEAIGEKADKAWAEAPSLVKDSSKPPFSLENHSACLDSVAKSAWPRPGEPEALPDSLQLDKGGNAKDFSPGLFEDPSVAFATPDPKKTTGPLSFGTKPTLGVPAPDPTTAAFDCFPDTTAASSADSANPFAWPEENLGDACPRWGLHPGELTKGLEQGGKASDGISKGDTHEASACLGFQEEDPPGEKVASLPGDFKQEEVGGVKEEAGGLLQCPEVAKADRWLEDSRHCCSTADFGDLPLLPPTSRKEDLEAEEEYSSLCELLGSPEQRPGMQDPLSPKAPLICTKEEVEEVLDSKAGWGSPCHLSGESVILLGPTVGTESKVQSWFESSLSHMKPGEEGPDGERAPGDSTTSDASLAQKPNKPAVPEAPIAKKEPVPRGKSLRSRRVHRGLPEAEDSPCRAPVLPKDLLLPESCTGPPQGQMEGAGAPGRGASEGLPRMCTRSLTALSEPRTPGPPGLTTTPAPPDKLGGKQRAAFKSGKRVGKPSPKAASSPSNPAALPVASDSSPMGSKTKETDSPSTPGKDQRSMILRSRTKTQEIFHSKRRRPSEGRLPNCRATKKLLDNSHLPATFKVSSSPQKEGRVSQRARVPKPGAGSKLSDRPLHALKRKSAFMAPVPTKKRNLVLRSRSSSSSNASGNGGDGKEERPEGSPTLFKRMSSPKKAKPTKGNGEPATKLPPPETPDACLKLASRAAFQGAMKTKVLPPRKGRGLKLEAIVQKITSPSLKKFACKAPGASPGNPLSPSLSDKDRGLKGAGGSPVGVEEGLVNVGTGQKLPTSGADPLCRNPTNRSLKGKLMNSKKLSSTDCFKTEAFTSPEALQPGGTALAPKKRSRKGRAGAHGLSKGPLEKRPYLGPALLLTPRDRASGTQGASEDNSGGGGKKPKMEELGLASQPPEGRPCQPQTRAQKQPGHTNYSSYSKRKRLTRGRAKNTTSSPCKGRAKRRRQQQVLPLDPAEPEIRLKYISSCKRLRSDSRTPAFSPFVRVEKRDAFTTICTVVNSPGDAPKPHRKPSSSASSSSSSSSFSLDAAGASLATLPGGSILQPRPSLPLSSTMHLGPVVSKALSTSCLVCCLCQNPANFKDLGDLCGPYYPEHCLPKKKPKLKEKVRPEGTCEEASLPLERTLKGPECAAAATAGKPPRPDGPADPAKQGPLRTSARGLSRRLQSCYCCDGREDGGEEAAPADKGRKHECSKEAPAEPGGEAQEHWVHEACAVWTGGVYLVAGKLFGLQEAMKVAVDMMCSSCQEAGATIGCCHKGCLHTYHYPCASDAGCIFIEENFSLKCPKHKRLP

SEQ ID NO: 61491 - protein, 966 aa, Homo sapiens
MQSFRERCGFHGKQQNYQQTSQETSRLENYRQPSQAGLSCDRQRLLAKDYYNPQPYPSYEGGAGTPSGTAAAVAADKYHRGSKALPTQQGLQGRPAFPGYGVQDSSPYPGRYAGEESLQAWGAPQPPPPQPQPLPAGVAKYDENLMKKTAVPPSRQYAEQGAQVPFRTHSLHVQQPPPPQQPLAYPKLQRQKLQNDIASPLPFPQGTHFPQHSQSFPTSSTYSSSVQGGGQGAHSYKSCTAPTAQPHDRPLTASSSLAPGQRVQNLHAYQSGRLSYDQQQQQQQQQQQQQQALQSRHHAQETLHYQNLAKYQHYGQQGQGYCQPDAAVRTPEQYYQTFSPSSSHSPARSVGRSPSYSSTPSPLMPNLENFPYSQQPLSTGAFPAGITDHSHFMPLLNPSPTDATSSVDTQAGNCKPLQKDKLPENLLSDLSLQSLTALTSQVENISNTVQQLLLSKAAVPQKKGVKNLVSRTPEQHKSQHCSPEGSGYSAEPAGTPLSEPPSSTPQSTHAEPQEADYLSGSEDPLERSFLYCNQARGSPARVNSNSKAKPESVSTCSVTSPDDMSTKSDDSFQSLHGSLPLDSFSKFVAGERDCPRLLLSALAQEDLASEILGLQEAIGEKADKAWAEAPSLVKDSSKPPFSLENHSACLDSVAKSAWPRPGEPEALPDSLQLDKGGNAKDFSPGLFEDPSVAFATPDPKKTTGPLSFGTKPTLGVPAPDPTTAAFDCFPDTTAASSADSANPFAWPEENLGDACPRWGLHPGELTKGLEQGGKASDGISKGDTHEASACLGFQEEDPPGEKVASLPGDFKQEEVGGVKEEAGGLLQCPEVAKADRWLEDSRHCCSTADFGDLPLLPPTSRKEDLEAEEEYSSLCELLGSPEQRPGMQDPLSPKAPLICTKEEVEEVLDSKAGWGSPCHLSGESVILLGPTVGTESKVQSWFEASLYSVYICIHIHIYNIYEDCKC

SEQ ID NO: 61492 - protein, 942 aa, Homo sapiens
MQSFRERCGFHGKQQNYQQTSQETSRLENYRQPSQAGLSCDRQRLLAKDYYNPQPYPSYEGGAGTPSGTAAAVAADKYHRGSKALPTQQGLQGRPAFPGYGVQDSSPYPGRYAGEESLQAWGAPQPPPPQPQPLPAGVAKYDENLMKKTAVPPSRQYAEQGAQVPFRTHSLHVQQPPPPQQPLAYPKLQRQKLQNDIASPLPFPQGTHFPQHSQSFPTSSTYSSSVQGGGQGAHSYKSCTAPTAQPHDRPLTASSSLAPGQRVQNLHAYQSGRLSYDQQQQQQQQQQQQQQALQSRHHAQETLHYQNLAKYQHYGQQGQGYCQPDAAVRTPEQYYQTFSPSSSHSPARSVGRSPSYSSTPSPLMPNLENFPYSQQPLSTGAFPAGITDHSHFMPLLNPSPTDATSSVDTQAGNCKPLQKDKLPENLLSDLSLQSLTALTSQVENISNTVQQLLLSKAAVPQKKGVKNLVSRTPEQHKSQHCSPEGSGYSAEPAGTPLSEPPSSTPQSTHAEPQEADYLSGSEDPLERSFLYCNQARGSPARVNSNSKAKPESVSTCSVTSPDDMSTKSDDSFQSLHGSLPLDSFSKFVAGERDCPRLLLSALAQEDLASEILGLQEAIGEKADKAWAEAPSLVKDSSKPPFSLENHSACLDSVAKSAWPRPGEPEALPDSLQLDKGGNAKDFSPGLFEDPSVAFATPDPKKTTGPLSFGTKPTLGVPAPDPTTAAFDCFPDTTAASSADSANPFAWPEENLGDACPRWGLHPGELTKGLEQGGKASDGISKGDTHEASACLGFQEEDPPGEKVASLPGDFKQEEVGGVKEEAGGLLQCPEVAKADRWLEDSRHCCSTADFGDLPLLPPTSRKEDLEAEEEYSSLCELLGSPEQRPGMQDPLSPKAPLICTKEEVEEVLDSKAGWGSPCHLSGESVILLGPTVGTESKVQSWF

SEQ ID NO: 61493 - protein, 1993 aa, Homo sapiens
MQSFRERCGFHGKQQNYQQTSQETSRLENYRQPSQAGLSCDRQRLLAKDYYNPQPYPSYEGGAGTPSGTAAAVAADKYHRGSKALPTQQGLQGRPAFPGYGVQDSSPYPGRYAGEESLQAWGAPQPPPPQPQPLPAGVAKYDENLMKKTAVPPSRQYAEQGAQVPFRTHSLHVQQPPPPQQPLAYPKLQRQKLQNDIASPLPFPQGTHFPQHSQSFPTSSTYSSSVQGGGQGAHSYKSCTAPTAQPHDRPLTASSSLAPGQRVQNLHAYQSGRLSYDQQQQQQQQQQQQQQALQSRHHAQETLHYQNLAKYQHYGQQGQGYCQPDAAVRTPEQYYQTFSPSSSHSPARSVGRSPSYSSTPSPLMPNLENFPYSQQPLSTGAFPAGITDHSHFMPLLNPSPTDATSSVDTQAGNCKPLQKDKLPENLLSDLSLQSLTALTSQVENISNTVQQLLLSKAAVPQKKGVKNLVSRTPEQHKSQHCSPEGSGYSAEPAGTPLSEPPSSTPQSTHAEPQEADYLSGSEDPLERSFLYCNQARGSPARVNSNSKAKPESVSTCSVTSPDDMSTKSDDSFQSLHGSLPLDSFSKFVAGERDCPRLLLSALAQEDLASEILGLQEAIGEKADKAWAEAPSLVKDSSKPPFSLENHSACLDSVAKSAWPRPGEPEALPDSLQLDKGGNAKDFSPGLFEDPSVAFATPDPKKTTGPLSFGTKPTLGVPAPDPTTAAFDCFPDTTAASSADSANPFAWPEENLGDACPRWGLHPGELTKGLEQGGKASDGISKGDTHEASACLGFQEEDPPGEKVASLPGDFKQEEVGGVKEEAGGLLQCPEVAKADRWLEDSRHCCSTADFGDLPLLPPTSRKEDLEAEEEYSSLCELLGSPEQRPGMQDPLSPKAPLICTKEEVEEVLDSKAGWGSPCHLSGESVILLGPTVGTESKVQSWFESSLSHMKPGEEGPDGERAPGDSTTSDASLAQKPNKPAVPEAPIAKKEPVPRGKSLRSRRVHRGLPEAEDSPCRAPVLPKDLLLPESCTGPPQGQMEGAGAPGRGASEGLPRMCTRSLTALSEPRTPGPPGLTTTPAPPDKLGGKQRAAFKSGKRVGKPSPKAASSPSNPAALPVASDSSPMGSKTKETDSPSTPGKDQRSMILRSRTKTQEIFHSKRRRPSEGRLPNCRATKKLLDNSHLPATFKVSSSPQKEGRVSQRARVPKPGAGSKLSDRPLHALKRKSAFMAPVPTKKRNLVLRSRSSSSSNASGNGGDGKEERPEGSPTLFKRMSSPKKAKPTKGNGEPATKLPPPETPDACLKLASRAAFQGAMKTKVLPPRKGRGLKLEAIVQKITSPSLKKFACKAPGASPGNPLSPSLSDKDRGLKGAGGSPVGVEEGLVNVGTGQKLPTSGADPLCRNPTNRSLKGKLMNSKKLSSTDCFKTEAFTSPEALQPGGTALAPKKRSRKGRAGAHGLSKGPLEKRPYLGPALLLTPRDRASGTQGASEDNSGGGGKKPKMEELGLASQPPEGRPCQPQTRAQKQPGHTNYSSYSKRKRLTRGRAKNTTSSPCKGRAKRRRQQQVLPLDPAEPEIRLKYISSCKRLRSDSRTPAFSPFVRVEKRDAFTTICTVVNSPGDAPKPHRKPSSSASSSSSSSSFSLDAAGASLATLPGGSILQPRPSLPLSSTMHLGPVVSKALSTSCLVCCLCQNPANFKDLGDLCGPYYPEHCLPKKKPKLKEKVRPEGTCEEASLPLERTLKGPECAAAATAGKPPRPDGPADPAKQGPLRTSARGLSRRLQSCYCCDGREDGGEEAAPADKGRKHECSKEAPAEPGGEAQEHWVHEACAVWTGGVYLVAGKLFGLQEAMKVAVDMHGGTVALAPGDFSLPGLRFASLFQGPSWCDCPVLATSTPSSWSRCVPAAKKPGPPLGAATKDASTPTTTRVPAMQVRARPGTGGHWSPSKQSRGTLPGHSSPNPGPISLFSFPPLLPQQFFYPSVCLDLCWAMPGTWK

SEQ ID NO: 61494 - protein, 980 aa, Homo sapiens
MKSLKAKFRKSDTNEWNKNDDRLLQAVENGDAEKVASLLGKKGASATKHDSEGKTAFHLAAAKGHVECLRVMITHGVDVTAQDTTGHSALHLAAKNSHHECIRKLLQSKCPAESVDSSGKTALHYAAAQGCLQAVQILCEHKSPINLKDLDGNIPLLLAVQNGHSEICHFLLDHGADVNSRNKSGRTALMLACEIGSSNAVEALIKKGADLNLVDSLGYNALHYSKLSENAGIQSLLLSKISQDADLKTPTKPKQHDQVSKISSERSGTPKKRKAPPPPISPTQLSDVSSPRSITSTPLSGKESVFFAEPPFKAEISSIRENKDRLSDSTTGADSLLDISSEADQQDLLSLLQAKVASLTLHNKELQDKLQAKSPKEAEADLSFDSYHSTQTDLGPSLGKPGETSPPDSKSSPSVLIHSLGKSTTDNDVRIQQLQEILQDLQKRLESSEAERKQLQVELQSRRAELVCLNNTEISENSSDLSQKLKETQSKYEEAMKEVLSVQKQMKLGLVSPESMDNYSHFHELRVTEEEINVLKQDLQNALEESERNKEKVRELEEKLVEREKGTVIKPPVEEYEEMKSSYCSVIENMNKEKAFLFEKYQEAQEEIMKLKDTLKSQMTQEASDEAEDMKEAMNRMIDELNKQVSELSQLYKEAQAELEDYRKRKSLEDVTAEYIHKAEHEKLMQLTNVSRAKAEDALSEMKSQYSKVLNELTQLKQLVDAQKENSVSITEHLQVITTLRTAAKEMEEKISNLKEHLASKEVEVAKLEKQLLEEKAAMTDAMVPRSSYEKLQSSLESEVSVLASKLKESVKEKEKVHSEVVQIRSEVSQVKREKENIQTLLKSKEQEVNELLQKFQQAQEELAEMKRYAESSSKLEEDKDKKINEMSKEVTKLKEALNSLSQLSYSTSSSKRQSQQLEALQQQVKQLQNQLAECKKQHQEVISVYRMHLLYAVQGQMDEDVQKVLKQILTMCKNQSQKK

SEQ ID NO: 61495 - protein, 973 aa, Homo sapiens
MVKGKTNEWNKNDDRLLQAVENGDAEKVASLLGKKGASATKHDSEGKTAFHLAAAKGHVECLRVMITHGVDVTAQDTTGHSALHLAAKNSHHECIRKLLQSKCPAESVDSSGKTALHYAAAQGCLQAVQILCEHKSPINLKDLDGNIPLLLAVQNGHSEICHFLLDHGADVNSRNKSGRTALMLACEIGSSNAVEALIKKGADLNLVDSLGYNALHYSKLSENAGIQSLLLSKISQDADLKTPTKPKQHDQVSKISSERSGTPKKRKAPPPPISPTQLSDVSSPRSITSTPLSGKESVFFAEPPFKAEISSIRENKDRLSDSTTGADSLLDISSEADQQDLLSLLQAKVASLTLHNKELQDKLQAKSPKEAEADLSFDSYHSTQTDLGPSLGKPGETSPPDSKSSPSVLIHSLGKSTTDNDVRIQQLQEILQDLQKRLESSEAERKQLQVELQSRRAELVCLNNTEISENSSDLSQKLKETQSKYEEAMKEVLSVQKQMKLGLVSPESMDNYSHFHELRVTEEEINVLKQDLQNALEESERNKEKVRELEEKLVEREKGTVIKPPVEEYEEMKSSYCSVIENMNKEKAFLFEKYQEAQEEIMKLKDTLKSQMTQEASDEAEDMKEAMNRMIDELNKQVSELSQLYKEAQAELEDYRKRKSLEDVTAEYIHKAEHEKLMQLTNVSRAKAEDALSEMKSQYSKVLNELTQLKQLVDAQKENSVSITEHLQVITTLRTAAKEMEEKISNLKEHLASKEVEVAKLEKQLLEEKAAMTDAMVPRSSYEKLQSSLESEVSVLASKLKESVKEKEKVHSEVVQIRSEVSQVKREKENIQTLLKSKEQEVNELLQKFQQAQEELAEMKRYAESSSKLEEDKDKKINEMSKEVTKLKEALNSLSQLSYSTSSSKRQSQQLEALQQQVKQLQNQLAECKKQHQEVISVYRMHLLYAVQGQMDEDVQKVLKQILTMCKNQSQKK

SEQ ID NO: 61496 - protein, 980 aa, Homo sapiens; identical to SEQ ID NO: 61494

SEQ ID NO: 61497 - protein, 980 aa, Homo sapiens; identical to SEQ ID NO: 61494

SEQ ID NO: 61498 - protein, 114 aa, Homo sapiens
MKSLKAKFRKSDTNEWNKNDDRLLQAVENGDAEKVASLLGKKGASATKHDSEGKTAFHLAAAKGHVECLRVMITHGVDVTAQDTTGHSALHLAAKNSHHECIRKLLQSKCPAES

SEQ ID NO: 61499 - protein, 972 aa, Homo sapiens
MEAKTNEWNKNDDRLLQAVENGDAEKVASLLGKKGASATKHDSEGKTAFHLAAAKGHVECLRVMITHGVDVTAQDTTGHSALHLAAKNSHHECIRKLLQSKCPAESVDSSGKTALHYAAAQGCLQAVQILCEHKSPINLKDLDGNIPLLLAVQNGHSEICHFLLDHGADVNSRNKSGRTALMLACEIGSSNAVEALIKKGADLNLVDSLGYNALHYSKLSENAGIQSLLLSKISQDADLKTPTKPKQHDQVSKISSERSGTPKKRKAPPPPISPTQLSDVSSPRSITSTPLSGKESVFFAEPPFKAEISSIRENKDRLSDSTTGADSLLDISSEADQQDLLSLLQAKVASLTLHNKELQDKLQAKSPKEAEADLSFDSYHSTQTDLGPSLGKPGETSPPDSKSSPSVLIHSLGKSTTDNDVRIQQLQEILQDLQKRLESSEAERKQLQVELQSRRAELVCLNNTEISENSSDLSQKLKETQSKYEEAMKEVLSVQKQMKLGLVSPESMDNYSHFHELRVTEEEINVLKQDLQNALEESERNKEKVRELEEKLVEREKGTVIKPPVEEYEEMKSSYCSVIENMNKEKAFLFEKYQEAQEEIMKLKDTLKSQMTQEASDEAEDMKEAMNRMIDELNKQVSELSQLYKEAQAELEDYRKRKSLEDVTAEYIHKAEHEKLMQLTNVSRAKAEDALSEMKSQYSKVLNELTQLKQLVDAQKENSVSITEHLQVITTLRTAAKEMEEKISNLKEHLASKEVEVAKLEKQLLEEKAAMTDAMVPRSSYEKLQSSLESEVSVLASKLKESVKEKEKVHSEVVQIRSEVSQVKREKENIQTLLKSKEQEVNELLQKFQQAQEELAEMKRYAESSSKLEEDKDKKINEMSKEVTKLKEALNSLSQLSYSTSSSKRQSQQLEALQQQVKQLQNQLAECKKQHQEVISVYRMHLLYAVQGQMDEDVQKVLKQILTMCKNQSQKK

SEQ ID NO: 61500 - protein, 125 aa, Homo sapiens
MKSLKAKFRKSDTNEWNKNDDRLLQAVENGDAEKVASLLGKKGASATKHDSEGKTAFHLAAAKGHVECLRVMITHGVDVTAQDTTGHSALHLAAKNSHHECIRKLLQSKCPAESVDSSGKTALHY

SEQ ID NO: 61501 - protein, 107 aa, Homo sapiens
MKSLKAKFRKSDTNEWNKNDDRLLQAVENGDAEKVASLLGKKGASATKHDSEGKTAFHLAAAKGHVECLRVMITHGVDVTAQDTTGHSALHLAAKNSHHECIRKLLQ

SEQ ID NO: 61502 - protein, 150 aa, Homo sapiens
MKSLKAKFRKSDTNEWNKNDDRLLQAVENGDAEKVASLLGKKGASATKHDSEGKTAFHLAAAKGHVECLRVMITHGVDVTAQDTTGHSALHLAAKNSHHECIRKLLQSKCPAESVDSSGKTALHYAAAQGCLQAVQILCEHKSPINLKDL

SEQ ID NO: 61503 - protein, 126 aa, Homo sapiens
MKSLKAKFRKSDTNEWNKNDDRLLQAVENGDAEKVASLLGKKGASATKHDSEGKTAFHLAAAKGHVECLRVMITHGVDVTAQDTTGHSALHLAAKNSHHECIRKLLQSKCPAESVDSSGKTALHYA

SEQ ID NO: 61504 - protein, 104 aa, Homo sapiens
MKSLKAKFRKSDTNEWNKNDDRLLQAVENGDAEKVASLLGKKGASATKHDSEGKTAFHLAAAKGHVECLRVMITHGVDVTAQDTTGHSALHLAAKNSHHECIRK

SEQ ID NO: 61505 - protein, 139 aa, Homo sapiens
MKSLKAKFRKSDTNEWNKNDDRLLQAVENGDAEKVASLLGKKGASATKHDSEGKTAFHLAAAKGHVECLRVMITHGVDVTAQDTTGHSALHLAAKNSHHECIRKLLQSKCPAESVDSSGKTALHYAAAQGCLQAVQILC

SEQ ID NO: 61506 - protein, 126 aa, Homo sapiens; identical to SEQ ID NO: 61503

SEQ ID NO: 61507 - protein, 983 aa, Homo sapiens
MQPTYLPWLSAKEKKTNEWNKNDDRLLQAVENGDAEKVASLLGKKGASATKHDSEGKTAFHLAAAKGHVECLRVMITHGVDVTAQDTTGHSALHLAAKNSHHECIRKLLQSKCPAESVDSSGKTALHYAAAQGCLQAVQILCEHKSPINLKDLDGNIPLLLAVQNGHSEICHFLLDHGADVNSRNKSGRTALMLACEIGSSNAVEALIKKGADLNLVDSLGYNALHYSKLSENAGIQSLLLSKISQDADLKTPTKPKQHDQVSKISSERSGTPKKRKAPPPPISPTQLSDVSSPRSITSTPLSGKESVFFAEPPFKAEISSIRENKDRLSDSTTGADSLLDISSEADQQDLLSLLQAKVASLTLHNKELQDKLQAKSPKEAEADLSFDSYHSTQTDLGPSLGKPGETSPPDSKSSPSVLIHSLGKSTTDNDVRIQQLQEILQDLQKRLESSEAERKQLQVELQSRRAELVCLNNTEISENSSDLSQKLKETQSKYEEAMKEVLSVQKQMKLGLVSPESMDNYSHFHELRVTEEEINVLKQDLQNALEESERNKEKVRELEEKLVEREKGTVIKPPVEEYEEMKSSYCSVIENMNKEKAFLFEKYQEAQEEIMKLKDTLKSQMTQEASDEAEDMKEAMNRMIDELNKQVSELSQLYKEAQAELEDYRKRKSLEDVTAEYIHKAEHEKLMQLTNVSRAKAEDALSEMKSQYSKVLNELTQLKQLVDAQKENSVSITEHLQVITTLRTAAKEMEEKISNLKEHLASKEVEVAKLEKQLLEEKAAMTDAMVPRSSYEKLQSSLESEVSVLASKLKESVKEKEKVHSEVVQIRSEVSQVKREKENIQTLLKSKEQEVNELLQKFQQAQEELAEMKRYAESSSKLEEDKDKKINEMSKEVTKLKEALNSLSQLSYSTSSSKRQSQQLEALQQQVKQLQNQLAECKKQHQEVISVYRMHLLYAVQGQMDEDVQKVLKQILTMCKNQSQKK

SEQ ID NO: 61508 - protein, 951 aa, Homo sapiens
MKSLKAKFRKSDTNEWNKNDDRLLQAVENGDAEKVASLLGKKGASATKHDSEGKTAFHLAAAKGHVECLRVMITHGVDVTAQDTTGHSALHLAAKNSHHECIRKLLQSKCPAESVDSSGKTALHYAAAQGCLQAVQILCEHKSPINLKDLDGNIPLLLAVQNGHSEICHFLLDHGADVNSRNKSGRTALMLACEIGSSNAVEALIKKGADLNLVDSLGYNALHYSKLSENAGIQSLLLSKISQDADLKTPTKPKQLSDVSSPRSITSTPLSGKESVFFAEPPFKAEISSIRENKDRLSDSTTGADSLLDISSEADQQDLLSLLQAKVASLTLHNKELQDKLQAKSPKEAEADLSFDSYHSTQTDLGPSLGKPGETSPPDSKSSPSVLIHSLGKSTTDNDVRIQQLQEILQDLQKRLESSEAERKQLQVELQSRRAELVCLNNTEISENSSDLSQKLKETQSKYEEAMKEVLSVQKQMKLGLVSPESMDNYSHFHELRVTEEEINVLKQDLQNALEESERNKEKVRELEEKLVEREKGTVIKPPVEEYEEMKSSYCSVIENMNKEKAFLFEKYQEAQEEIMKLKDTLKSQMTQEASDEAEDMKEAMNRMIDELNKQVSELSQLYKEAQAELEDYRKRKSLEDVTAEYIHKAEHEKLMQLTNVSRAKAEDALSEMKSQYSKVLNELTQLKQLVDAQKENSVSITEHLQVITTLRTAAKEMEEKISNLKEHLASKEVEVAKLEKQLLEEKAAMTDAMVPRSSYEKLQSSLESEVSVLASKLKESVKEKEKVHSEVVQIRSEVSQVKREKENIQTLLKSKEQEVNELLQKFQQAQEELAEMKRYAESSSKLEEDKDKKINEMSKEVTKLKEALNSLSQLSYSTSSSKRQSQQLEALQQQVKQLQNQLAECKKQHQEVISVYRMHLLYAVQGQMDEDVQKVLKQILTMCKNQSQKK

SEQ ID NO: 61509 - protein, 530 aa, Homo sapiens
MDDLQSQNLSMDMTDSPPALANNRLENGMAQLITTEAWNINSTDLVKKALVTVPAPSILNPPAESQSGMALKVAATVLQPLCLGESPVVMPIHMQVEGSSAPELNPNGNATYVMTTQGPVQLPVVLEQHVFQHLNSPLVLPQEAPCSSSTIHNNLFQGAEDPEAQPQLLDLRIPSQPQEPTLPFEAVLQNLFPSQGTLGPPPCQPPPGYAPVPPQPFSSPLSPLVPPATLLVPYPVIVPLPVPVPIPIPIPMPQSSESKFSSSFPKPPSSFGLHPFKGTQTPLEKDELKPFDILQPKEYFQLSRHTVIKMGSENEALDLSMKSVPWLKAGEVSPPIFQEDAALDLSVAAHRKSEPPPETLYDSGASVDSSGHTVMEKLPSGMEISFAPATSHEAPAMMDSHISSSDAATEMLSQPNHPSGEVKAENNIEMVGESQAAKVIVSVEDAVPTIFCGKIKGLSGVSTKNFSFKREDSVLQGYDINSQGEESMGNAEPLRKPIKNRSIKLKKVNSQEIHMLPIKKQRLATFFPRK

SEQ ID NO: 61510 - protein, 530 aa, Homo sapiens; identical to SEQ ID NO: 61509

SEQ ID NO: 61511 - protein, 480 aa, Homo sapiens
MDDLQSQNLSMDMTDSPPALANNRLENGMAQLITTEAWNINSTDLVEGSSAPELNPNGNATYVMTTQGPVQLPVVLEQHVFQHLNSPLVLPQEAPCSSSTIHNNLFQGAEDPEAQPQLLDLRIPSQPQEPTLPFEAVLQNLFPSQGTLGPPPCQPPPGYAPVPPQPFSSPLSPLVPPATLLVPYPVIVPLPVPVPIPIPIPMPQSSESKFSSSFPKPPSSFGLHPFKGTQTPLEKDELKPFDILQPKEYFQLSRHTVIKMGSENEALDLSMKSVPWLKAGEVSPPIFQEDAALDLSVAAHRKSEPPPETLYDSGASVDSSGHTVMEKLPSGMEISFAPATSHEAPAMMDSHISSSDAATEMLSQPNHPSGEVKAENNIEMVGESQAAKVIVSVEDAVPTIFCGKIKGLSGVSTKNFSFKREDSVLQGYDINSQGEESMGNAEPLRKPIKNRSIKLKKVNSQEIHMLPIKKQRLATFFPRK

SEQ ID NO: 61512 - protein, 530 aa, Homo sapiens; identical to SEQ ID NO: 61509

SEQ ID NO: 61513 - protein, 530 aa, Homo sapiens; identical to SEQ ID NO: 61509

SEQ ID NO: 61514 - protein, 294 aa, Homo sapiens
MQPRRQRLPAPWSGPRGPRPTAPLLALLLLLAPVAAPAGSGDPDDPGQPQDAGVPRRLLQQAARAALHFFNFRSGSPSALRVLAEVQEGRAWINPKEGCKVHVVFSTERYNPESLLQEGEGRLGKCSARVFFKNQKPRPTINVTCTRLIEKKKRQQEDYLLYKQMKQLKNPLEIVSIPDNHGHIDPSLRLIWDLAFLGSSYVMWEMTTQVSHYYLAQLTSVRQWKTNDDTIDFDYTVLLHELSTQEIIPCRIHLVWYPGKPLKVKYHCQELQTPEEASGTEEGSAVVPTELSNF

SEQ ID NO: 61515 - protein, 228 aa, Homo sapiens
MQPRRQRLPAPWSGPRGPRPTAPLLALLLLLAPVAAPAGSGDPDDPGQPQDAGVPRRLLQQAARAALHFFNFRSGSPSALRVLAEVQEGRAWINPKEGCKVHVVFSTERYNPESLLQEGEGRLGKCSARVFFKNQKPRPTINVTCTRLIEKKKRQQEDYLLYKQMKQLKNPLEIVSIPDNHGHIDPSLRLIWDLAFLGSSYVMWEMTTQVSHYYLAQLTSVRQWVRKT

SEQ ID NO: 61516 - protein, 163 aa, Homo sapiens
MRRLLIPLALWLGAVGVGVAELTEAQRRGLQVALEEFHKHPPVQWAFQETSVESAVDTPFPAGIFVRLEFKLQQTSCRKRDWKKPECKVRPNGRKRKCLACIKLGSEDKVLGRLVHCPIETQVLREAEEHQETQCLRVQRAGEDPHSFYFPGQFAFSKALPRS

SEQ ID NO: 61517 - protein, 163 aa, Homo sapiens; identical to SEQ ID NO: 61516

SEQ ID NO: 61518 - protein, 163 aa, Homo sapiens; identical to SEQ ID NO: 61516

SEQ ID NO: 61519 - protein, 164 aa, Homo sapiens
MASPHQEPKPGDLIEIFRLGYEHWALYIGDGYVIHLAPPSEYPGAGSSSVFSVLSNSAEVKRERLEDVVGGCCYRVNNSLDHEYQPRPVEVIISSAKEMVGQKMKYSIVSRNCEHFVTQLRYGKSRCKQVEKAKVEVGVATALGILVVAGCSFAIRRYQKKATA

SEQ ID NO: 61520 - protein, 164 aa, Homo sapiens
MGLPEPKPKPGDLIEIFRLGYEHWALYIGDGYVIHLAPPSEYPGAGSSSVFSVLSNSAEVKRERLEDVVGGCCYRVNNSLDHEYQPRPVEVIISSAKEMVGQKMKYSIVSRNCEHFVTQLRYGKSRCKQVEKAKVEVGVATALGILVVAGCSFAIRRYQKKATA

SEQ ID NO: 61521 - protein, 462 aa, Homo sapiens
MASNSSSCPTPGGGHLNGYPVPPYAFFFPPMLGGLSPPGALTTLQHQLPVSGYSTPSPATIETQSSSSEEIVPSPPSPPPLPRIYKPCFVCQDKSSGYHYGVSACEGCKGFFRRSIQKNMVYTCHRDKNCIINKVTRNRCQYCRLQKCFEVGMSKESVRNDRNKKKKEVPKPECSESYTLTPEVGELIEKVRKAHQETFPALCQLGKYTTNNSSEQRVSLDIDLWDKFSELSTKCIIKTVEFAKQLPGFTTLTIADQITLLKAACLDILILRICTRYTPEQDTMTFSDGLTLNRTQMHNAGFGPLTDLVFAFANQLLPLEMDDAETGLLSAICLICGDRQDLEQPDRVDMLQEPLLEALKVYVRKRRPSRPHMFPKMLMKITDLRSISAKGAERVITLKMEIPGSMPPLIQEMLENSEGLDTLSGQPGGGGRDGGGLAPPPGSCSPSLSPSSNRSSPATHSP

SEQ ID NO: 61522 - protein, 633 aa, Homo sapiens
MYESVEVGGPTPNPFLVVDFYNQNRACLLPEKGLPAPGPYSTPLRTPLWNGSNHSIETQSSSSEEIVPSPPSPPPLPRIYKPCFVCQDKSSGYHYGVSACEGCKGFFRRSIQKNMVYTCHRDKNCIINKVTRNRCQYCRLQKCFEVGMSKESVRNDRNKKKKEVPKPECSESYTLTPEVGELIECAKRTRKPSLPSASWANTLRTTAQNNVSLWTLTSGTSSVNSPKCIIKTVEFAKQLPGFTTLTIADQITLLKAACLDILILRICTRYTPEQDTMTFSDGLTLNRTQMHNAGFGPLTDLVFAFANQLLPLEMDDAETGLLSAICLICGDRQDLEQPDRVDMLQEPLLEALKVYVRKRRPSRPHMFPKMLMKITDLRSISAKGAERVITLKMEIPGSMPPLIQEMLENSEGLDTLSGQPGGGGRDGGGLPRQAAVAPASAPAPTEAARPPTPRDRPRHMDTALALRPGFSLPFYRPCDPAPALPPPALPGSTGDLPWGTGREEAATPWTEAWALSGLPAPTAWADVRGRGQELSEAPGPGSQDGSWGPRVHQDTPLPSSPHLHHQQTPGLGSPILRTHKPLLPSWGTSTSPLPRLVTEGVGQGRGVPPVHTLPYQPQVLILAGFVFILIFLF

SEQ ID NO: 61523 - protein, 457 aa, Homo sapiens
MYESVEVGGPTPNPFLVVDFYNQNRACLLPEKGLPAPGPYSTPLRTPLWNGSNHSIETQSSSSEEIVPSPPSPPPLPRIYKPCFVCQDKSSGYHYGVSACEGCKGFFRRSIQKNMVYTCHRDKNCIINKVTRNRCQYCRLQKCFEVGMSKESVRNDRNKKKKEVPKPECSESYTLTPEVGELIEKVRKAHQETFPALCQLGKYTTNNSSEQRVSLDIDLWDKFSELSTKCIIKTVEFAKQLPGFTTLTIADQITLLKAACLDILILRICTRYTPEQDTMTFSDGLTLNRTQMHNAGFGPLTDLVFAFANQLLPLEMDDAETGLLSAICLICGDRQDLEQPDRVDMLQEPLLEALKVYVRKRRPSRPHMFPKMLMKITDLRSISAKGAERVITLKMEIPGSMPPLIQEMLENSEGLDTLSGQPGGGGRDGGGLAPPPGSCSPSLSPSSNRSSPATHSP

SEQ ID NO: 61524 - protein, 478 aa, Homo sapiens
MMSQTMTQAGVSFRHSVRAAQCHTRVPNTWPRATRPYASCRRSPRLRGRWPGSAGQGAGGRAPRAGWRAGDVTGSAIETQSSSSEEIVPSPPSPPPLPRIYKPCFVCQDKSSGYHYGVSACEGCKGFFRRSIQKNMVYTCHRDKNCIINKVTRNRCQYCRLQKCFEVGMSKESVRNDRNKKKKEVPKPECSESYTLTPEVGELIEKVRKAHQETFPALCQLGKYTTNNSSEQRVSLDIDLWDKFSELSTKCIIKTVEFAKQLPGFTTLTIADQITLLKAACLDILILRICTRYTPEQDTMTFSDGLTLNRTQMHNAGFGPLTDLVFAFANQLLPLEMDDAETGLLSAICLICGDRQDLEQPDRVDMLQEPLLEALKVYVRKRRPSRPHMFPKMLMKITDLRSISAKGAERVITLKMEIPGSMPPLIQEMLENSEGLDTLSGQPGGGGRDGGGLAPPPGSCSPSLSPSSNRSSPATHSP

SEQ ID NO: 61525 - protein, 462 aa, Homo sapiens; identical to SEQ ID NO: 61521

SEQ ID NO: 61526 - protein, 346 aa, Homo sapiens
MGQEILPARSPTLRLGSPTPHLPQELLRASPKGPPGRLQLGGLAVRNDRNKKKKEVPKPECSESYTLTPEVGELIEKVRKAHQETFPALCQLGKYTTNNSSEQRVSLDIDLWDKFSELSTKCIIKTVEFAKQLPGFTTLTIADQITLLKAACLDILILRICTRYTPEQDTMTFSDGLTLNRTQMHNAGFGPLTDLVFAFANQLLPLEMDDAETGLLSAICLICGDRQDLEQPDRVDMLQEPLLEALKVYVRKRRPSRPHMFPKMLMKITDLRSISAKGAERVITLKMEIPGSMPPLIQEMLENSEGLDTLSGQPGGGGRDGGGLAPPPGSCSPSLSPSSNRSSPAT

SEQ ID NO: 61527 - protein, 365 aa, Homo sapiens
MASNSSSCPTPGGGHLNGYPVPPYAFFFPPMLGGLSPPGALTTLQHQLPVSGYSTPSPATVRNDRNKKKKEVPKPECSESYTLTPEVGELIEKVRKAHQETFPALCQLGKYTTNNSSEQRVSLDIDLWDKFSELSTKCIIKTVEFAKQLPGFTTLTIADQITLLKAACLDILILRICTRYTPEQDTMTFSDGLTLNRTQMHNAGFGPLTDLVFAFANQLLPLEMDDAETGLLSAICLICGDRQDLEQPDRVDMLQEPLLEALKVYVRKRRPSRPHMFPKMLMKITDLRSISAKGAERVITLKMEIPGSMPPLIQEMLENSEGLDTLSGQPGGGGRDGGGLAPPPGSCSPSLSPSSNRSSPATHSP

SEQ ID NO: 61528 - protein, 382 aa, Homo sapiens
MVPSSPSPPPPPRVYKPCFVCNDKSSGYHYGVSSCEGCKGFFRRSIQKNMVYTCHRDKNCIINKVTRNRCQYCRLQKCFEVGMSKEAVRNDRNKKKKEVKEEGSPDSYELSPQLEELITKVSKAHQETFPSLCQLGKYTTNSSADHRVQLDLGLWDKFSELATKCIIKIVEFAKRLPGFTGLSIADQITLLKAACLDILMLRICTRYTPEQDTMTFSDGLTLNRTQMHNAGFGPLTDLVFAFAGQLLPLEMDDTETGLLSAICLICGDRMDLEEPEKVDKLQEPLLEALRLYARRRRPSQPYMFPRMLMKITDLRGISTKGAERAITLKMEIPGPMPPLIREMLENPEMFEDDSSQPGPHPNASSEDEVPGGQGKGGLKSPA

SEQ ID NO: 61529 - protein, 443 aa, Homo sapiens
MYDCMETFAPGPRRLYGAAGPGAGLLRRATGGSCFAGLESFAWPQPASLQSVETQSTSSEEMVPSSPSPPPPPRVYKPCFVCNDKSSGYHYGVSSCEGCKGFFRRSIQKNMVYTCHRDKNCIINKVTRNRCQYCRLQKCFEVGMSKEAVRNDRNKKKKEVKEEGSPDSYELSPQLEELITKVSKAHQETFPSLCQLGKYTTNSSADHRVQLDLGLWDKFSELATKCIIKIVEFAKRLPGFTGLSIADQITLLKAACLDILMLRICTRYTPEQDTMTFSDGLTLNRTQMHNAGFGPLTDLVFAFAGQLLPLEMDDTETGLLSAICLICGDRMDLEEPEKVDKLQEPLLEALRLYARRRRPSQPYMFPRMLMKITDLRGISTKGAERAITLKMEIPGPMPPLIREMLENPEMFEDDSSQPGPHPNASSEDEVPGGQGKGGLKSPA

SEQ ID NO: 61530 - protein, 454 aa, Homo sapiens
MATNKERLFAAGALGPGSGYPGAGFPFAFPGALRGSPPFEMLSPSFRGLGQPDLPKEMASLSVETQSTSSEEMVPSSPSPPPPPRVYKPCFVCNDKSSGYHYGVSSCEGCKGFFRRSIQKNMVYTCHRDKNCIINKVTRNRCQYCRLQKCFEVGMSKEAVRNDRNKKKKEVKEEGSPDSYELSPQLEELITKVSKAHQETFPSLCQLGKYTTNSSADHRVQLDLGLWDKFSELATKCIIKIVEFAKRLPGFTGLSIADQITLLKAACLDILMLRICTRYTPEQDTMTFSDGLTLNRTQMHNAGFGPLTDLVFAFAGQLLPLEMDDTETGLLSAICLICGDRMDLEEPEKVDKLQEPLLEALRLYARRRRPSQPYMFPRMLMKITDLRGISTKGAERAITLKMEIPGPMPPLIREMLENPEMFEDDSSQPGPHPNASSEDEVPGGQGKGGLKSPA

SEQ ID NO: 61531 - protein, 454 aa, Homo sapiens; identical to SEQ ID NO: 61530

SEQ ID NO: 61532 - protein, 101 aa, Homo sapiens
HHQDEFAKRLPGFTGLSIADQITLLKAACLDILMLRICTRYTPEQDTMTFSDGLTLNRTQMHNAGFGPLTDLVFAFAGQLLPLEMDDTETGLLSAICLICG

SEQ ID NO: 61533 - protein, 432 aa, Homo sapiens
MLALPLPPCWSGAPPGEEGESAAGPWCFQHPVSLQAGSRCTTVWKRLPRVRDGCTGRPGPGPACCAEPPAAPVSPDLNLLPGRNPPACNGFFRRSIQKNMVYTCHRDKNCIINKVTRNRCQYCRLQKCFEVGMSKEAVRNDRNKKKKEVKEEGSPDSYELSPQLEELITKVSKAHQETFPSLCQLGKYTTNSSADHRVQLDLGLWDKFSELATKCIIKIVEFAKRLPGFTGLSIADQITLLKAACLDILMLRICTRYTPEQDTMTFSDGLTLNRTQMHNAGFGPLTDLVFAFAGQLLPLEMDDTETGLLSAICLICGDRMDLEEPEKVDKLQEPLLEALRLYARRRRPSQPYMFPRMLMKITDLRGISTKGAERAITLKMEIPGPMPPLIREMLENPEMFEDDSSQPGPHPNASSEDEVPGGQGKGGLKSPA

SEQ ID NO: 61534 - protein, 462 aa, Homo sapiens
MDTKHFLPLDFSTQVNSSLTSPTGRGSMAAPSLHPSLGPGIGSPGQLHSPISTLSSPINGMGPPFSVISSPMGPHSMSVPTTPTLGFSTGSPQLSSPMNPVSSSEDIKPPLGLNGVLKVPAHPSGNMASFTKHICAICGDRSSGKHYGVYSCEGCKGFFKRTVRKDLTYTCRDNKDCLIDKRQRNRCQYCRYQKCLAMGMKREAVQEERQRGKDRNENEVESTSSANEDMPVERILEAELAVEPKTETYVEANMGLNPSSPNDPVTNICQAADKQLFTLVEWAKRIPHFSELPLDDQVILLRAGWNELLIASFSHRSIAVKDGILLATGLHVHRNSAHSAGVGAIFDRVLTELVSKMRDMQMDKTELGCLRAIVLFNPDSKGLSNPAEVEALREKVYASLEAYCKHKYPEQPGRFAKLLLRLPALRSIGLKCLEHLFFFKLIGDTPIDTFLMEMLEAPHQMT

SEQ ID NO: 61535 - protein, 365 aa, Homo sapiens
MNPVSSSEDIKPPLGLNGVLKVPAHPSGNMASFTKHICAICGDRSSGKHYGVYSCEGCKGFFKRTVRKDLTYTCRDNKDCLIDKRQRNRCQYCRYQKCLAMGMKREAVQEERQRGKDRNENEVESTSSANEDMPVERILEAELAVEPKTETYVEANMGLNPSSPNDPVTNICQAADKQLFTLVEWAKRIPHFSELPLDDQVILLRAGWNELLIASFSHRSIAVKDGILLATGLHVHRNSAHSAGVGAIFDRVLTELVSKMRDMQMDKTELGCLRAIVLFNPDSKGLSNPAEVEALREKVYASLEAYCKHKYPEQPGRFAKLLLRLPALRSIGLKCLEHLFFFKLIGDTPIDTFLMEMLEAPHQMT

SEQ ID NO: 61536 - protein, 533 aa, Homo sapiens
MSWAARPPFLPQRHAAGQCGPVGVRKEMHCGVASRWRRRRPWLDPAAAAAAAVAGGEQQTPEPEPGEAGRDGMGDSGRDSRSPDSSSPNPLPQGVPPPSPPGPPLPPSTAPSLGGSGAPPPPPMPPPPLGSPFPVISSSMGSPGLPPPAPPGFSGPVSSPQINSTVSLPGGGSGPPEDVKPPVLGVRGLHCPPPPGGPGAGKRLCAICGDRSSGKHYGVYSCEGCKGFFKRTIRKDLTYSCRDNKDCTVDKRQRNRCQYCRYQKCLATGMKREAVQEERQRGKDKDGDGEGAGGAPEEMPVDRILEAELAVEQKSDQGVEGPGGTGGSGSSPNDPVTNICQAADKQLFTLVEWAKRIPHFSSLPLDDQVILLRAGWNELLIASFSHRSIDVRDGILLATGLHVHRNSAHSAGVGAIFDRVLTELVSKMRDMRMDKTELGCLRAIILFNPDAKGLSNPSEVEVLREKVYASLETYCKQKYPEQQGRFAKLLLRLPALRSIGLKCLEHLFFFKLIGDTPIDTFLMEMLEAPHQLA

SEQ ID NO: 61537 - protein, 537 aa, Homo sapiens
MSWAARPPFLPQRHAAGQCGPVGVRKEMHCGVASRWRRRRPWLDPAAAAAAAVAGGEQQTPEPEPGEAGRDGMGDSGRDSRSPDSSSPNPLPQGVPPPSPPGPPLPPSTAPSLGGSGAPPPPPMPPPPLGSPFPVISSSMGSPGLPPPAPPGFSGPVSSPQINSTVSLPGGGSGPPEDVKPPVLGVRGLHCPPPPGGPGAGKRLCAICGDRSSGKHYGVYSCEGCKGFFKRTIRKDLTYSCRDNKDCTVDKRQRNRCQYCRYQKCLATGMKREAVQEERQRGKDKDGDGEGAGGAPEEMPVDRILEAELAVEQKSDQGVEGPGGTGGSGSSPNDPVTNICQAADKQLFTLVEWAKRIPHFSSLPLDDQVILLRAGWNELLIASFSHRSIDVRDGILLATGLHVHRNSAHSAGVGAIFDRSLSRVLTELVSKMRDMRMDKTELGCLRAIILFNPDAKGLSNPSEVEVLREKVYASLETYCKQKYPEQQGRFAKLLLRLPALRSIGLKCLEHLFFFKLIGDTPIDTFLMEMLEAPHQLA

SEQ ID NO: 61538 - protein, 537 aa, Homo sapiens; identical to SEQ ID NO: 61537

SEQ ID NO: 61539 - protein, 533 aa, Homo sapiens; identical to SEQ ID NO: 61536

SEQ ID NO: 61540 - protein, 286 aa, Homo sapiens
MPQGSVGRWGCEKKCIVGSRPGGGGDGPGWIPQRRRRRRWQAENNKPRSRSQGRLDGTGWATAGGINSTVSLPGGGSGPPEDVKPPVLGVRGLHCPPPPGGPGAGKRLCAICGDRSSGKHYGVYSCEGCKGFFKRTIRKDLTYSCRDNKDCTVDKRQRNRCQYCRYQKCLATGMKREAVQEERQRGKDKDGDGEGAGGAPEEMPVDRILEAELAVEQKSDQGVEGPGGTGGSGSSVSVGVNPLSFVMGVGGGSLGLFYIPSPSFPLITFLTLLGTGGAAKQGLSNI

SEQ ID NO: 61541 - protein, 533 aa, Homo sapiens; identical to SEQ ID NO: 61536

SEQ ID NO: 61542 - protein, 96 aa, Homo sapiens
  VARIANT 1: note = MOD_RES - Any amino acid
XSPNDPVTNICQAADKQLFTLVEWAKRIPHFSSLPLDDQVILLRAGLHVHRNSAHSAGVGAIFDRVLTELVSKMRDMRMDKTELGCLRAIILFNPD

SEQ ID NO: 61543 - protein, 533 aa, Homo sapiens; identical to SEQ ID NO: 61536

SEQ ID NO: 61544 - protein, 96 aa, Homo sapiens; identical to SEQ ID NO: 61542
  VARIANT 1: note = MOD_RES - Any amino acid

SEQ ID NO: 61545 - protein, 537 aa, Homo sapiens; identical to SEQ ID NO: 61537

SEQ ID NO: 61546 - protein, 533 aa, Homo sapiens; identical to SEQ ID NO: 61536

SEQ ID NO: 61547 - protein, 533 aa, Homo sapiens; identical to SEQ ID NO: 61536

SEQ ID NO: 61548 - protein, 96 aa, Homo sapiens; identical to SEQ ID NO: 61542
  VARIANT 1: note = MOD_RES - Any amino acid

SEQ ID NO: 61549 - protein, 96 aa, Homo sapiens; identical to SEQ ID NO: 61542
  VARIANT 1: note = MOD_RES - Any amino acid

SEQ ID NO: 61550 - protein, 537 aa, Homo sapiens; identical to SEQ ID NO: 61537

SEQ ID NO: 61551 - protein, 96 aa, Homo sapiens; identical to SEQ ID NO: 61542
  VARIANT 1: note = MOD_RES - Any amino acid

SEQ ID NO: 61552 - protein, 537 aa, Homo sapiens; identical to SEQ ID NO: 61537

SEQ ID NO: 61553 - protein, 537 aa, Homo sapiens; identical to SEQ ID NO: 61537

SEQ ID NO: 61554 - protein, 347 aa, Homo sapiens
MRECGGGPGAGKRLCAICGDRSSGKHYGVYSCEGCKGFFKRTIRKDLTYSCRDNKDCTVDKRQRNRCQYCRYQKCLATGMKREAVQEERQRGKDKDGDGEGAGGAPEEMPVDRILEAELAVEQKSDQGVEGPGGTGGSGSSPNDPVTNICQAADKQLFTLVEWAKRIPHFSSLPLDDQVILLRAGWNELLIASFSHRSIDVRDGILLATGLHVHRNSAHSAGVGAIFDRSLSRVLTELVSKMRDMRMDKTELGCLRAIILFNPDAKGLSNPSEVEVLREKVYASLETYCKQKYPEQQGRFAKLLLRLPALRSIGLKCLEHLFFFKLIGDTPIDTFLMEMLEAPHQLA

SEQ ID NO: 61555 - protein, 392 aa, Homo sapiens
MGSPGLPPPAPPGFSGPVSSPQINSTVSLPGGGSGPPEDVKPPVLGVRGLHCPPPPGGPGAGKRLCAICGDRSSGKHYGVYSCEGCKGFFKRTIRKDLTYSCRDNKDCTVDKRQRNRCQYCRYQKCLATGMKREAVQEERQRGKDKDGDGEGAGGAPEEMPVDRILEAELAVEQKSDQGVEGPGGTGAPSPNDPVTNICQAADKQLFTLVEWAKRIPHFSSLPLDDQVILLRAGWNELLIASFSHRSIDVRDGILLATGLHVHRNSAHSAGVGAIFDRVLTELVSKMRDMRMDKTELGCLRAIILFNPDAKGLSNPSEVEVLREKVYASLETYCKQKYPEQQGRFAKLLLRLPALRSIGLKCLEHLFFFKLIGDTPIDTFLMEMLEAPHQLA

SEQ ID NO: 61556 - protein, 389 aa, Homo sapiens
MGSPGLPPPAPPGFSGPVSSPQINSTVSLPGGGSGPPEDVKPPVLGVRGLHCPPPPGGPGAGKRLCAICGDRSSGKHYGVYSCEGCKGFFKRTIRKDLTYSCRDNKDCTVDKRQRNRCQYCRYQKCLATGMKREAVQEERQRGKDKDGDGEGAGGAPEEMPVDRILEAELAVEQKSDQGGSQHISKSPNDPVTNICQAADKQLFTLVEWAKRIPHFSSLPLDDQVILLRAGWNELLIASFSHRSIDVRDGILLATGLHVHRNSAHSAGVGAIFDRVLTELVSKMRDMRMDKTELGCLRAIILFNPDAKGLSNPSEVEVLREKVYASLETYCKQKYPEQQGRFAKLLLRLPALRSIGLKCLEHLFFFKLIGDTPIDTFLMEMLEAPHQLA

SEQ ID NO: 61557 - protein, 347 aa, Homo sapiens; identical to SEQ ID NO: 61554

SEQ ID NO: 61558 - protein, 392 aa, Homo sapiens; identical to SEQ ID NO: 61555

SEQ ID NO: 61559 - protein, 389 aa, Homo sapiens; identical to SEQ ID NO: 61556

SEQ ID NO: 61560 - protein, 286 aa, Homo sapiens; identical to SEQ ID NO: 61540

SEQ ID NO: 61561 - protein, 389 aa, Homo sapiens; identical to SEQ ID NO: 61556

SEQ ID NO: 61562 - protein, 286 aa, Homo sapiens; identical to SEQ ID NO: 61540

SEQ ID NO: 61563 - protein, 392 aa, Homo sapiens; identical to SEQ ID NO: 61555

SEQ ID NO: 61564 - protein, 347 aa, Homo sapiens; identical to SEQ ID NO: 61554

SEQ ID NO: 61565 - protein, 392 aa, Homo sapiens; identical to SEQ ID NO: 61555

SEQ ID NO: 61566 - protein, 392 aa, Homo sapiens; identical to SEQ ID NO: 61555

SEQ ID NO: 61567 - protein, 286 aa, Homo sapiens; identical to SEQ ID NO: 61540

SEQ ID NO: 61568 - protein, 389 aa, Homo sapiens; identical to SEQ ID NO: 61556

SEQ ID NO: 61569 - protein, 347 aa, Homo sapiens; identical to SEQ ID NO: 61554

SEQ ID NO: 61570 - protein, 389 aa, Homo sapiens; identical to SEQ ID NO: 61556

SEQ ID NO: 61571 - protein, 347 aa, Homo sapiens; identical to SEQ ID NO: 61554

SEQ ID NO: 61572 - protein, 286 aa, Homo sapiens; identical to SEQ ID NO: 61540

SEQ ID NO: 61573 - protein, 463 aa, Homo sapiens
MYGNYSHFMKFPAGYGGSPGHTGSTSMSPSAALSTGKPMDSHPSYTDTPVSAPRTLSAVGTPLNALGSPYRVITSAMGPPSGALAAPPGINLVAPPSSQLNVVNSVSSSEDIKPLPGLPGIGNMNYPSTSPGSLVKHICAICGDRSSGKHYGVYSCEGCKGFFKRTIRKDLIYTCRDNKDCLIDKRQRNRCQYCRYQKCLVMGMKREAVQEERQRSRERAESEAECATSGHEDMPVERILEAELAVEPKTESYGDMNMENSTNDPVTNICHAADKQLFTLVEWAKRIPHFSDLTLEDQVILLRAGWNELLIASFSHRSVSVQDGILLATGLHVHRSSAHSAGVGSIFDRVLTELVSKMKDMQMDKSELGCLRAIVLFNPDAKGLSNPSEVETLREKVYATLEAYTKQKYPEQPGRFAKLLLRLPALRSIGLKCLEHLFFFKLIGDTPIDTFLMEMLETPLQIT

SEQ ID NO: 61574 - protein, 134 aa, Homo sapiens
MTRDQNGTWEMESNENFEGYMKALDIDFATRKIAVRLTQTKVIDQDGDNFKTKTTSTFRNYDVDFTVGVEFDEYTKSLDNRHVKALVTWEGDVLVCVQKGEKENRGWKQWIEGDKLYLELTCGDQVCRQVFKKK

SEQ ID NO: 61575 - protein, 24 aa, Homo sapiens
MTRDQNGTWEMESNENFEGYMKAL

SEQ ID NO: 61576 - protein, 103 aa, Homo sapiens
MTRDQNGTWEMESNENFEGYMKALDIDFATRKIAVRLTQTKVIDQDGDNFKTKTTSTFRNYDVDFTVGVEFDEYTKSLDNRHVKALVTWEGDVLVCVQKGEKE

SEQ ID NO: 61577 - protein, 1247 aa, Homo sapiens
MMREWVLLMSVLLCGLAGPTHLFQPSLVLDMAKVLLDNYCFPENLLGMQEAIQQAIKSHEILSISDPQTLASVLTAGVQSSLNDPRLVISYEPSTPEPPPQVPALTSLSEEELLAWLQRGLRHEVLEGNVGYLRVDSVPGQEVLSMMGEFLVAHVWGNLMGTSALVLDLRHCTGGQVSGIPYIISYLHPGNTILHVDTIYNRPSNTTTEIWTLPQVLGERYGADKDVVVLTSSQTRGVAEDIAHILKQMRRAIVVGERTGGGALDLRKLRIGESDFFFTVPVSRSLGPLGGGSQTWEGSGVLPCVGTPAEQALEKALAILTLRSALPGVVHCLQEVLKDYYTLVDRVPTLLQHLASMDFSTVVSEEDLVTKLNAGLQAASEDPRLLVRAIGPTETPSWPAPDAAAEDSPGVAPELPEDEAIRQALVDSVFQVSVLPGNVGYLRFDSFADASVLGVLAPYVLRQVWEPLQDTEHLIMDLRHNPGGPSSAVPLLLSYFQGPEAGPVHLFTTYDRRTNITQEHFSHMELPGPRYSTQRGVYLLTSHRTATAAEEFAFLMQSLGWATLVGEITAGNLLHTRTVPLLDTPEGSLALTVPVLTFIDNHGEAWLGGGVVPDAIVLAEEALDKAQEVLEFHQSLGALVEGTGHLLEAHYARPEVVGQTSALLRAKLAQGAYRTAVDLESLASQLTADLQEVSGDHRLLVFHSPGELVVEEAPPPPPAVPSPEELTYLIEALFKTEVLPGQLGYLRFDAMAELETVKAVGPQLVRLVWQQLVDTAALVIDLRYNPGSYSTAIPLLCSYFFEAEPRQHLYSVFDRATSKVTEVWTLPQVAGQRYGSHKDLYILMSHTSGSAAEAFAHTMQDLQRATVIGEPTAGGALSVGIYQVGSSPLYASMPTQMAMSATTGKAWDLAGVEPDITVPMSEALSIAQDIVALRAKVPTVLQTAGKLVADNYASAELGAKMATKLSGLQSRYSRVTSEVALAEILGADLQMLSGDPHLKAAHIPENAKDRIPGIVPMQIPSPEVFEELIKFSFHTNVLEDNIGYLRFDMFGDGELLTQVSRLLVEHIWKKIMHTDAMIIDMRFNIGGPTSSIPILCSYFFDEGPPVLLDKIYSRPDDSVSELWTHAQVVGERYGSKKSMVILTSSVTAGTAEEFTYIMKRLGRALVIGEVTSGGCQPPQTYHVDDTNLYLTIPTARSVGASDGSSWEGVGVTPHVVVPAEEALARAKEMLQHNQLRVKRSPGLQDHL

SEQ ID NO: 61578 - protein, 199 aa, Homo sapiens
MNYSKIPAQVDLRRQTERDCRVSSFRVKENFDKARFSGTWYAMAKKDPEGLFLQDNIVAEFSVDETGQMSATAKGRVRLLNNWDVCADMVGTFTDTEDPAKFKMKYWGVASFLQKGNDDHWIVDTDYDTYAVQYSCRLLNLDGTCADSYSFVFSRDPNGLPPEAQKIVRQRQEELCLARQYRLIVHNGYCDGRSERNLL

SEQ ID NO: 61579 - protein, 201 aa, Homo sapiens
MKWVWALLLLAALGSGRAERDCRVSSFRVKENFDKARFSGTWYAMAKKDPEGLFLQDNIVAEFSVDETGQMSATAKGRVRLLNNWDVCADMVGTFTDTEDPAKFKMKYWGVASFLQKGNDDHWIVDTDYDTYAVQYSCRLLNLDGTCADSYSFVFSRDPNGLPPEAQKIVRQRQEELCLARQYRLIVHNGYCDGRSERNLL

SEQ ID NO: 61580 - protein, 201 aa, Homo sapiens; identical to SEQ ID NO: 61579

SEQ ID NO: 61581 - protein, 199 aa, Homo sapiens
MNYSKIPAQVDLRRQAERDCRVSSFRVKENFDKARFSGTWYAMAKKDPEGLFLQDNIVAEFSVDETGQMSATAKGRVRLLNNWDVCADMVGTFTDTEDPAKFKMKYWGVASFLQKGNDDHWIVDTDYDTYAVQYSCRLLNLDGTCADSYSFVFSRDPNGLPPEAQKIVRQRQEELCLARQYRLIVHNGYCDGRSERNLL

SEQ ID NO: 61582 - protein, 135 aa, Homo sapiens
MPPNLTGYYRFVSQKNMEDYLQALNISLAVRKIALLLKPDKEIEHQGNHMTVRTLSTFRNYTVQFDVGVEFEEDLRSVDGRKCQTIVTWEEEHLVCVQKGEVPNRGWRHWLEGEMLYLELTARDAVCEQVFRKVR

SEQ ID NO: 61583 - protein, 341 aa, Homo sapiens
MNIVVEFFVVTFKVLWAFVLAAARWLVRPKEKSVAGQVCLITGAGSGLGRLFALEFARRRALLVLWDINTQSNEETAGMVRHIYRDLEAADAAALQAGNGEEEILPHCNLQVFTYTCDVGKRENVYLTAERVRKEVGEVSVLVNNAGVVSGHHLLECPDELIERTMMVNCHAHFWTTKAFLPTMLEINHGHIVTVASSLGLFSTAGVEDYCASKFGVVGFHESLSHELKAAEKDGIKTTLVCPYLVDTGMFRGCRIRKEIEPFLPPLKPDYCVKQAMKAILTDQPMICTPRLMYIVTFMKSILPFEAVVCMYRFLGADKCMYPFIAQRKQATNNNEAKNGI

SEQ ID NO: 61584 - protein, 318 aa, Homo sapiens
MVELMFPLLLLLLPFLLYMAAPQIRKMLSSGVCTSTVQLPGKVVVVTGANTGIGKETAKELAQRGARVYLACRDVEKGELVAKEIQTTTGNQQVLVRKLDLSDTKSIRAFAKGFLAEEKHLHVLINNAGVMMCPYSKTADGFEMHIGVNHLGHFLLTHLLLEKLKESAPSRIVNVSSLAHHLGRIHFHNLQGEKFYNAGLAYCHSKLANILFTQELARRLKGSGVTTYSVHPGTVQSELVRHSSFMRWMWWLFSFFIKTPQQGAQTSLHCALTEGLEILSGNHFSDCHVAWVSAQARNETIARRLWDVSCDLLGLPID

SEQ ID NO: 61585 - protein, 305 aa, Homo sapiens
MVELMFPLLLLLLPFLLYMAAPQIRKMLSSGVCTSTVQLPGKVVVVTGANTGARVYLACRDVEKGELVAKEIQTTTGNQQVLVRKLDLSDTKSIRAFAKGFLAEEKHLHVLINNAGVMMCPYSKTADGFEMHIGVNHLGHFLLTHLLLEKLKESAPSRIVNVSSLAHHLGRIHFHNLQGEKFYNAGLAYCHSKLANILFTQELARRLKGSGVTTYSVHPGTVQSELVRHSSFMRWMWWLFSFFIKTPQQGAQTSLHCALTEGLEILSGNHFSDCHVAWVSAQARNETIARRLWDVSCDLLGLPID

SEQ ID NO: 61586 - protein, 316 aa, Homo sapiens
MLVTLGLLTSFFSFLYMVAPSIRKFFAGGVCRTNVQLPGKVVVITGANTGIGKETARELASRGARVYIACRDVLKGESAASEIRVDTKNSQVLVRKLDLSDTKSIRAFAEGFLAEEKQLHILINNAGVMMCPYSKTADGFETHLGVNHLGHFLLTYLLLERLKVSAPARVVNVSSVAHHIGKIPFHDLQSEKRYSRGFAYCHSKLANVLFTRELAKRLQGTGVTTYAVHPGVVRSELVRHSSLLCLLWRLFSPFVKTAREGAQTSLHCALAEGLEPLSGKYFSDCKRTWVSPRARNNKTAERLWNVSCELLGIRWE

SEQ ID NO: 61587 - protein, 316 aa, Homo sapiens; identical to SEQ ID NO: 61586

SEQ ID NO: 61588 - protein, 316 aa, Homo sapiens; identical to SEQ ID NO: 61586

SEQ ID NO: 61589 - protein, 318 aa, Homo sapiens
MWLPLLLGALLWAVLWLLRDRQSLPASNAFVFITGCDSGFGRLLALQLDQRGFRVLASCLTPSGAEDLQRVASSRLHTTLLDITDPQSVQQAAKWVEMHVKEAGLFGLVNNAGVAGIIGPTPWLTRDDFQRVLNVNTMGPIGVTLALLPLLQQARGRVINITSVLGRLAANGGGYCVSKFGLEAFSDSLRRDVAHFGIRVSIVEPGFFRTPVTNLESLEKTLQACWARLPPATQAHYGGAFLTKYLKMQQRIMNLICDPDLTKVSRCLEHALTARHPRTRYSPGWDAKLLWLPASYLPASLVDAVLTWVLPKPAQAVY

SEQ ID NO: 61590 - protein, 318 aa, Homo sapiens; identical to SEQ ID NO: 61589

SEQ ID NO: 61591 - protein, 311 aa, Homo sapiens
MAAAPRTVLISGCSSGIGLELAVQLAHDPKKRYQVVATMRDLGKKETLEAAAGEALGQTLTVAQLDVCSDESVAQCLSCIQGEVDVLVNNAGMGLVGPLEGLSLAAMQNVFDTNFFGAVRLVKAVLPGMKRRRQGHIVVISSVMGLQGVIFNDVYAASKFALEGFFESLAIQLLQFNIFISLVEPGPVVTEFEGKLLAQVSMAEFPGTDPETLHYFRDLYLPASRKLFCSVGQNPQDVVQAIVNVISSTRPPLRRQTNIRYSPLTTLKTVDSSGSLYVRTTHRLLFRCPRLLNLGLQCLSCGCLPTRVRPR

SEQ ID NO: 61592 - protein, 224 aa, Homo sapiens
MSRKIEGFLLLLLFGYEATLGLSSTEDEGEDPWYQKACKCDCQGGPNALWSAGATSLDCIPECPYHKPLGFESGEVTPDQITCSNPEQYVGWYSSWTANKARLNSQGFGCAWLSKFQDSSQWLQIDLKEIKVISGILTQGRCDIDEWMTKYSVQYRTDERLNWIYYKDQTGNNRVFYGNSDRTSTVQNLLRPPIISRFIRLIPLGWHVRIAIRMELLECVSKCA

SEQ ID NO: 61593 - protein, 1358 aa, Homo sapiens
MIEPSEDSFETMMEHKNPSSKQMESSEGSSNTTEATSGSGVRGEAGPASGPAQEKKEPPSGPLQEMEELPTDLLQDMEEPSSGPRKEIEDPPNDLLQDLEESCNGSHQARGDPLSGASDRMKEASVNPSGAREEQEAHTDLKESGREETPQEQNQTEHSTAELMAMVRSIISLYFRMQDLKEQQRVAEEILIKGINAGQLPAPKHFSGDRREFHEFIVLCQLTLQSYPRMFYNDRLRVGYVINHLSGLALEWAKALLQENSPLIGDFPAFLEAMSEVFEYRQALRVAEEAMFTIRQGGRSATEYIDEFQSLVPILGWPDEVLQAHLCQGLNEEIRHYLFRVPQPDSLDSLIVLILQIEEKLAERRAMLRLPPEARPRNLTWIDSPAPERWMVSSWLPSEVHPDINRAHLFLLLMVRVNPYHSVAVQALVDSGADGNFMDEKFAQEHYVELYEKPYPQPVQSVDGSLIGNEPVWLYTEPLVCIHQNHQESIEFDIVPSPNFSVVLGIRWLRVHAPEVDWIKGRCTFHSPYCLKNCFRPPPPCIALERHGMSLLPGLPHPYSDLADVFNPKEADDETSDQPSSDGSDDLSESEPSELQQAGDSDHSETFYECPSTAPWEPVGARMQERARLQEEYWDLQDMLTNRQDYIQMIPELFDQLHGAEWFTKLELRGTIVEESVNGHRTEDVWKAAFGLELEEMKSYQPFALSPDPIIPQNVIHFILKDMLGFFVLSYGQEVLIYSMSQEEHLHHVRQVLVRFRHHNVYCSLDKSQFHRQTVEFLGFVVTPKGVKLNKNVMTIITGYPTPGSKLSLRNFIEFVFPYRHFVERFSIIAEPLVRQLLSSYQFYWGVEEQEAFECLKRAFRKAPLLHHPKPQNPFYLETGVTGTALHASLIQIDDQTGKRACCAFYSRNISPIEVEYSQAEMKILPIRAAFMVWCRYLENTEEPIMILLNTEDLASLNNDRLTVLLPGHWVFFFSHFNFDVMELPEQDGGRALPPVRNLRWRRAFQRNTAARQTLLLASRGFPRDPSTESGEEENEEQDELNEQILRQELLAMIPIDQILNSFLAHFSMAQIRAVILHFFRGLLYWKNTLALAAILVLLRVRQCLSLRPAPAMRVARPQPQRSLRLILDSSLIAGSSITTAITQLLTQMPALVGANTIPAQELAELFLGPGRWQRNALHSQAHRGLQFTPGFWLTLCEFFGVRVTPQEGHLPALRQNRYLELHVVGDEDVVLREALQDDLQRYRQCGLHDGLQDTSQDKQDNDVQEAPPSHTAATHPPRPRHLMDPQVLEFLGSRLLHIHSADGQLHLLSREQAARALSQFLTLIYRRALPIPAWESQPREQARLEELPDEDEDANLD

SEQ ID NO: 61594 - protein, 3130 aa, Homo sapiens
MFSVRIVTADYYMASPLQGLDTCQSPLTQAPVKKVPVVRVFGATPAGQKTCLHLHGIFPYLYVPYDGYGQQPESYLSQMAFSIDRALNVALGNPSSTAQHVFKVSLVSGMPFYGYHEKERHFMKIYLYNPTMVKRICELLQSGAIMNKFYQPHEAHIPYLLQLFIDYNLYGMNLINLAAVKFRKARRKSNTLHATGSCKNHLSGNSLADTLFRWEQDEIPSSLILEGVEPQSTCELEVDAVAADILNRLDIEAQIGGNPGLQAIWEDEKQRRRNRNETSQMSQPESQDHRFVPATESEKKFQKRLQEILKQNDFSVTLSGSVDYSDGSQEFSAELTLHSEVLSPEMLQCTPANMVEVHKDKESSKGHTRHKVEEALINEEAILNLMENSQTFQPLTQRLSESPVFMDSSPDEALVHLLAGLESDGYRGERNRMPSPCRSFGNNKYPQNSDDEENEPQIEKEEMELSLVMSQRWDSNIEEHCAKKRSLCRNTHRSSTEDDDSSSGEEMEWSDNSLLLASLSIPQLDGTADENSDNPLNNENSRTHSSVIATSKLSVKPSIFHKDAATLEPSSSAKITFQCKHTSALSSHVLNKEDLIEDLSQTNKNTEKGLDNSVTSFTNESTYSMKYPGSLSSTVHSENSHKENSKKEILPVSSCESSIFDYEEDIPSVTRQVPSRKYTNIRKIEKDSPFIHMHRHPNENTLGKNSFNFSDLNHSKNKVSSEGNEKGNSTALSSLFPSSFTENCELLSCSGENRTMVHSLNSTADESGLNKLKIRYEEFQEHKTEKPSLSQQAAHYMFFPSVVLSNCLTRPQKLSPVTYKLQPGNKPSRLKLNKRKLAGHQETSTKSSETGSTKDNFIQNNPCNSNPEKDNALASDLTKTTRGAFENKTPTDGFIDCHFGDGTLETEQSFGLYGNKYTLRAKRKVNYETEDSESSFVTHNSKISLPHPMEIGESLDGTLKSRKRRKMSKKLPPVIIKYIIINRFRGRKNMLVKLGKIDSKEKQVILTEEKMELYKKLAPLKDFWPKVPDSPATKYPIYPLTPKKSHRRKSKHKSAKKKTGKQQRTNNENIKRTLSFRKKRSHAILSPPSPSYNAETEDCDLNYSDVMSKLGFLSERSTSPINSSPPRCWSPTDPRAEEIMAAAEKEAMLFKGPNVYKKTVNSRIGKTSRARAQIKKSKAKLANPSIVTKKRNKRNQTNKLVDDGKKKPRAKQKTNEKGTSRKHTTLKDEKIKSQSGAEVKFVLKHQNVSEFASSSGGSQLLFKQKDMPLMGSAVDHPLSASLPTGINAQQKLSGCFSSFLESKKSVDLQTFPSSRDDLHPSVVCNSIGPGVSKINVQRPHNQSAMFTLKESTLIQKNIFDLSNHLSQVAQNTQISSGMSSKIEDNANNIQRNYLSSIGKLSEYRNSLESKLDQAYTPNFLHCKDSQQQIVCIAEQSKHSETCSPGNTASEESQMPNNCFVTSLRSPIKQIAWEQKQRGFILDMSNFKPERVKPRSLSEAISQTKALSQCKNRNVSTPSAFGEGQSGLAVLKELLQKRQQKAQNANTTQDPLSNKHQPNKNISGSLEHNKANKRTRSVTSPRKPRTPRSTKQKEKIPKLLKVDSLNLQNSSQLDNSVSDDSPIFFSDPGFESCYSLEDSLSPEHNYNFDINTIGQTGFCSFYSGSQFVPADQNLPQKFLSDAVQDLFPGQAIEKNEFLSHDNQKCDEDKHHTTDSASWIRSGTLSPEIFEKSTIDSNENRRHNQWKNSFHPLTTRSNSIMDSFCVQQAEDCLSEKSRLNRSSVSKEVFLSLPQPNNSDWIQGHTRKEMGQSLDSANTSFTAILSSPDGELVDVACEDLELYVSRNNDMLTPTPDSSPRSTSSPSQSKNGSFTPRTANILKPLMSPPSREEIMATLLDHDLSETIYQEPFCSNPSDVPEKPREIGGRLLMVETRLANDLAEFEGDFSLEGLRLWKTAFSAMTQNPRPGSPLRSGQGVVNKGSSNSPKMVEDKKIVIMPCKCAPSRQLVQVWLQAKEEYERSKKLPKTKPTGVVKSAENFSSSVNPDDKPVVPPKMDVSPCILPTTAHTKEDVDNSQIALQAPTTGCSQTASESQMLPPVASASDPEKDEDDDDNYYISYSSPDSPVIPPWQQPISPDSKALNGDDRPSSPVEELPSLAFENFLKPIKDGIQKSPCSEPQEPLVISPINTRARTGKCESLCFHSTPIIQRKLLERLPEAPGLSPLSTEPKTQKLSNKKGSNTDTLRRVLLTQAKNQFAAVNTPQKETSQIDGPSLNNTYGFKVSIQNLQEAKALHEIQNLTLISVELHARTRRDLEPDPEFDPICALFYCISSDTPLPDTEKTELTGVIVIDKDKTVFSQDIRYQTPLLIRSGITGLEVTYAADEKALFHEIANIIKRYDPDILLGYEIQMHSWGYLLQRAAALSIDLCRMISRVPDDKIENRFAAERDEYGSYTMSEINIVGRITLNLWRIMRNEVALTNYTFENVSFHVLHQRFPLFTFRVLSDWFDNKTDLYRWKMVDHYVSRVRGNLQMLEQLDLIGKTSEMARLFGIQFLHVLTRGSQYRVESMMLRIAKPMNYIPVTPSVQQRSQMRAPQCVPLIMEPESRFYSNSVLVLDFQSLYPSIVIAYNYCFSTCLGHVENLGKYDEFKFGCTSLRVPPDLLYQVRHDITVSPNGVAFVKPSVRKGVLPRMLEEILKTRFMVKQSMKAYKQDRALSRMLDARQLGLKLIANVTFGYTSANFSGRMPCIEVGDSIVHKARETLERAIKLVNDTKKWGARVVYGDTDSMFVLLKGATKEQSFKIGQEIAEAVTATNPKPVKLKFEKVYLPCVLQTKKRYVGYMYETLDQKDPVFDAKGIETVRRDSCPAVSKILERSLKLLFETRDISLIKQYVQRQCMKLLEGKASIQDFIFAKEYRGSFSYKPGACVPALELTRKMLTYDRRSEPQVGERVPYVIIYGTPGVPLIQLVRRPVEVLQDPTLRLNATYYITKQILPPLARIFSLIGIDVFSWYHELPRIHKATSSSRSEPEGRKGTISQYFTTLHCPVCDDLTQHGICSKCRSQPQHVAVILNQEIRELERQQEQLVKICKNCTGCFDRHIPCVSLNCPVLFKLSRVNRELSKAPYLRQLLDQF

SEQ ID NO: 61595 - protein, 3130 aa, Homo sapiens; identical to SEQ ID NO: 61594

SEQ ID NO: 61596 - protein, 3130 aa, Homo sapiens; identical to SEQ ID NO: 61594

SEQ ID NO: 61597 - protein, 3052 aa, Homo sapiens
MAFSIDRALNVALGNPSSTAQHVFKVSLVSGMPFYGYHEKERHFMKIYLYNPTMVKRICELLQSGAIMNKFYQPHEAHIPYLLQLFIDYNLYGMNLINLAAVKFRKARRKSNTLHATGSCKNHLSGNSLADTLFRWEQDEIPSSLILEGVEPQSTCELEVDAVAADILNRLDIEAQIGGNPGLQAIWEDEKQRRRNRNETSQMSQPESQDHRFVPATESEKKFQKRLQEILKQNDFSVTLSGSVDYSDGSQEFSAELTLHSEVLSPEMLQCTPANMVEVHKDKESSKGHTRHKVEEALINEEAILNLMENSQTFQPLTQRLSESPVFMDSSPDEALVHLLAGLESDGYRGERNRMPSPCRSFGNNKYPQNSDDEENEPQIEKEEMELSLVMSQRWDSNIEEHCAKKRSLCRNTHRSSTEDDDSSSGEEMEWSDNSLLLASLSIPQLDGTADENSDNPLNNENSRTHSSVIATSKLSVKPSIFHKDAATLEPSSSAKITFQCKHTSALSSHVLNKEDLIEDLSQTNKNTEKGLDNSVTSFTNESTYSMKYPGSLSSTVHSENSHKENSKKEILPVSSCESSIFDYEEDIPSVTRQVPSRKYTNIRKIEKDSPFIHMHRHPNENTLGKNSFNFSDLNHSKNKVSSEGNEKGNSTALSSLFPSSFTENCELLSCSGENRTMVHSLNSTADESGLNKLKIRYEEFQEHKTEKPSLSQQAAHYMFFPSVVLSNCLTRPQKLSPVTYKLQPGNKPSRLKLNKRKLAGHQETSTKSSETGSTKDNFIQNNPCNSNPEKDNALASDLTKTTRGAFENKTPTDGFIDCHFGDGTLETEQSFGLYGNKYTLRAKRKVNYETEDSESSFVTHNSKISLPHPMEIGESLDGTLKSRKRRKMSKKLPPVIIKYIIINRFRGRKNMLVKLGKIDSKEKQVILTEEKMELYKKLAPLKDFWPKVPDSPATKYPIYPLTPKKSHRRKSKHKSAKKKTGKQQRTNNENIKRTLSFRKKRSHAILSPPSPSYNAETEDCDLNYSDVMSKLGFLSERSTSPINSSPPRCWSPTDPRAEEIMAAAEKEAMLFKGPNVYKKTVNSRIGKTSRARAQIKKSKAKLANPSIVTKKRNKRNQTNKLVDDGKKKPRAKQKTNEKGTSRKHTTLKDEKIKSQSGAEVKFVLKHQNVSEFASSSGGSQLLFKQKDMPLMGSAVDHPLSASLPTGINAQQKLSGCFSSFLESKKSVDLQTFPSSRDDLHPSVVCNSIGPGVSKINVQRPHNQSAMFTLKESTLIQKNIFDLSNHLSQVAQNTQISSGMSSKIEDNANNIQRNYLSSIGKLSEYRNSLESKLDQAYTPNFLHCKDSQQQIVCIAEQSKHSETCSPGNTASEESQMPNNCFVTSLRSPIKQIAWEQKQRGFILDMSNFKPERVKPRSLSEAISQTKALSQCKNRNVSTPSAFGEGQSGLAVLKELLQKRQQKAQNANTTQDPLSNKHQPNKNISGSLEHNKANKRTRSVTSPRKPRTPRSTKQKEKIPKLLKVDSLNLQNSSQLDNSVSDDSPIFFSDPGFESCYSLEDSLSPEHNYNFDINTIGQTGFCSFYSGSQFVPADQNLPQKFLSDAVQDLFPGQAIEKNEFLSHDNQKCDEDKHHTTDSASWIRSGTLSPEIFEKSTIDSNENRRHNQWKNSFHPLTTRSNSIMDSFCVQQAEDCLSEKSRLNRSSVSKEVFLSLPQPNNSDWIQGHTRKEMGQSLDSANTSFTAILSSPDGELVDVACEDLELYVSRNNDMLTPTPDSSPRSTSSPSQSKNGSFTPRTANILKPLMSPPSREEIMATLLDHDLSETIYQEPFCSNPSDVPEKPREIGGRLLMVETRLANDLAEFEGDFSLEGLRLWKTAFSAMTQNPRPGSPLRSGQGVVNKGSSNSPKMVEDKKIVIMPCKCAPSRQLVQVWLQAKEEYERSKKLPKTKPTGVVKSAENFSSSVNPDDKPVVPPKMDVSPCILPTTAHTKEDVDNSQIALQAPTTGCSQTASESQMLPPVASASDPEKDEDDDDNYYISYSSPDSPVIPPWQQPISPDSKALNGDDRPSSPVEELPSLAFENFLKPIKDGIQKSPCSEPQEPLVISPINTRARTGKCESLCFHSTPIIQRKLLERLPEAPGLSPLSTEPKTQKLSNKKGSNTDTLRRVLLTQAKNQFAAVNTPQKETSQIDGPSLNNTYGFKVSIQNLQEAKALHEIQNLTLISVELHARTRRDLEPDPEFDPICALFYCISSDTPLPDTEKTELTGVIVIDKDKTVFSQDIRYQTPLLIRSGITGLEVTYAADEKALFHEIANIIKRYDPDILLGYEIQMHSWGYLLQRAAALSIDLCRMISRVPDDKIENRFAAERDEYGSYTMSEINIVGRITLNLWRIMRNEVALTNYTFENVSFHVLHQRFPLFTFRVLSDWFDNKTDLYRWKMVDHYVSRVRGNLQMLEQLDLIGKTSEMARLFGIQFLHVLTRGSQYRVESMMLRIAKPMNYIPVTPSVQQRSQMRAPQCVPLIMEPESRFYSNSVLVLDFQSLYPSIVIAYNYCFSTCLGHVENLGKYDEFKFGCTSLRVPPDLLYQVRHDITVSPNGVAFVKPSVRKGVLPRMLEEILKTRFMVKQSMKAYKQDRALSRMLDARQLGLKLIANVTFGYTSANFSGRMPCIEVGDSIVHKARETLERAIKLVNDTKKWGARVVYGDTDSMFVLLKGATKEQSFKIGQEIAEAVTATNPKPVKLKFEKVYLPCVLQTKKRYVGYMYETLDQKDPVFDAKGIETVRRDSCPAVSKILERSLKLLFETRDISLIKQYVQRQCMKLLEGKASIQDFIFAKEYRGSFSYKPGACVPALELTRKMLTYDRRSEPQVGERVPYVIIYGTPGVPLIQLVRRPVEVLQDPTLRLNATYYITKQILPPLARIFSLIGIDVFSWYHELPRIHKATSSSRSEPEGRKGTISQYFTTLHCPVCDDLTQHGICSKCRSQPQHVAVILNQEIRELERQQEQLVKICKNCTGCFDRHIPCVSLNCPVLFKLSRVNRELSKAPYLRQLLDQF

SEQ ID NO: 61598 - protein, 762 aa, Homo sapiens
MVETRLANDLAEFEGDFSLEGLRLWKTAFSAMTQNPRPGSPLRSGQGVVNKGSSNSPKMVEDKKIVIMPCKCAPSRQLVQVWLQAKEEYERSKKLPKTKPTGVVKSAENFSSSVNPDDKPVVPPKMDVSPCILPTTAHTKEDVDNSQIALQAPTTGCSQTASESQMLPPVASASDPEKDEDDDDNYYISYSSPDSPVIPPWQQPISPDSKALNGDDRPSSPVEELPSLAFENFLKPIKDGIQKSPCSEPQEPLVISPINTRARTGKCESLCFHSTPIIQRKLLERLPEAPGLSPLSTEPKTQKLSNKKGSNTDTLRRVLLTQAKNQFAAVNTPQKETSQIDGPSLNNTYGFKVSIQNLQEAKALHEIQNLTLISVELHARTRRDLEPDPEFDPICALFYCISSDTPLPDTEKTELTGVIVIDKDKTVFSQDIRYQTPLLIRSGITGLEVTYAADEKALFHEIANIIKRYDPDILLGYEIQMHSWGYLLQRAAALSIDLCRMISRVPDDKIENRFAAERDEYGSYTMSEINIVGRITLNLWRIMRNEVALTNYTFENVSFHVLHQRFPLFTFRVLSDWFDNKTDLYRWKMVDHYVSRVRGNLQMLEQLDLIGKTSEMARLFGIQFLHVLTRGSQYRVESMMLRIAKPMNYIPVTPSVQQRSQMRAPQCVPLIMEPESRFYSNSVLVLDFQSLYPSIVIAYNYCFSTCLGHVENLGKYDEFKFGCTSLRVPPDLLYQVRHDITVSPNGVAFVKIANKCRPEGMA

SEQ ID NO: 61599 - protein, 1221 aa, Homo sapiens
MLRSTGFFRAIDCPYWSGAPGGPCRRPYCHFRHRGARGSGAPGDGGEAPPAAGLGYDPYNPELPKPPAQRENGTLGLGEEPRPDVLELELVNQAIEAVRSEVELEQRRYRELLETTREHRSAEAPALAPRGPNASPTVGPDEDAFPLAFDYSPGSHGLLSPDAGYQPTPLAAPAEPGSKYSLASLDRGQGRGGGGGGALEYVPKAVSQPRRHSRPVPSGKYVVDNSRPPTDLEYDPLSNYSARHLSRASSRDERAAKRPRGSRGSEPYTPAPKKLCDPFGSCDARFSDSEDEAATVPGNEPTTASTPKARADPEIKATGQPPSKEGLEAEGGGLRETKETAVQCDVGDLQPPPAKPASPAQVQSSQDGGCPKEGKPKKKKTGAPPAPSCKDGAQGKDKTKDKGRGRPVEKPRADKKGPQASSPRRKAERPEGTKKKPSSATPVATSGKGRPDRPARRPSPTSGDSRPAAGRGPPRPLQLPDRKSTKAPSGKLVERKARSLDEGASQDAPKLKKRALSHADLFGDESEDEAAGPGVPSVWPSALPSLSSDSDSDSDSSLGFPEAQGPPKRLKASPPPSPAPSSSSSSSSSTSSAGADVDYSALEKEVDFDSDPMEECLRIFNESTSVKTEDRGRLARQPPKEEKSEEKGLSGLTTLFPGQKRRISHLSKQGQEVEPPRRGPAVPPARPPTAQEVCYLRAQQAQRASASLLQAPARLAEKSPSVHISAPGEKRRIAHIPNPRLAAAPTGAKRTLAASGSQSSNGPEPGGQQLKTRTLSGMASKTTTTIIPKRIAHSPSLQSLKKPIIPKEFGGKVPTVIRQRYLNLFIEECLKFCTSNQEAIEKALNEEKVAYDRSPSKNIYLNVAVNTLKKLRGLAPSAVPGLSKTSGRRVVSHEVVLGGRLAAKTSFSLSRPSSPRVEDLKGAALYSRLREYLLTQDQLKENGYPFPHPERPGGAIIFTAEEKRPKDSSCRTCCRCGTEYLVSSSGRCIRDEECYYHWGRLRRNRVAGGWETQYMCCSAAAGSVGCQVAKQHVQDGRKERLEGFVKTFEKELSGDTHPGIYALDCEMSYTTYGLELTRVTVVDTDVHVVYDTFVKPDNEIVDYNTRFSGVTEADLADTSVTLRDVQAVLLSMFSADTILIGHSLESDLLALKVIHSTVVDTSVLFPHRLGLPYKRSLRNLMADYLRQIIQDNVDGHSSSEDAGACMHLVIWKVREDAKTKR

SEQ ID NO: 61600 - protein, 337 aa, Homo sapiens
MLPSSTRLGYDPYNPELPKPPAQRENGTLGLGEEPRPDVLELELVNQAIEAVRSEVELEQRRYRELLETTREHRSAEAPALAPRGPNASPTVGPDEDAFPLAFDYSPGSHGLLSPDAGYQPTPLAAPAEPGSKYSLASLDRGQGRGGGGGGALEYVPKAVSQPRRHSRPVPSGKYVVDNSRPPTDLEYDPLSNYSARHLSRASSRDERAAKRPRGSRGSEPYTPAPKKLCDPFGSCDARFSDSEDEAATVPGNEPTTASTPKARADPEIKATGQPPSKEGLEAEGGGLRETKETAVQCDVGDLQPPPAKPASPAQVQSSQDGGCPKEGKPKKKKTGA

SEQ ID NO: 61601 - protein, 493 aa, Homo sapiens
MGSHSPCAHTPCAPPAPTGAKRTLAASGSQSSNGPEPGGQQLKTRTLSGMASKTTTTIIPKRIAHSPSLQSLKKPIIPKEFGGKVPTVIRQRYLNLFIEECLKFCTSNQEAIEKALNEEKVAYDRSPSKNIYLNVAVNTLKKLRGLAPSAVPGLSKTSGRRVVSHEVVLGGRLAAKTSFSLSRPSSPRVEDLKGAALYSRLREYLLTQDQLKENGYPFPHPERPGGAIIFTAEEKRPKDSSCRTCCRCGTEYLVSSSGRCIRDEECYYHWGRLRRNRVAGGWETQYMCCSAAAGSVGCQVAKQHVQDGRKERLEGFVKTFEKELSGDTHPGIYALDCEMSYTTYGLELTRVTVVDTDVHVVYDTFVKPDNEIVDYNTRFSGVTEADLADTSVTLRDVQAVLLSMFSADTILIGHSLESDLLALKVIHSTVVDTSVLFPHRLGLPYKRSLRNLMADYLRQIIQDNVDGHSSSEDAGACMHLVIWKVREDAKTKR

SEQ ID NO: 61602 - protein, 237 aa, Homo sapiens
MLGGSLGSRLLRGVGGSHGRFGARGVREGGAAMAAGESMAQRMVWVDLEMTGLDIEKDQIIEMACLITDSDLNILAEGPNLIIKQPDELLDSMSDWCKEHHGKSGLTKAVKESTITLQQAEYEFLSFVRQQTPPGLCPLAGNSVHEDKKFLDKYMPQFMKHLHYRIIDVSTVKELCRRWYPEEYEFAPKKAASHRALDDISESIKELQFYRNNIFKKKIDEKKRKIIENGENEKTVS

SEQ ID NO: 61603 - protein, 250 aa, Homo sapiens
MGKAKVPASKRAPSSPVAKPGPVKTLTRKKNKKKKRFWKSKAREVSKKPASGPGAVVRPPKAPEDFSQNWKALQEVPRWTGGRQYLAPRPVEQSTIRKEPRKGQMVILFQNEGTSSIRSGKLRRQPQPHPPREELEVVQKEVAEMLKGRILVGHALHNDLKVLFLDHPKKKIRDTQKYKPFKSQVKSGRPSLRLLSEKILGLQVQQAEHCSIQDAQAAMRLYVMVKKEWESMARDRRPLLTAPDHCSDDA

SEQ ID NO: 61604 - protein, 422 aa, Homo sapiens
MGKAKVPASKRAPSSPVAKPGPVKTLTRKKNKKKKRFWKSKAREVSKKPASGPGAVVRPPKAPEDFSQNWKALQEWLLKQKSQAPEKPLVISQMGSKKKPKIIQQNKKETSPQVKGEEMPAGKDQEASRGSVPSGSKMDRRAPVPRTKASGTEHNKKGTKERTNGDIVPERGDIEHKKRKAKEAAPAPPTEEDIWFDDVDPADIEAAIGPEAAKIARKQLGQSEGSVSLSLVKEQAFGGLTRALALDCEMVGVGPKGEESMAARVSIVNQYGKCVYDKYVKPTEPVTDYRTAVSGIRPENLKQGEELEVVQKEVAEMLKGRILVGHALHNDLKVLFLDHPKKKIRDTQKYKPFKSQVKSGRPSLRLLSEKILGLQVQQAEHCSIQDAQAAMRLYVMVKKEWESMARDRRPLLTAPDHCSDDA

SEQ ID NO: 61605 - protein, 189 aa, Homo sapiens
MGSKKKPKIIQQNKKETSPQVKGEEMPAGKDQEASRGSVPSGSKMDRRAPVPRTKASGTEHNKKGTKERTNGDIVPERGDIEHKKRKAKEAAPAPPTEEDIWFDDVDPADIEAAIGPEAAKIARKQLGQSEGSVSLSLVKEQAFGGLTRALALDCEMVGVGPKGEESMAARVSIVNQYGKCVYDKYVKP

SEQ ID NO: 61606 - protein, 374 aa, Homo sapiens
PVAKPGPVKTLTRKKNKKKKRFWKSKAREVSKKPASGPGAVVRPPKAPEDFSQNWKALQEWLLKQKSQAPEKPLVISQMGSKKKPKIIQQNKKETSPQVKGEEMPAGKDQEASRGSVPSGSKMDRRAPVPRTKASGTEHNKKGTKERTNGDIVPERGDIEHKKRKAKEAAPAPPTEEDIWFDDVDPADIEAAIGPEAAKIARKQLGQSEGSVSLSLVKEQAFGGLTRALALDCEMVGVGPKGEESMAARVSIVNQYGKCVYDKYVKPTEPVTDYRTAVSGIRPENLKQGEELEVVQKEVAEMLKGRILVGHALHNDLKSGRPSLRLLSEKILGLQVQQDSGCPGSNEAVRHGEEGVGEHGPRQAPPADCSRPLQ

SEQ ID NO: 61607 - protein, 233 aa, Homo sapiens
MGKAKVPASKRAPSSPVAKPGPVKTLTRKKNKKKKRFWKSKAREVSKKPASGPGAVVRPPKAPEDFSQNWKALQEVPRWTGGRQYLAPRPVEQSTIRKEPRKGQMVILFQNEGTSSIRSGKLRRQPQPHPPREELEVVQKEVAEMLKGRILVGHALHNDLKVLFLDHPKKKIRDTQKYKPFKSQVKSGRPSLRLLSEKILGLQVQQAEHCSIQDAQAAMRLYVMVKKEWESMA

SEQ ID NO: 61608 - protein, 331 aa, Homo sapiens
MSRARGALCRACLALAAALAALLLLPLPLPRAPAPARTPAPAPRAPPSRPAAPSLRPDDVFIAVKTTRKNHGPRLRLLLRTWISRARQQTFIFTDGDDPELELQGGDRVINTNCSAVRTRQALCCKMSVEYDKFIESGRKWFCHVDDDNYVNARSLLHLLSSFSPSQDVYLGRPSLDHPIEATERVQGGRTVTTVKFWFATGGAGFCLSRGLALKMSPWASLGSFMSTAEQVRLPDDCTVGYIVEGLLGARLLHSPLFHSHLENLQRLPPDTLLQQVTLSHGGPENPHNVVNVAGGFSLHQDPTRFKSIHCLLYPDTDWCPRQKQGAPTSR

SEQ ID NO: 61609 - protein, 290 aa, Homo sapiens
MSRAPPSRPAAPSLRPDDVFIAVKTTRKNHGPRLRLLLRTWISRARQQTFIFTDGDDPELELQGGDRVINTNCSAVRTRQALCCKMSVEYDKFIESGRKWFCHVDDDNYVNARSLLHLLSSFSPSQDVYLGRPSLDHPIEATERVQGGRTVTTVKFWFATGGAGFCLSRGLALKMSPWASLGSFMSTAEQVRLPDDCTVGYIVEGLLGARLLHSPLFHSHLENLQRLPPDTLLQQVTLSHGGPENPHNVVNVAGGFSLHQDPTRFKSIHCLLYPDTDWCPRQKQGAPTSR

SEQ ID NO: 61610 - protein, 541 aa, Homo sapiens
MGSQEVLGHAARLASSGLLLQVLFRLITFVLNAFILRFLSKEIVGVVNVRLTLLYSTTLFLAREAFRRACLSGGTQRDWSQTLNLLWLTVPLGVFWSLFLGWIWLQLLEVPDPNVVPHYATGVVLFGLSAVVELLGEPFWVLAQAHMFVKLKVIAESLSVILKSVLTAFLVLWLPHWGLYIFSLAQLFYTTVLVLCYVIYFTKLLGSPESTKLQTLPVSRITDLLPNITRNGAFINWKEAKLTWSFFKQSFLKQILTEGERYVMTFLNVLNFGDQGVYDIVNNLGSLVARLIFQPIEESFYIFFAKVLERGKDATLQKQEDVAVAAAVLESLLKLALLAGLTITVFGFAYSQLALDIYGGTMLSSGSGPVLLRSYCLYVLLLAINGVTECFTFAAMSKEEVDRYNFVMLALSSSFLVLSYLLTRWCGSVGFILANCFNMGIRITQSLCFIHRYYRRSPHRPLAGLHLSPVLLGTFALSGGVTAVSEVFLCCEQGWPARLAHIAVGAFCLGATLGTAFLTETKLIHFLRTQLGVPRRTDKMT

SEQ ID NO: 61611 - protein, 502 aa, Homo sapiens
MGSQEVLGHAARLASSGLLLQVLFRLITFVLNAFILRFLSKEIVGVVNVRVPLGVFWSLFLGWIWLQLLEVPDPNVVPHYATGVVLFGLSAVVELLGEPFWVLAQAHMFVKLKVIAESLSVILKSVLTAFLVLWLPHWGLYIFSLAQLFYTTVLVLCYVIYFTKLLGSPESTKLQTLPVSRITDLLPNITRNGAFINWKEAKLTWSFFKQSFLKQILTEGERYVMTFLNVLNFGDQGVYDIVNNLGSLVARLIFQPIEESFYIFFAKVLERGKDATLQKQEDVAVAAAVLESLLKLALLAGLTITVFGFAYSQLALDIYGGTMLSSGSGPVLLRSYCLYVLLLAINGVTECFTFAAMSKEEVDRYNFVMLALSSSFLVLSYLLTRWCGSVGFILANCFNMGIRITQSLCFIHRYYRRSPHRPLAGLHLSPVLLGTFALSGGVTAVSEVFLCCEQGWPARLAHIAVGAFCLGATLGTAFLTETKLIHFLRTQLGVPRRTDKMT

SEQ ID NO: 61612 - protein, 1435 aa, Homo sapiens
MAQTPDGISCELRGEITRFLWPKEVELLLKTWLPGEGAVQNHVLALLRWRAYLLHTTCLPLRVDCTFSYLEVQAMALQETPPQVTFELESLRELVLEFPGVAALEQLAQHVAAAIKKVFPRSTLGKLFRRPTPASMLARLERSSPSESTDPCSPCGGFLETYEALCDYNGFPFREEIQWDVDTIYHRQGCRHFSLGDFSHLGSRDLALSVAALSYNLWFRCLSCVDMKLSLEVSEQILHMMSQSSHLEELVLETCSLRGDFVRRLAQALAGHSSSGLRELSLAGNLLDDRGMTALSRHLERCPGALRRLSLAQTGLTPRGMRALGRALATNAAFDSTLTHLDLSGNPGALGASEDSGGLYSFLSRPNVLSFLNLAGTDTALDTVRGCSVGGWMTGRADWRAGRGGLGPPAGVANSLPPQLFAAVSRGCCTSLTHLDASRNVFSRTKSRAAPAALQLFLSRARTLRHLGLAGCKLPPDALRALLDGLALNTHLRDLHLDLSACELRSAGAQVIQDLVCDAGAVSSLDLADNGFGSDMVTLVLAIGRSRSLRHVALGRNFNVRCKETLDDVLHRIVQLMQDDDCPLQSLSVAESRLKLGASVLLRALATNPNLTALDISGNAMGDAGAKLLAKALRVNSRLRSVVWDRNHTSALGLLDVAQALEQNHSLKAMPLPLNDVAQAQRSRPELTARAVHQIQACLLRNNRADPASSDHTTRLQPLGLVSDPSEQEVNELCQSVQEHVELLGCGAGPQGEAAVRQAEDAIQNANFSLSILPILYEAGSSPSHHWQLGQKLEGLLRQVGEVCRQDIQDFTQATLDTARSLCPQMLQGSSWREQLEGVLAGSRGLPELLPEQLLQDAFTRLRDMRLSITGTLAESIVAQALAGLSAARDQLVESLAQQATVTMPPALPAPDGGEPSLLEPGELEGLFFPEEKEEEKEKDDSPPQKWPELSHGLHLVPFIHSAAEEAEPEPELAAPGEDAEPQAGPSARGSPSPAAPGPPAGPLPRMDLPLAGQPLRHPTRARPRPRRQHHHRPPPGGPQVPPALPQEGNGLSARVDEGVEEFFSKRLIQQDRLWAPEEDPATEGGATPVPRTLRKKLGTLFAFKKPRSTRGPRTDLETSPGAAPRTRKTTFGDLLRPPTRPSRGEELGGAEGDTSSPDPAGRSRPRYTRDSKAYSMILLPAEEEATLGARPDKRRPLERGETELAPSFEQRVQVMLQRIGVSRGSGGAEGKRKQSKDGEIKKAGSDGDIMDSSTEAPPISIKSRTHSVSADPSCRPGPGSQGPESATWKTLGQQLNAELRSRGWGQQDGPGPPSPGQSPSPCRTSPSPDSLGLPEDPCLGPRNEDGQLRPRPLSAGRRAVSVHEDQLQAPAERPLRLQRSPVLKRRPKLEAPPSPSLGSGLGTEPLPPQPTEPSSPERSPPSPATDQRGGGPNP

SEQ ID NO: 61613 - protein, 444 aa, Homo sapiens
MPPALPAPDGGEPSLLEPGELEGLFFPEEKEEEKEKDDSPPQKWPELSHGLHLVPFIHSAAEEAEPEPELAAPGEDAEPQAGPSARGSPSPAAPGPPAGPLPRMDLPLAGQPLRHPTRARPRPRRQHHHRPPPGGPQVPPALPQEGNGLSARVDEGVEEFFSKRLIQQDRLWAPEEDPATEGGATPVPRTLRKKLGTLFAFKKPRSTRGPRTDLETSPGAAPRTRKTTFGDLLRPPTRPSRGEELGGAEGDTSSPDPAGRSRPRYTRDSKAYSMILLPAEEEATLGARPDKRRPLERGETELAPSFEQRVQVMLQRIGVSRGSGGAEGKRKQSKDGEIKKAGSDGDIMDSSTEAPPISIKSRTHSVSADPSCRPGPGSQGPESATWKTLGQQLNAELRSRGWGQQDGPGPPSPGQSPSPCRTPPQTAWASQRTLAWAPEMKNGP

SEQ ID NO: 61614 - protein, 1372 aa, Homo sapiens
MAQTPDGISCELRGEITRFLWPKEVELLLKTWLPGEGAVQNHVLALLRWRAYLLHTTCLPLRVDCTFSYLEVQAMALQETPPQVTFELESLRELVLEFPGVAALEQLAQHVAAAIKKVFPRSTLGKLFRRPTPASMLARLERSSPSESTDPCSPCGGFLETYEALCDYNGFPFREEIQWDVDTIYHRQGCRHFSLGDFSHLGSRDLALSVAALSYNLWFRCLSCVDMKLSLEVSEQILHMMSQSSHLEELVLETCSLRGDFVRRLAQALAGHSSSGLRELSLAGNLLDDRGMTALSRHLERCPGALRRLSLAQTGLTPRGMRALGRALATNAAFDSTLTHLDLSGNPGALGASEDSGGLYSFLSRPNVLSFLNLAGTDTALDTLFAAVSRGCCTSLTHLDASRNVFSRTKSRAAPAALQLFLSRARTLRHLGLAGCKLPPDALRALLDGLALNTHLRDLHLDLSACELRSAGAQVIQDLVCDAGAVSSLDLADNGFGSDMVTLVLAIGRSRSLRHVALGRNFNVRCKETLDDVLHRIVQLMQDDDCPLQSLSVAESRLKLGASVLLRALATNPNLTALDISGNAMGDAGAKLLAKALRVNSRLRSVVWDRNHTSALGLLDVAQALEQNHSLKAMPLPLNDVAQAQRSRPELTARAVHQIQACLLRNNRADPASSDHTTRLQPLGLVSDPSEQEVNELCQSVQEHVELLGCGAGPQGEAAVRQAEDAIQNANFSLSILPILYEAGSSPSHHWQLGQKLEGLLRQVGEVCRQDIQDFTQATLDTARSLCPQMLQGSSWREQLEGVLAGSRGLPELLPEQLLQDAFTRLRDMRLSITGTLAESIVAQALAGLSAARDQLVESLAQQATVTMPPALPAPDGGEPSLLEPGELEGLFFPEEKEEEKEKDDSPPQKWPELSHGLHLVPFIHSAAEEAEPEPELAAPGEDAEPQAGPSARGSPSPAAPGPPAGPLPRMDLPLAGQPLRHPTRARPRPRRQHHHRPPPGGPQVPPALPQEGNGLSARVDEGVEEFFSKRLIQQDRLWAPEEDPATEGGATPVPRTLRKKLGTLFAFKKPRSTRGPRTDLETSPGAAPRTRKTTFGDLLRPPTRPSRGEELGGAEGDTSSPDPAGRSRPRYTRDSKAYSMILLPAEEEATLGARPDKRRPLERGETELAPSFEQRVQVMLQRIGVSRGSGGAEGKRKQSKDGEIKKAGSDGDIMDSSTEAPPISIKSRTHSVSADPSCRPGPGSQGPESATWKTLGQQLNAELRSRGWGQQDGPGPPSPGQSPSPCRTSPSPDSLGLPEDPCLGPRNEERPLRLQRSPVLKRRPKLEAPPSPSLGSGLGTEPLPPQPTEPSSPERSPPSPATDQRGGGPNP

SEQ ID NO: 61615 - protein, 434 aa, Homo sapiens
MGMGRGAGRSALGFWPTLAFLLCSFPAATSPCKILKCNSEFWSATSGSHAPASDDTPEFCAALRSYALCTRRTARTCRGDLAYHSAVHGIEDLMSQHNCSKDGPTSQPRLRTLPPAGDSQERSDSPEICHYEKSFHKHSATPNYTHCGLFGDPHLRTFTDRFQTCKVQGAWPLIDNNYLNVQVTNTPVLPGSAATATSKLTIIFKNFQECVDQKVYQAEMDELPAAFVDGSKNGGDKHGANSLKITEKVSGQHVEIQAKYIGTTIVVRQVGRYLTFAVRMPEEVVNAVEDWDSQGLYLCLRGCPLNQQIDFQAFHTNAEGTGARRLAAASPAPTAPETFPYETAVAKCKEKLPVEDLYYQACVFDLLTTGDVNFTLAAYYALEDVKMLHSNKDKLHLYDRTRDLPGRAAAGLPLAPRPLLGALVPLLALLPVFC

SEQ ID NO: 61616 - protein, 450 aa, Homo sapiens
MQPPRERLVVTGRAGWMGMGRGAGRSALGFWPTLAFLLCSFPAATSPCKILKCNSEFWSATSGSHAPASDDTPEFCAALRSYALCTRRTARTCRGDLAYHSAVHGIEDLMSQHNCSKDGPTSQPRLRTLPPAGDSQERSDSPEICHYEKSFHKHSATPNYTHCGLFGDPHLRTFTDRFQTCKVQGAWPLIDNNYLNVQVTNTPVLPGSAATATSKLTIIFKNFQECVDQKVYQAEMDELPAAFVDGSKNGGDKHGANSLKITEKVSGQHVEIQAKYIGTTIVVRQVGRYLTFAVRMPEEVVNAVEDWDSQGLYLCLRGCPLNQQIDFQAFHTNAEGTGARRLAAASPAPTAPETFPYETAVAKCKEKLPVEDLYYQACVFDLLTTGDVNFTLAAYYALEDVKMLHSNKDKLHLYDRTRDLPGRAAAGLPLAPRPLLGALVPLLALLPVFC

SEQ ID NO: 61617 - protein, 434 aa, Homo sapiens; identical to SEQ ID NO: 61615

SEQ ID NO: 61618 - protein, 341 aa, Homo sapiens
MSQHNCSKDGPTSQPRLRTLPPAGDSQERSDSPEICHYEKSFHKHSATPNYTHCGLFGDPHLRTFTDRFQTCKVQGAWPLIDNNYLNVQVTNTPVLPGSAATATSKLTIIFKNFQECVDQKVYQAEMDELPAAFVDGSKNGGDKHGANSLKITEKVSGQHVEIQAKYIGTTIVVRQVGRYLTFAVRMPEEVVNAVEDWDSQGLYLCLRGCPLNQQIDFQAFHTNAEGTGARRLAAASPAPTAPETFPYETAVAKCKEKLPVEDLYYQACVFDLLTTGDVNFTLAAYYALEDVKMLHSNKDKLHLYDRTRDLPGRAAAGLPLAPRPLLGALVPLLALLPVFC

SEQ ID NO: 61619 - protein, 434 aa, Homo sapiens; identical to SEQ ID NO: 61615

SEQ ID NO: 61620 - protein, 458 aa, Homo sapiens
MGGLGPRRAGTSRERLVVTGRAGWMGMGRGAGRSALGFWPTLAFLLCSFPAATSPCKILKCNSEFWSATSGSHAPASDDTPEFCAALRSYALCTRRTARTCRGDLAYHSAVHGIEDLMSQHNCSKDGPTSQPRLRTLPPAGDSQERSDSPEICHYEKSFHKHSATPNYTHCGLFGDPHLRTFTDRFQTCKVQGAWPLIDNNYLNVQVTNTPVLPGSAATATSKLTIIFKNFQECVDQKVYQAEMDELPAAFVDGSKNGGDKHGANSLKITEKVSGQHVEIQAKYIGTTIVVRQVGRYLTFAVRMPEEVVNAVEDWDSQGLYLCLRGCPLNQQIDFQAFHTNAEGTGARRLAAASPAPTAPETFPYETAVAKCKEKLPVEDLYYQACVFDLLTTGDVNFTLAAYYALEDVKMLHSNKDKLHLYDRTRDLPGRAAAGLPLAPRPLLGALVPLLALLPVFC

SEQ ID NO: 61621 - protein, 478 aa, Homo sapiens
MIRKKRKRSAPPGPCRSHGPRPATAPAPPPSPEPTRPAWTGMGLRAAPSSAAAAAAEVEQRRSPGLCPPPLELLLLLLFSLGLLHAGDCQQPAQCRIQKCTTDFVSLTSHLNSAVDGFDSEFCKALRAYAGCTQRTSKACRGNLVYHSAVLGISDLMSQRNCSKDGPTSSTNPEVTHDPCNYHSHAGAREHRRGDQNPPSYLFCGLFGDPHLRTFKDNFQTCKVEGAWPLIDNNYLSVQVTNVPVVPGSSATATNKITIIFKAHHECTDQKVYQAVTDDLPAAFVDGTTSGGDSDAKSLRIVERESGHYVEMHARYIGTTVFVRQVGRYLTLAIRMPEDLAMSYEESQDLQLCVNGCPLSERIDDGQGQVSAILGHSLPRTSLVQAWPGYTLETANTQCHEKMPVKDIYFQSCVFDLLTTGDANFTAAAHSALEDVEALHPRKERWHIFPSSGNGTPRGGSDLSVSLGLTCLILIVFL

SEQ ID NO: 61622 - protein, 437 aa, Homo sapiens
MGLRAAPSSAAAAAAEVEQRRSPGLCPPPLELLLLLLFSLGLLHAGDCQQPAQCRIQKCTTDFVSLTSHLNSAVDGFDSEFCKALRAYAGCTQRTSKACRGNLVYHSAVLGISDLMSQRNCSKDGPTSSTNPEVTHDPCNYHSHAGAREHRRGDQNPPSYLFCGLFGDPHLRTFKDNFQTCKVEGAWPLIDNNYLSVQVTNVPVVPGSSATATNKITIIFKAHHECTDQKVYQAVTDDLPAAFVDGTTSGGDSDAKSLRIVERESGHYVEMHARYIGTTVFVRQVGRYLTLAIRMPEDLAMSYEESQDLQLCVNGCPLSERIDDGQGQVSAILGHSLPRTSLVQAWPGYTLETANTQCHEKMPVKDIYFQSCVFDLLTTGDANFTAAAHSALEDVEALHPRKERWHIFPSSGNGTPRGGSDLSVSLGLTCLILIVFL

SEQ ID NO: 61623 - protein, 391 aa, Homo sapiens
MIEVVAELSRGPVFLAGEALECVVTVTNPLPPTATSASSEALAWASAQIHCQFHASESRVALPPPDSSQPDVQPDSQTVFLPHRGERGQCILSTPPKILFCDLRLDPGESKSYSYSEVLPIEGPPSFRGQSVKYVYKLTIGCQRVNSPITLLRVPLRVLVLTGLQDVRFPQDEAVAPSSPFLEEDEGGKKDSWLAELAGERLMAATSCRSLHLYNISDGRGKVGTFGIFKSVYRLGEDVVGTLNLGEGTVACLQFSVSLQTEERVQPEYQRRRGAGGVPSVSHVTHARHQESCLHTTRTSFSLPIPLSSTPGFCTAIVSLKWRLHFEFVTSREPGLVLLPPVEQPEPTTWTGPEQVPVDTFSWDLPIKVLPTSPTLASYAAPGPSTSTITI

SEQ ID NO: 61624 - protein, 431 aa, Homo sapiens
MTRALSGLACRALPAGRDSAEGLGVPIPSVDYARSDSGAAMIEVVAELSRGPVFLAGEALECVVTVTNPLPPTATSASSEALAWASAQIHCQFHASESRVALPPPDSSQPDVQPDSQTVFLPHRGERGQCILSTPPKILFCDLRLDPGESKSYSYSEVLPIEGPPSFRGQSVKYVYKLTIGCQRVNSPITLLRVPLRVLVLTGLQDVRFPQDEAVAPSSPFLEEDEGGKKDSWLAELAGERLMAATSCRSLHLYNISDGRGKVGTFGIFKSVYRLGEDVVGTLNLGEGTVACLQFSVSLQTEERVQPEYQRRRGAGGVPSVSHVTHARHQESCLHTTRTSFSLPIPLSSTPGFCTAIVSLKWRLHFEFVTSREPGLVLLPPVEQPEPTTWTGPEQVPVDTFSWDLPIKVLPTSPTLASYAAPGPSTSTITI

SEQ ID NO: 61625 - protein, 372 aa, Homo sapiens
MSSKYPRSVRRCLPLCALTLEAALILLFYFFTHYDASLEDQKGLVASYQVGQDLTVMAALGLGFLTSNFRRHSWSSVAFNLFMLALGVQWAILLDGFLSQFPPGKVVITLFSIRLATMSAMSVLISAGAVLGKVNLAQLVVMVLVEVTALGTLRMVISNIFNTDYHMNLRHFYVFAAYFGLTVAWCLPKPLPKGTEDNDQRATIPSLSAMLGALFLWMFWPSVNSALLRSPIQRKNAMFNTYYALAVSVVTAISGSSLAHPQRKISMTYVHSAVLAGGVAVGTSCHLIPSPWLAMVLGLVAGLISIGGAKCLPVCCNRVLGIHHISVMHSIFSLLGLLGEITYIVLLVLHTVWNGNGMFAPKSQNMESTSCG

SEQ ID NO: 61626 - protein, 417 aa, Homo sapiens
MSSKYPRSVRRCLPLCALTLEAALILLFYFFTHYDASLEDQKGLVASYQVGQDLTVMAALGLGFLTSNFRRHSWSSVAFNLFMLALGVQWAILLDGFLSQFPPGKVVITLFSIRLATMSAMSVLISAGAVLGKVNLAQLVVMVLVEVTALGTLRMVISNIFNTDYHMNLRHFYVFAAYFGLTVAWCLPKPLPKGTEDNDQRATIPSLSAMLGALFLWMFWPSVNSALLRSPIQRKNAMFNTYYALAVSVVTAISGSSLAHPQRKISMTYVHSAVLAGGVAVGTSCHLIPSPWLAMVLGLVAGLISIGGAKCLPVCCNRVLGIHHISVMHSIFSLLGLLGEITYIVLLVLHTVWNGNGMIGFQVLLSIGELSLAIVIALTSGLLTGLLLNLKIWKAPHVAKYFDDQVFWKFPHLAVGF

SEQ ID NO: 61627 - protein, 267 aa, Homo sapiens
MSSKYPRSVRRCLPLCALTLEAALILLFYFFTHYDASLEDQKGLVASYQVGQDLTVMAALGLGFLTSNFRRHSWSSVAFNLFMLALGVQWAILLDGFLSQFPPGKVVITLFSIRLATMSAMSVLISAGAVLGKVNLAQLVVMVLVEVTALGTLRMVISNIFNTYVHSAVLAGGVAVGTSCHLIPSPWLAMVLGLVAGLISIGGAKCLPVCCNRVLGIHHISVMHSIFSLLGLLGEITYIVLLVLHTVWNGNGMFAPKSQNMESTSCG

SEQ ID NO: 61628 - protein, 266 aa, Homo sapiens
MSSKYPRSVRRCLPLCALTLEAALILLFYFFTHYDASLEDQKGLVASYQVGQDLTVMAALGLGFLTSNFRRHSWSSVAFNLFMLALGVQWAILLDGFLSQFPPGKVVITLFSIRLATMSAMSVLISAGAVLGKVNLAQLVVMVLVEVTALGTLRMVISNIFNVCCNRVLGIHHISVMHSIFSLLGLLGEITYIVLLVLHTVWNGNGMIGFQVLLSIGELSLAIVIALTSGLLTGLLLNLKIWKAPHVAKYFDDQVFWKFPHLAVGF

SEQ ID NO: 61629 - protein, 401 aa, Homo sapiens
MYFINQRLFLRLWRVPVMRASHCYQSQGWRPVAVGQDLTVMAALGLGFLTSNFRRHSWSSVAFNLFMLALGVQWAILLDGFLSQFPPGKVVITLFSIRLATMSAMSVLISAGAVLGKVNLAQLVVMVLVEVTALGTLRMVISNIFNTDYHMNLRHFYVFAAYFGLTVAWCLPKPLPKGTEDNDQRATIPSLSAMLGALFLWMFWPSVNSALLRSPIQRKNAMFNTYYALAVSVVTAISGSSLAHPQRKISMTYVHSAVLAGGVAVGTSCHLIPSPWLAMVLGLVAGLISIGGAKCLPVCCNRVLGIHHISVMHSIFSLLGLLGEITYIVLLVLHTVWNGNGMIGFQVLLSIGELSLAIVIALTSGLLTGLLLNLKIWKAPHVAKYFDDQVFWKFPHLAVGF

SEQ ID NO: 61630 - protein, 354 aa, Homo sapiens
MSSKYPRSVRRCLPLCALTLEAALILLFYFFTHYDASLEDQKGLVASYQVGQDLTVMAALGLGFLTSNFRRHSWSSVAFNLFMLALGVQWAILLDGFLSQFPPGKVVITLFSIRLATMSAMSVLISAGAVLGKVNLAQLVVMVLVEVTALGTLRMVISNIFNTDYHMNLRHFYVFAAYFGLTVAWCLPKPLPKGTEDNDQRATIPSLSAMLGALFLWMFWPSVNSALLRSPIQRKNAMFNTYYALAVSVVTAISGSSLAHPQRKISMTYVHSAVLAGGVAVGTSCHLIPSPWLAMVLGLVAGLISIGGAKCLPDWLPGPPQHWGTQLGHRDSSHVWSPDRFAPKSQNMESTSCG

SEQ ID NO: 61631 - protein, 401 aa, Homo sapiens; identical to SEQ ID NO: 61629

SEQ ID NO: 61632 - protein, 396 aa, Homo sapiens
MSSKYPRSVRRCLPLCALTLEAALILLFYFFTHYDASLEDQKGLVASYQVGQDLTVMAALGLGFLTSNFRRHSWSSVAFNLFMLALGVQWAILLDGFLSQFPPGKVVITLFSIRLATMSAMSVLISAGAVLGKVNLAQLVVMVLVEVTALGTLRMVISNIFNTDYHMNLRHFYVFAAYFGLTVAWCLPKPLPKGTEDNDQRATIPSLSAMLGALFLWMFWPSVNSALLRSPIQRKNAMFNTYYALAVSVVTAISGSSLAHPQRKISMTYVHSAVLAGGVAVGTSCHLIPSPWLAMVLGLVAGLISIGGAKCLPVCCNRVLGIHHISVMHSIFSLLGLLGEITYIVLLVLHTVWNGNGIFLIWLLDFKQKHPRKTRPVQKQDNFLSLLPAFVREKRS

SEQ ID NO: 61633 - protein, 308 aa, Homo sapiens
MSSKYPRSVRRCLPLCALTLEAALILLFYFFTHYDASLEDQKGLVASYQVGQDLTVMAALGLGFLTSNFRRHSWSSVAFNLFMLALGVQWAILLDGFLSQFPPGKVVITLFSIRLATMSAMSVLISAGAVLGKVNLAQLVVMVLVEVTALGTLRMVISNIFNTDYHMNLRHFYVFAAYFGLTVAWCLPKPLPKGTEDNDQRATIPSLSAMLGALFLWMFWPSVNSALLRSPIQRKNAMFNTYYALAVSVVTAISGSSLAHPQRKISMDWLPGPPQHWGTQLGHRDSSHVWSPDRFAPKSQNMESTSCG

SEQ ID NO: 61634 - protein, 398 aa, Homo sapiens
MSSKYPRSVRRCLPLCALTLEAALILLFYFFTHYDASLEDQKGLVASYQVGQDLTVMAALGLGFLTSNFRRHSWSSVAFNLFMLALGVQWAILLDGFLSQFPPGKVVITLFSIRLATMSAMSVLISAGAVLGKVNLAQLVVMVLVEVTALGTLRMVISNIFNTDYHMNLRHFYVFAAYFGLTVAWCLPKPLPKGTEDNDQRATIPSLSAMLGALFLWMFWPSVNSALLRSPIQRKNAMFNTYYALAVSVVTAISGSSLAHPQRKISMTYVHSAVLAGGVAVGTSCHLIPSPWLAMVLGLVAGLISIGGAKCLPVCCNRVLGIPHLRHALHLQLAGSAWRDHLHCAAGASYCLERQWHDWLPGPPQHWGTQLGHRDSSHVWSPDRFAPKSQNMESTSCG

SEQ ID NO: 61635 - protein, 312 aa, Homo sapiens
MSSKYPRSVRRCLPLCALTLEAALILLFYFFTHYDASLEDQKGLVASYQVGQDLTVMAALGLGFLTSNFRRHSWSSVAFNLFMLALGVQWAILLDGFLSQFPPGKVVITLFSIRLATMSAMSVLISAGAVLGKVNLAQLVVMVLVEVTALGTLRMVISNIFNTYVHSAVLAGGVAVGTSCHLIPSPWLAMVLGLVAGLISIGGAKCLPVCCNRVLGIHHISVMHSIFSLLGLLGEITYIVLLVLHTVWNGNGMIGFQVLLSIGELSLAIVIALTSGLLTGLLLNLKIWKAPHVAKYFDDQVFWKFPHLAVGF

SEQ ID NO: 61636 - protein, 346 aa, Homo sapiens
MSSKYPRSVRRCLPLCALTLEAALILLFYFFTHYDASLEDQKGLVASYQVGQDLTVMAALGLGFLTSNFRRHSWSSVAFNLFMLALGVQWAILLDGFLSQFPPGKVVITLFSIRLATMSAMSVLISAGAVLGKVNLAQLVVMVLVEVTALGTLRMVISNIFNPSVNSALLRSPIQRKNAMFNTYYALAVSVVTAISGSSLAHPQRKISMTYVHSAVLAGGVAVGTSCHLIPSPWLAMVLGLVVCCNRVLGIHHISVMHSIFSLLGLLGEITYIVLLVLHTVWNGNGMIGFQVLLSIGELSLAIVIALTSGLLTGLLLNLKIWKAPHVAKYFDDQVFWKFPHLAVGF

SEQ ID NO: 61637 - protein, 417 aa, Homo sapiens
MSSKYPRSVRRCLPLWALTLEAALILLFYFFTHYDASLEDQKGLVASYQVGQDLTVMAAIGLGFLTSSFRRHSWSSVAFNLFMLALGVQWAILLDGFLSQFPSGKVVITLFSIRLATMSALSVLISVDAVLGKVNLAQLVVMVLVEVTALGNLRMVISNIFNTDYHMNMMHIYVFAAYFGLSVAWCLPKPLPEGTEDKDQTATIPSLSAMLGALFLWMFWPSFNSALLRSPIERKNAVFNTYYAVAVSVVTAISGSSLAHPQGKISKTYVHSAVLAGGVAVGTSCHLIPSPWLAMVLGLVAGLISVGGAKYLPGCCNRVLGIPHSSIMGYNFSLLGLLGEIIYIVLLVLDTVGAGNGMIGFQVLLSIGELSLAIVIALMSGLLTGLLLNLKIWKAPHEAKYFDDQVFWKFPHLAVGF

SEQ ID NO: 61638 - protein, 493 aa, Homo sapiens
MSSKYPRSVRRCLPLWALTLEAALILLFYFFTHYDASLEDQKGLVASYQVGQDLTVMAAIGLGFLTSSFRRHSWSSVAFNLFMLALGVQWAILLDGFLSQFPSGKVVITLFSIRLATMSALSVLISVDAVLGKVNLAQLVVMVLVEVTALGNLRMVISNIFNTDYHMNMMHIYVFAAYFGLSVAWCLPKPLPEGTEDKDQTATIPSLSAMLGALFLWMFWPSFNSALLRSPIERKNAVFNTYYAVAVSVVTAISGSSLAHPQGKISKTYVHSAVLAGGVAVGTSCHLIPSPWLAMVLGLVAGLISVGGAKYLPGCCNRVLGIPHSSIMGYNFSLLGLLGEIIYIVLLVLDTVGAGNGMSLGWNLAVKMAEAGDEELMRLDVSQRNHGGAAVPTGSWMPSTETTIAPNYRDHISVVSSFGCWILSKSIQEKQGLFKNKTTSSHCCLHLYVRNAHDSKVSNVRAGTGVRENGVESFLCHSLRRISPFIMHCRIQQ

SEQ ID NO: 61639 - protein, 396 aa, Homo sapiens
MSSKYPRSVRRCLPLWALTLEAALILLFYFFTHYDASLEDQKGLVASYQVGQDLTVMAAIGLGFLTSSFRRHSWSSVAFNLFMLALGVQWAILLDGFLSQFPSGKVVITLFSIRLATMSALSVLISVDAVLGKVNLAQLVVMVLVEVTALGNLRMVISNIFNTDYHMNMMHIYVFAAYFGLSVAWCLPKPLPEGTEDKDQTATIPSLSAMLGALFLWMFWPSFNSALLRSPIERKNAVFNTYYAVAVSVVTAISGSSLAHPQGKISKTYVHSAVLAGGVAVGTSCHLIPSPWLAMVLGLVAGLISVGGAKYLPGCCNRVLGIPHSSIMGYNFSLLGLLGEIIYIVLLVLDTVGAGNGIFLIWLLDFKQKHPRKTRPVQKQDNFLSLLPAFVREKRS

SEQ ID NO: 61640 - protein, 378 aa, Homo sapiens
MSSKYPRSVRRCLPLWALTLEAALILLFYFFTHYDASLEDQKGLVASYQVGQDLTVMAAIGLGFLTSSFRRHSWSSVAFNLFMLALGVQWAILLDGFLSQFPSGKVVITLFSIRLATMSALSVLISVDAVLGKVNLAQLVVMVLVEVTALGNLRMVISNIFNTDYHMNMMHIYVFAAYFGLSVAWCLPKPLPEGTEDKDQTATIPSLSAMLGALFLWMFWPSFNSALLRSPIERKNAVFNTYYAVAVSVVTAISGSSLAHPQGKISKTYVHSAVLAGGVAVGTSCHLIPSPWLAMVLGLVAGLISVGGAKYLPDWLPGPPQHWGTQLGHRDSSHVWSPDSFLIWLLDFKQKHPRKTRPVQKQDNFLSLLPAFVREKRS

SEQ ID NO: 61641 - protein, 487 aa, Homo sapiens
MSSKYPRSVRRCLPLWALTLEAALILLFYFFTHYDASLEDQKGLVASYQVGQDLTVMAAIGLGFLTSSFRRHSWSSVAFNLFMLALGVQWAILLDGFLSQFPSGKVVITLFSIRLATMSALSVLISVDAVLGKVNLAQLVVMVLVEVTALGNLRMVISNIFNTDYHMNMMHIYVFAAYFGLSVAWCLPKPLPEGTEDKDQTATIPSLSAMLGALFLWMFWPSFNSALLRSPIERKNAVFNTYYAVAVSVVTAISGSSLAHPQGKISKTYVHSAVLAGGVAVGTSCHLIPSPWLAMVLGLVAGLISVGGAKYLPGCCNRVLGIPHSSIMGYNFSLLGLLGEIIYIVLLVLDTVGAGNGMIGFQVLLSIGELSLAIVIALMSGLLTGLLLNLKIWKAPHEAKYFDDQVFWKFPHLAVGFSKSIQEKQGLFKNKTTSSHCCLHLYVRNAHDSKVSNVRAGTGVRENGVESFLCHSLRRISPFIMHCRIQQ

SEQ ID NO: 61642 - protein, 431 aa, Homo sapiens
MSSKYPRSVRRCLPLWALTLEAALILLFYFFTHYDASLEDQKGLVASYQVGQDLTVMAAIGLGFLTSSFRRHSWSSVAFNLFMLALGVQWAILLDGFLSQFPSGKVVITLFSIRLATMSALSVLISVDAVLGKVNLAQLVVMVLVEVTALGNLRMVISNIFNTDYHMNMMHIYVFAAYFGLSVAWCLPKPLPEGTEDKDQTATIPSLSAMLGALFLWMFWPSFNSALLRSPIERKNAVFNTYYAVAVSVVTAISGSSLAHPQGKISKTYVHSAVLAGGVAVGTSCHLIPSPWLAMVLGLVAGLISVGGAKYLPGCCNRVLGIPHSSIMGYNFSLLGLLGEIIYIVLLVLDTVGAGNGMSLGWNLAVKMAEAGDEELMRLDVSQRNHGGAAVPTGSWMPSTETTIAPNYRDHISVGLASRSSSALGNSAWPS

SEQ ID NO: 61643 - protein, 321 aa, Homo sapiens
MSSKYPRSVRRCLPLWALTLEAALILLFYFFTHYDASLEDQKGLVASYQVGQDLTVMAAIGLGFLTSSFRRHSWSSVAFNLFMLALGVQWAILLDGFLSQFPSGKVVITLFSIRLATMSALSVLISVDAVLGKVNLAQLVVMVLVEVTALGNLRMVISNIFNTDYHMNMMHIYVFAAYFGLSVAWCLPKPLPEGTEDKDQTATIPSLSAMLGALFLWMFWPSFNSALLRSPIERKNAVFNTYYAVAVSVVTAISGSSLAHPQGKISKTYVHSAVLAGGVAVGTSCHLIPSPWLAMVLGLVAGLISVGGAKYLPFPHLAVGF

SEQ ID NO: 61644 - protein, 97 aa, Homo sapiens
MAGSPSRAAGRRLQLPLLCLFLQGATAVLFAVFVRYNHKTDAALWHRSNHSNADNEFYFRYPNGVSLLLPRLECNGTISAHHNLCLPGSSDSPASVS

SEQ ID NO: 61645 - protein, 153 aa, Homo sapiens
MAGSPSRAAGRRLQLPLLCLFLQGATAVLFAVFVRYNHKTDAALWHRSNHSNADNEFYFRYPKESHSVAQAGVQRRNLGSLQPSPPRLPGRACHGLRGLWLPHGLPAALRLQQRGLHLPPGRLCPAVVHTGPGLSPLLPRWPHPCWRGEHDQC

SEQ ID NO: 61646 - protein, 372 aa, Homo sapiens
MVFVGFGFLMVFLQRYGFSSVGFTFLLAAFALQWSTLVQGFLHSFHGGHIHVGVESMINADFCAGAVLISFGAVLGKTGPTQLLLMALLEVVLFGINEFVLLHLLGVRDAGGSMTIHTFGAYFGLVLSRVLYRPQLEKSKHRQGSVYHSDLFAMIGTIFLWIFWPSFNAALTALGAGQHRTALNTYYSLAASTLGTFALSALVGEDGRLDMVHIQNAALAGGVVVGTSSEMMLTPFGALAAGFLAGTVSTLGYKFFTPILESKFKVQDTCGVHNLHGMPGVLGALLGVLVAGLATHEAYGDGLESVFPLIAEGQRSATSQAMHQLFGLFVTLMFASVGGGLGGLLLKLPFLDSPPRLPALRGPSSLAGAWRA

SEQ ID NO: 61647 - protein, 457 aa, Homo sapiens
MAGSPSRAAGRRLQLPLLCLFLQGATAVLFAVFVRYNHKTDAALWHRSNHSNADNEFYFRYPSFQDVHAMVFVGFGFLMVFLQRYGFSSVGFTFLLAAFALQWSTLVQGFLHSFHGGHIHVGVESMINADFCAGAVLISFGAVLGKTGPTQLLLMALLEVVLFGINEFVLLHLLGVRDAGGSMTIHTFGAYFGLVLSRVLYRPQLEKSKHRQGSVYHSDLFAMIGTIFLWIFWPSFNAALTALGAGQHRTALNTYYSLAASTLGTFALSALVGEDGRLDMVHIQNAALAGGVVVGTSSEMMLTPFGALAAGFLAGTVSTLGYKFFTPILESKFKVQDTCGVHNLHGMPGVLGALLGVLVAGLATHEAYGDGLESVFPLIAEGQRSATSQAMHQLFGLFVTLMFASVGGGLGGLLLKLPFLDPPDSQHYEDQVHWQVPGEHEDKAQRPLRVEEADTQA

SEQ ID NO: 61648 - protein, 441 aa, Homo sapiens
MAGSPSRAAGRRLQLPLLCLFLQGATAVLFAVFVRYNHKTDAALWHRSNHSNADNEFYFRYPSFQDVHAMVFVGFGFLMVFLQRYGFSSVGFTFLLAAFALQWSTLVQGFLHSFHGGHIHVGVESMINADFCAGAVLISFGAVLGKTGPTQLLLMALLEVVLFGINEFVLLHLLGVRDAGGSMTIHTFGAYFGLVLSRVLYRPQLEKSKHRQGSVYHSDLFAMIGTIFLWIFWPSFNAALTALGAGQHRTALNTYYSLAASTLGTFALSALVGEDGRLDMVHIQNAALAGGVVVGTSSEMMLTPFGALAAGFLAGTVSTLGYKFFTPILESKFKVQDTCGVHNLHGMPGVLGALLGVLVAGLATHEAYGDGLESVFPLIAEGQRSATSQAMHQLFGLFVTLMFASVGGGLGGLLLKLPFLDSPPRLPALRGPSSLAGAWRA

SEQ ID NO: 61649 - protein, 409 aa, Homo sapiens
MVFVGFGFLMVFLQRYGFSSVGFTFLLAAFALQWSTLVQGFLHSFHGGHIHVGVESMINADFCAGAVLISFGAVLGKTGPTQLLLMALLEVVLFGINEFVLLHLLGVRVWGGMESGVGGGQGQPLSQERGGGGGVLPLTPPPQVRDAGGSMTIHTFGAYFGLVLSRVLYRPQLEKSKHRQGSVYHSDLFAMIGTIFLWIFWPSFNAALTALGAGQHRTALNTYYSLAASTLGTFALSALVGEDGRLDMVHIQNAALAGGVVVGTSSEMMLTPFGALAAGFLAGTVSTLGYKFFTPILESKFKVQDTCGVHNLHGMPGVLGALLGVLVAGLATHEAYGDGLESVFPLIAEGQRSATSQAMHQLFGLFVTLMFASVGGGLGGLLLKLPFLDSPPRLPALRGPSSLAGAWRA

SEQ ID NO: 61650 - protein, 374 aa, Homo sapiens
MVFVGFGFLMVFLQRYGFSSVGFTFLLAAFALQWSTLVQGFLHSFHGGHIHVGVESMINADFCAGAVLISFGAVLGKTGPTQLLLMALLEVVLFGINEFVLLHLLGVRVWGGMESGVGGGQGQPLSQERGGGGGVLPLTPPPQVRDAGGSMTIHTFGAYFGLVLSRVLYRPQLEKSKHRQGSVYHSDLFAMIGTIFLWIFWPSFNAALTALGAGQHRTALNTYYSLAASTLGTFALSALVGEDGRLDMPILESKFKVQDTCGVHNLHGMPGVLGALLGVLVAGLATHEAYGDGLESVFPLIAEGQRSATSQAMHQLFGLFVTLMFASVGGGLGGIILVLCLLDPCALWHWVAPSSMVGGREASQILPYHHQGSC

SEQ ID NO: 61651 - protein, 228 aa, Homo sapiens
MAGSPSRAAGRRLQLPLLCLFLQGATAVLFAVFVRYNHKTDAALWHRSNHSNADNEFYFRYPRTIFLWIFWPSFNAALTALGAGQHRTALNTYYSLAASTLGTFALSALVGEDGRLDMVHIQNAALAGGVVVGTSSEMMLTPFGALAAGFLAGTVSTLGPSLNQNSKSKTHVESTTSMGCRGSWGPSWGSLWLDLPPMKLTEMGEFPPNPYCSRHPSGMTSVILFHCV

SEQ ID NO: 61652 - protein, 479 aa, Homo sapiens
MAWNTNLRWRLPLTCLLLQVIMVILFGVFVRYDFEADAHWWSERTHKNLSDMENEFYYRYPSFQDVHVMVFVGFGFLMTFLQRYGFSAVGFNFLLAAFGIQWALLMQGWFHFLQDRYIVVGVENLINADFCVASVCVAFGAVLGKVSPIQLLIMTFFQVTLFAVNEFILLNLLKVKDAGGSMTIHTFGAYFGLTVTRILYRRNLEQSKERQNSVYQSDLFAMIGTLFLWMYWPSFNSAISYHGDSQHRAAINTYCSLAACVLTSVAISSALHKKGKLDMVHIQNATLAGGVAVGTAAEMMLMPYGALIIGFVCGIISTLGFVYLTPFLESRLHIQDTCGINNLHGIPGIIGGIVGAVTAASASLEVYGKEGLVHSFDFQGFNGDWTARTQGKFQIYGLLVTLAMALMGGIIVGLILRLPFWGQPSDENCFEDAVYWEMPEGNSTVYIPEDPTFKPSGPSVPSVPMVSPLPMASSVPLVP

SEQ ID NO: 61653 - protein, 470 aa, Homo sapiens
MAWNTCLLLQVIMVILFGVFVRYDFEADAHWWSERTHKNLSDMENEFYYRYPSFQDVHVMVFVGFGFLMTFLQRYGFSAVGFNFLLAAFGIQWALLMQGWFHFLQDRYIVVGVENLINADFCVASVCVAFGAVLGKVSPIQLLIMTFFQVTLFAVNEFILLNLLKVKDAGGSMTIHTFGAYFGLTVTRILYRRNLEQSKERQNSVYQSDLFAMIGTLFLWMYWPSFNSAISYHGDSQHRAAINTYCSLAACVLTSVAISSALHKKGKLDMVHIQNATLAGGVAVGTAAEMMLMPYGALIIGFVCGIISTLGFVYLTPFLESRLHIQDTCGINNLHGIPGIIGGIVGAVTAASASLEVYGKEGLVHSFDFQGFNGDWTARTQGKFQIYGLLVTLAMALMGGIIVGLILRLPFWGQPSDENCFEDAVYWEMPEGNSTVYIPEDPTFKPSGPSVPSVPMVSPLPMASSVPLVP

SEQ ID NO: 61654 - protein, 445 aa, Homo sapiens
MAWNTNLRWRLPLTCLLLQVIMVILFGVFVRYDFEADAHWWSERTHKNLSDMENEFYYRYPSFQDVHVMVFVGFGFLMTFLQRYGFSAVGFNFLLAAFGIQWALLMQGWFHFLQDRYIVVGVENLINADFCVASVCVAFGAVLGKVSPIQLLIMTFFQVTLFAVNEFILLNLLKVKDAGGSMTIHTFGAYFGLTVTRILYRRNLEQSKERQNSVYQSDLFAMIGTLFLWMYWPSFNSAISYHGDSQHRAAINTYCSLAACVLTSVAISSALHKKGKLDMVHIQNATLAGGVAVGTAAEMMLMPYGALIIGFVCGIISTLGFVYLTPFLESRLHIQDTCGINNLHGIPGIIGGIVGAVTAASASLEVYGKEGLVHSFDFQGFNGDWTARTQGKFQIYGLLVTLAMALMGGIIVGLILRLPFWGQPSDENCFEDAVYWEDLELAPNQ

SEQ ID NO: 61655 - protein, 237 aa, Homo sapiens
  VARIANT 1: note = MOD_RES - Any amino acid
XDSQHRAAINTYCSLAACVLTSVAISSALHKKGKLDMVHIQNATLAGGVAVGTAAEMMLMPYGALIIGFVCGIISTLGFVYLTPFLESRLHIQDTCGINNLHGIPGIIGGIVGAVTAASASLEVYGKEGLVHSFDFQGFNGDWTARTQGKFQIYGLLVTLAMALMGGIIVGLILRLPFWGQPSDENCFEDAVYWEMPEGNSTVYIPEDPTFKPSGPSVPSVPMVSPLPMASSVPLVP

SEQ ID NO: 61656 - protein, 348 aa, Homo sapiens
MAHSQNSLELPININATQITTAYGHRALPKLKEELQSEDLQTRQKALMALCDLMHDPECIYKAMNIGCMENLKALLKDSNSMVRIKTTEVLHITASHSVGRYAFLEHDIVLALSFLLNDPSPVCRGNLYKAYMQLVQVPRGAQEIISKGLISSLVWKLQVEVEEEEFQEFILDTLVLCLQEDATEALGSNVVLVLKQKLLSANQNIRSKAARALLNVSISREGKKQVCHFDVIPILVHLLKDPVEHVKSNAAGALMFATVITEGKYAALEAQAIGLLLELLHSPMTIARLNATKALTMLAEAPEGRKALQTHVPTFRAMEVETYEKPQVAEALQRAARIAISVIEFKP

SEQ ID NO: 61657 - protein, 351 aa, Homo sapiens
MRFTFPLMAIVLEIAMIVLFGLFVEYETDQTVLEQLNITKPTDMGIFFELYPLFQDVHVMIFVGFGFLMTFLKKYGFSSVGINLLVAALGLQWGTIVQGILQSQGQKFNIGIKNMINADFSAATVLISFGAVLGKTSPTQMLIMTILEIVFFAHNEYLVSEIFKASDIGASMTIHAFGAYFGLAVAGILYRSGLRKGHENEESAYYSDLFAMIGTLFLWMFWPSFNSAIAEPGDKQCRAIVNTYFSLAACVLTAFAFSSLVEHRGKLNMVHIQNATLAGGVAVGTCADMAIHPFGSMIIGSIAGMVSVLGYKFLTVYGHAGSCTGFLYRNSSCWRSDDRFNSKVASLGTAI

SEQ ID NO: 61658 - protein, 409 aa, Homo sapiens
MRFTFPLMAIVLEIAMIVLFGLFVEYETDQTVLEQLNITKPTDMGIFFELYPLFQDVHVMIFVGFGFLMTFLKKYGFSSVGINLLVAALGLQWGTIVQGILQSQGQKFNIGIKNMINADFSAATVLISFGAVLGKTSPTQMLIMTILEIVFFAHNEYLVSEIFKASDIGASMTIHAFGAYFGLAVAGILYRSGLRKGHENEESAYYSDLFAMIGTLFLWMFWPSFNSAIAEPGDKQCRAIVNTYFSLAACVLTAFAFSSLVEHRGKLNMVHIQNATLAGGVAVGTCADMAIHPFGSMIIGSIAGMVSVLGYKFLTPLFTTKLRIHDTCGVHNLHGLPGVVGGLAGIVAVAMGASNTSMAMQAAALGSSIGTAVVGGLMTGLILKLPLWGQPSDQNCYDDSVYWKVPKTR

SEQ ID NO: 61659 - protein, 410 aa, Homo sapiens [sequence omitted]

SEQ ID NO: 61660 - protein, 381 aa, Homo sapiens [sequence omitted]

SEQ ID NO: 61661 - protein, 201 aa, Homo sapiens
MTEKAPEPHVEEDDDDELDSKLNYKPPPQKSLKELQEMDKDDESLIKYKKTLLGDGPVVTDPKAPNVVVTRLTLVCESAPGPITMDLTGDLEALKKETIVLKEGSEYRVKIHFKVNRDIVSGLKYVQHTYRTGVKVDKATFMVGSYGPRPEEYEFLTPVEEAPKGMLARGTYHNKSFFTDDDKQDHLSWEWNLSIKKEWTE

SEQ ID NO: 61662 - protein, 112 aa, Homo sapiens
MTEKAPEPHVEEDDDDELDSKLNYKPPPQKSLKELQEMDKDDESLIKYKKTLLGDGPVVTDPKAPNVVVTRLTLVCESAPGPITMDLTGDLEALKKETIVLKEGSEYRVKIH

SEQ ID NO: 61663 - protein, 201 aa, Homo sapiens; identical to SEQ ID NO: 61661

SEQ ID NO: 61664 - protein, 201 aa, Homo sapiens; identical to SEQ ID NO: 61661

SEQ ID NO: 61665 - protein, 88 aa, Homo sapiens
MTEKAPEPHVEEDDDDELDSKLNYKPPPQKSLKELQEMDKDDESLIKYKKTLLGDGPVVTDPKAPNVVVTRLTLVCESAPGPITMDLT

SEQ ID NO: 61666 - protein, 159 aa, Homo sapiens
MTEKAPEPHVEEDDDDELDSKLNYKPPPQKSLKELQEMDKDDESLIKYKKTLLGDGPVVTDPKAPNVVVTRLTLVCESAPGPITMDLTGDLEALKKETIVLKEGSEYRVKIHFKVNRDIVSGLKYVQHTYRTGVKVDKATFMVGSYGPRPEEYEFLTPV

SEQ ID NO: 61667 - protein, 439 aa, Homo sapiens
MDPLSELQDDLTLDDTSEALNQLKLASIDEKNWPSDEMPDFPKSDDSKSSSPELVTHLKWDDPYYDIARHQIVEVAGDDKYGRKIIVFSACRMPPSHQLDHSKLLGYLKHTLDQYVESDYTLLYLHHGLTSDNKPSLSWLRDAYREFDRKYKKNIKALYIVHPTMFIKTLLILFKPLISFKFGQKIFYVNYLSELSEHVKLEQLGIPRQVLKYDDFLKSTQKSPATAPKPMPPRPPLPNQQFGVSLQHLQEKNPEQEPIPIVLRETVAYLQAHALTTEGIFRRSANTQVVREVQQKYNMGLPVDFDQYNELHLPAVILKTFLRELPEPLLTFDLYPHVVGFLNIDESQRVPATLQVLQTLPEENYQVLRFLTAFLVQISAHSDQNKMTNTNLAVVFGPNLLWAKDAAITLKAINPINTFTKFLLDHQGELFPSPDPSGL

SEQ ID NO: 61668 - protein, 458 aa, Homo sapiens
MDPLSELQDDLTLDDTSEALNQLKLASIDEKNWPSDEMPDFPKSDDSKSSSPELVTHLKWDDPYYDIARHQIVEVAGDDKYGRKIIVFSACRMPPSHQLDHSKLLGYLKHTLDQYVESDYTLLYLHHGLTSDNKPSLSWLRDAYREFDRKYKKNIKALYIVHPTMFIKTLLILFKPLISFKFGQKIFYVNYLSELSEHVKLEQLGIPRQVLKYDDFLKSTQKSPATAPKPMPPRPPLPNQQFGVSLQHLQEKNPEQEPIPIVLRETVAYLQAHALTTEGIFRRSANTQVVREVQQKYNMGLPVDFDQYNELHLPAVILKTFLRELPEPLLTFDLYPHVVGFLNIDESQRVPATLQVLQTLPEENYQVLRFLTAFLVQISAHSDQNKMTNTNLAVVFGPNLLWAKDAAITLKAINPMATFFFFFLRWSLALSPGWSAVARSRHTSAFWVQAILLPQPPE

SEQ ID NO: 61669 - protein, 192 aa, Homo sapiens
MDPLSELQDDLTLDDTSEALNQLKLASIDEKNWPSDEMPDFPKSDDSKSSSPELVTHLKWDDPYYDIARHQIVEVAGDDKYGRKIIVFSACRMPPSHQLDHSKLLGYLKHTLDQYVESDYTLLYLHHGLTSDNKPSLSWLRDAYREFDRKYKKNIKALYIVHPTMFIKTLLILFKPLISFKFGQKIFYVNYL

SEQ ID NO: 61670 - protein, 786 aa, Homo sapiens
MGLQPLEFSDCYLDSPWFRERIRAHEAELERTNKFIKELIKDGKNLIAATKSLSVAQRKFAHSLRDFKFEFIGDAVTDDERCIDASLREFSNFLKNLEEQREIMALSVTETLIKPLEKFRKEQLGAVKEEKKKFDKETEKNYSLIDKHLNLSAKKKDSHLQEADIQVEQNRQHFYELSLEYVCKLQEIQERKKFEFVEPMLSFFQGMFTFYHQGHELAKDFNHYKMELQINIQNTRNRFEGTRSEVEELMNKIRQNPKDHKRASQFTAEGYLYVQEKRPAPFGSSWVKHYCMYRKAAKKFNMIPFEHRSGGKLGDGEVFFLKECTKRHTDSIDRRFCFDIEAADRPGVSLTMQAFSEEERKQWLEALGGKEALSHSFNTAIIPRPEGNAQLDKMGFTIIRKCISAVETRGINDQGLYRVVGVSSKVQRLLSMLMDVKTCNEVDLENSADWEVKTITSALKQYLRSLPEPLMTYELHGDFIVPAKSGSPESRVNAIHFLVHKLPEKNKEMLDILVKHLTNVSNHSKQNLMTVANLGVVFGPTLMRPQEETVAALMDLKFQNIVVEILIENHEKIFRTPPDTTFPEPTCLSASPPNAPPRQSKRQGQRTKRPVAVYNLCLELEDGDNPYPSKEDTPTSSLDSLSSPSPVTTAVPGPPGPDKNHLLADGGSFGDWASTIPGQTRSSMVQWLNPQSPTTTSSNSAVTPLSPGSSPFPFSPPATVADKPPESIRSRKARAVYPCEAEHSSELSFEIGAIFEDVQTSREPGWLEGTLNGKRGLIPQNYVKLL

SEQ ID NO: 61671 - protein, 384 aa, Homo sapiens
MQAFSEEERKQWLEALGGKEALSHSFNTAIIPRPEGNAQLDKMGFTIIRKCISAVETRGINDQGLYRVVGVSSKVQRLLSMLMDVKTCNEVDLENSADWEVKTITSALKQYLRSLPEPLMTYELHGDFIVPAKSGSPESRVNAIHFLVHKLPEKNKEMLDILVKHLTNVSNHSKQNLMTVANLGVVFGPTLMRPQEETVAALMDLKFQNIVVEILIENHEKIFRTPPDTTFPEPTCLSASPPNAPPRQSKRQGQRTKRPVAVYNLCLELEDGDNPYPSKEDTPTSSLDSLSSPSPVTTAVPGPPGPDKNHLLADGGSFGDWASTIIRSRKARAVYPCEAEHSSELSFEIGAIFEDVQTSREPGWLEGTLNGKRGLIPQNYVKLL

SEQ ID NO: 61672 - protein, 1023 aa, Homo sapiens
MWDQRLVRLALLQHLRAFYGIKVKGVRGQCDRRRHETAATEIGGKIFGVPFNALPHSAVPEYGHIPSFLVDACTSLEDHIHTEGLFRKSGSVIRLKALKNKVDHGEGCLSSAPPCDIAGLLKQFFRELPEPILPADLHEALLKAQQLGTEEKNKATLLLSCLLADHTVHVLRYFFNFLRNVSLRSSENKMDSSNLAVIFAPNLLQTSEGHEKMSSNTEKKLRLQAAVVQTLIDYASDIGRVPDFILEKIPAMLGIDGLCATPSLEGFEEGEYETPGEYKRKRRQSVGDFVSGALNKFKPNRTPSITPQEERIAQLSESPVILTPNAKRTLPVDSSHGFSSKKRKSIKHNFNFELLPSNLFNSSSTPVSVHIDTSSEGSSQSSLSPVLIGGNHLITAGVPRRSKRIAGKKVCRVESGKAGCFSPKISHKEKVRRSLRLKFNLGKNGREVNGCSGVNRYESVGWRLANQQSLKNRIESVKTGLLFSPDVDEKLPKKGSEKISKSEETLLTPERLVGTNYRMSWTGPNNSSFQEVDANEASSMVENLEVENSLEPDIMVEKSPATSCELTPSNLNNKHNSNITSSPLSGDENNMTKETLVKVQKAFSESGSNLHALMNQRQSSVTNVGKVKLTEPSYLEDSPEENLFETNDLTIVESKEKYEHHTGKGEKCFSERDFSPLQTQTFNRETTIKCYSTQMKMEHEKDIHSNMPKDYLSKQEFSSDEEIKKQQSPKDKLNNKLKENENMMEGNLPKCAAHSKDEARSSFSQQSTCVVTNLSKPRPMRIAKQQSLETCEKTVSESSQMTEHRKVSDHIQWFNKLSLNEPNRIKVKSPLKFQRTPVRQSVRRINSLLEYSRQPTGHKLASLGDTASPLVKSVSCDGALSSCIESASKDSSVSCIKSGPKEQKSMSCEESNIGAISKSSMELPSKSFLKMRKHPDSVNASLRSTTVYKQKILSDGQVKVPLDDLTNHDIVKPVVNNNMGISSGINNRVLRRPSERGRAWYKGSPKHPIGKTQLLPTSKPVDL

SEQ ID NO: 61673 - protein, 834 aa, Homo sapiens
MDSSNLAVIFAPNLLQTSEGHEKMSSNTEKKLRLQAAVVQTLIDYASDIGRVPDFILEKIPAMLGIDGLCATPSLEGFEEGEYETPGEYKRKRRQSVGDFVSGALNKFKPNRTPSITPQEERIAQLSESPVILTPNAKRTLPVDSSHGFSSKKRKSIKHNFNFELLPSNLFNSSSTPVSVHIDTSSEGSSQSSLSPVLIGGNHLITAGVPRRSKRIAGKKVCRVESGKAGCFSPKISHKEKVRRSLRLKFNLGKNGREVNGCSGVNRYESVGWRLANQQSLKNRIESVKTGLLFSPDVDEKLPKKGSEKISKSEETLLTPERLVGTNYRMSWTGPNNSSFQEVDANEASSMVENLEVENSLEPDIMVEKSPATSCELTPSNLNNKHNSNITSSPLSGDENNMTKETLVKVQKAFSESGSNLHALMNQRQSSVTNVGKVKLTEPSYLEDSPEENLFETNDLTIVESKEKYEHHTGKGEKCFSERDFSPLQTQTFNRETTIKCYSTQMKMEHEKDIHSNMPKDYLSKQEFSSDEEIKKQQSPKDKLNNKLKENENMMEGNLPKCAAHSKDEARSSFSQQSTCVVTNLSKPRPMRIAKQQSLETCEKTVSESSQMTEHRKVSDHIQWFNKLSLNEPNRIKVKSPLKFQRTPVRQSVRRINSLLEYSRQPTGHKLASLGDTASPLVKSVSCDGALSSCIESASKDSSVSCIKSGPKEQKSMSCEESNIGAISKSSMELPSKSFLKMRKHPDSVNASLRSTTVYKQKILSDGQVKVPLDDLTNHDIVKPVVNNNMGISSGINNRVLRRPSERGRAWYKGSPKHPIGKTQLLPTSKPVDL

SEQ ID NO: 61674 - protein, 501 aa, Homo sapiens
MWDQRLVRLALLQHLRAFYGIKVKGVRGQCDRRRHETAATEIGGKIFGVPFNALPHSAVPEYGHIPSFLVDACTSLEDHIHTEGLFRKSGSVIRLKALKNKVDHGEGCLSSAPPCDIAGLLKQFFRELPEPILPADLHEALLKAQQLGTEEKNKATLLLSCLLADHTVHVLRYFFNFLRNVSLRSSENKMDSSNLAVIFAPNLLQTSEGHEKMSSNTEKKLRLQAAVVQTLIDYASDIGRVPDFILEKIPAMLGIDGLCATPSLEGFEEGEYETPGEYKRKRRQSVGDFVSGALNKFKPNRTPSITPQEERIAQLSESPVILTPNAKRTLPVDSSHGFSSKKRKSIKHNFNFELLPSNLFNSSSTPVSVHIDTSSEGSSQSSLSPVLIGGNHLITAGVPRRSKRIAGKKVCRVESGKAGCFSPKISHKEKVRRSLRLKFNLGKNGREVNGCSGVNRYESVGWRLANQQSLKNRIESVKTGLLFSPDVDEKLPKKGTFTYYC

SEQ ID NO: 61675 - protein, 794 aa, Homo sapiens
MKMADRSGKIIPGQVYIEVEYDYEYEAKDRKIVIKQGERYILVKKTNDDWWQVKPDENSKAFYVPAQYVKEVTRKALMPPVKQVAGLPNNSTKIMQSLHLQRSTENVNKLPELSSFGKPSSSVQGTGLIRDANQNFGPSYNQGQTVNLSLDLTHNNGKFNNDSHSPKVSSQNRTRSFGHFPGPEFLDVEKTSFSQEQSCDSAGEGSERIHQDSESGDELSSSSTEQIRATTPPNQGRPDSPVYANLQELKISQSALPPLPGSPAIQINGEWETHKDSSGRCYYYNRGTQERTWKPPRWTRDASISKGDFQNPGDQEWLKHVDDQGRQYYYSADGSRSEWELPKYNASSQQQREIIKSRSLDRRLQEPIVLTKWRHSTIVLDTNDKESPTASKPCFPENESSPSSPKHQDTDQEKYGLLNVTKIAENGKKVRKNWLSSWAVLQGSSLLFTKTQGSSTSWFGSNQSKPEFTVDLKGATIEMASKDKSSKKNVFELKTRQGTELLIQSDNDTVINDWFKVLSSTINNQAVETDEGIEEEIPDSPGIEKHDKEKEQKDPKKLRSFKVSSIDSSEQKKTKKNLKKFLTRRPTLQAVREKGYIKDQVFGSNLANLCQRENGTVPKFVKLCIEHVEEHGLDIDGIYRVSGNLAVIQKLRFAVNHDEKLDLNDSKWEDIHVITGALKMFFRELPEPLFTFNHFNDFVNAIKQEPRQRVAAVKDLIRQLPKPNQDTMQILFRHLRRVIENGEKNRMTYQSIAIVFGPTLLKPEKETGNIAVHTVYQNQIVELILLELSSIFGR

SEQ ID NO: 61676 - protein, 846 aa, Homo sapiens
MKMADRSGKIIPGQVYIEVEYDYEYEAKDRKIVIKQGERYILVKKTNDDWWQVKPDENSKAFYVPAQYVKEVTRKALMPPVKQVAGLPNNSTKIMQSLHLQRSTENVNKLPELSSFGKPSSSVQGTGLIRDANQNFGPSYNQGQTVNLSLDLTHNNGKFNNDSHSPKVSSQNRTRSFGHFPGPEFLDVEKTSFSQEQSCDSAGEGSERIHQDSESGDELSSSSTEQIRATTPPNQGRPDSPVYANLQELKISQSALPPLPGSPAIQINGEWETHKDSSGRCYYYNRGTQERTWKPPRWTRDASISKGDFQNPGDQELLSSEENYYSTSYSQSDSQCGSPPRGWSEELDERGHTLYTSDYTNEKWLKHVDDQGRQYYYSADGSRSEWELPKYNASSQQQREIIKSRSLDRRLQEPIVLTKWRHSTIVLDTNDKESPTASKPCFPENESSPSSPKHQDTASSPKDQEKYGLLNVTKIAENGKKVRKNWLSSWAVLQGSSLLFTKTQGSSTSWFGSNQSKPEFTVDLKGATIEMASKDKSSKKNVFELKTRQGTELLIQSDNDTVINDWFKVLSSTINNQAVETDEGIEEEIPDSPGIEKHDKEKEQKDPKKLRSFKVSSIDSSEQKKTKKNLKKFLTRRPTLQAVREKGYIKDQVFGSNLANLCQRENGTVPKFVKLCIEHVEEHGLDIDGIYRVSGNLAVIQKLRFAVNHDEKLDLNDSKWEDIHVITGALKMFFRELPEPLFTFNHFNDFVNAIKQEPRQRVAAVKDLIRQLPKPNQDTMQILFRHLRRVIENGEKNRMTYQSIAIVFGPTLLKPEKETGNIAVHTVYQNQIVELILLELSSIFGR

SEQ ID NO: 61677 - protein, 794 aa, Homo sapiens; identical to SEQ ID NO: 61675

SEQ ID NO: 61678 - protein, 816 aa, Homo sapiens
MKMADRSGKIIPGQVYIEVEYDYEYEAKDRKIVIKQGERYILVKKTNDDWWQVKPDENSKAFYVPAQYVKEVTRKALMPPVKQVAGLPNNSTKIMQSLHLQRSTENVNKLPELSSFGKPSSSVQGTGLIRDANQNFGPSYNQGQTVNLSLDLTHNNGKFNNDSHSPKVSSQNRTRSFGHFPGPEFLDVEKTSFSQEQSCDSAGEGSERIHQDSESGDELSSSSTEQIRATTPPNQGRPDSPVYANLQELKISQSALPPLPGSPAIQINGEWETHKDSSGRCYYYNRGTQERTWKPPRWTRDASISKGDFQNPGDQELLSSEENYYSTSYSQSDSQCGSPPRGWSEELDERGHTLYTSDYTNEKWLKHVDDQGRQYYYSADGSRSEWELPKYNASSQQQREIIKSRSLDRRLQEPIVLTKWRHSTIVLDTNDKDQEKYGLLNVTKIAENGKKVRKNWLSSWAVLQGSSLLFTKTQGSSTSWFGSNQSKPEFTVDLKGATIEMASKDKSSKKNVFELKTRQGTELLIQSDNDTVINDWFKVLSSTINNQAVETDEGIEEEIPDSPGIEKHDKEKEQKDPKKLRSFKVSSIDSSEQKKTKKNLKKFLTRRPTLQAVREKGYIKDQVFGSNLANLCQRENGTVPKFVKLCIEHVEEHGLDIDGIYRVSGNLAVIQKLRFAVNHDEKLDLNDSKWEDIHVITGALKMFFRELPEPLFTFNHFNDFVNAIKQEPRQRVAAVKDLIRQLPKPNQDTMQILFRHLRRVIENGEKNRMTYQSIAIVFGPTLLKPEKETGNIAVHTVYQNQIVELILLELSSIFGR

SEQ ID NO: 61679 - protein, 841 aa, Homo sapiens
MKMADRSGKIIPGQVYIEVEYDYEYEAKDRKIVIKQGERYILVKKTNDDWWQVKPDENSKAFYVPAQYVKEVTRKALMPPVKQVAGLPNNSTKIMQSLHLQRSTENVNKLPELSSFGKPSSSVQGTGLIRDANQNFGPSYNQGQTVNLSLDLTHNNGKFNNDSHSPKVSSQNRTRSFGHFPGPEFLDVEKTSFSQEQSCDSAGEGSERIHQDSESGDELSSSSTEQIRATTPPNQGRPDSPVYANLQELKISQSALPPLPGSPAIQINGEWETHKDSSGRCYYYNRGTQERTWKPPRWTRDASISKGDFQNPGDQELLSSEENYYSTSYSQSDSQCGSPPRGWSEELDERGHTLYTSDYTNEKWLKHVDDQGRQYYYSADGSRSEWELPKYNASSQQQREIIKSRSLDRRLQEPIVLTKWRHSTIVLDTNDKESPTASKPCFPENESSPSSPKHQDTDQEKYGLLNVTKIAENGKKVRKNWLSSWAVLQGSSLLFTKTQGSSTSWFGSNQSKPEFTVDLKGATIEMASKDKSSKKNVFELKTRQGTELLIQSDNDTVINDWFKVLSSTINNQAVETDEGIEEEIPDSPGIEKHDKEKEQKDPKKLRSFKVSSIDSSEQKKTKKNLKKFLTRRPTLQAVREKGYIKDQVFGSNLANLCQRENGTVPKFVKLCIEHVEEHGLDIDGIYRVSGNLAVIQKLRFAVNHDEKLDLNDSKWEDIHVITGALKMFFRELPEPLFTFNHFNDFVNAIKQEPRQRVAAVKDLIRQLPKPNQDTMQILFRHLRRVIENGEKNRMTYQSIAIVFGPTLLKPEKETGNIAVHTVYQNQIVELILLELSSIFGR

SEQ ID NO: 61680 - protein, 196 aa, Homo sapiens
  VARIANT 1: note = MOD_RES - Any amino acid
XSTSYSQSDSQCGSPPRGWSEELDERGHTLYTSDYTNEKWLKHVDDQGRQYYYSADGSRSEWELPKYNASSQQQREIIKSRSLDRRLQEPIVLTKWRHSTIVLDTNDKESPTASKPCFPENESSPSSPKHQDTDQEKYGLLNVTKIAENGKKVRKNWLSSWAVLQGSSLLFTKTQGSSTSWFGSNQSKPEFTVDLK

SEQ ID NO: 61681 - protein, 881 aa, Homo sapiens
MKKQFNRMKQLANQTVGRAEKTEVLSEDLLQIERRLDTVRSICHHSHKRLVACFQGQHGTDAERRHKKLPLTALAQNMQEASTQLEDSLLGKMLETCGDAENQLALELSQHEVFVEKEIVDPLYGIAEVEIPNIQKQRKQLARLVLDWDSVRARWNQAHKSSGTNFQGLPSKIDTLKEEMDEAGNKVEQCKDQLAADMYNFMAKEGEYGKFFVTLLEAQADYHRKALAVLEKTLPEMRAHQDKWAEKPAFGTPLEEHLKRSGREIALPIEACVMLLLETGMKEEGLFRIGAGASKLKKLKAALDCSTSHLDEFYSDPHAVAGALKSYLRELPEPLMTFNLYEEWTQVASVQDQDKKLQDLWRTCQKLPPQNFVNFRYLIKFLAKLAQTSDVNKMTPSNIAIVLGPNLLWARNEGTLAEMAAATSVHVVAVIEPIIQHADWFFPEEVEFNVSEAFVPLTTPSSNHSFHTGNDSDSGTLERKRPASMAVMEGDLVKKESFGVKLMDFQAHRRGGTLNRKHISPAFQPPLPPTDGSTVVPAGPEPPPQSSRAESSSGGGTVPSSAGILEQGPSPGDGSPPKPKDPVSAAVPAPGRNNSQIASGQNQPQAAAGSHQLSMGQPHNAAGPSPHTLRRAVKKPAPAPPKPGNPPPGHPGGQSSSGTSQHPPSLSPKPPTRSPSPPTQHTGQPPGQPSAPSQLSAPRRYSSSLSPIQAPNHPPPQPPTQATPLMHTKPNSQGPPNPMALPSEHGLEQPSHTPPQTPTPPSTPPLGKQNPSLPAPQTLAGGNPETAQPHAGTLPRPRPVPKPRNRPSVPPPPQPPGVHSAGDSSLTNTAPTASKIVTDSNSRVSEPHRSIFPEMHSDSASKDVPGRILLDIDNDTESTAL

SEQ ID NO: 61682 - protein, 803 aa, Homo sapiens
MKKQFNRMKQLANQTVGRAEKTEVLSEDLLQIERRLDTVRSICHHSHKRLVACFQGQHGTDAERRHKKLPLTALAQNMQEASTQLEDSLLGKMLETCGDAENQLALELSQHEVFVEKEIVDPLYGIAEVEIPNIQKQRKQLARLVLDWDSVRARWNQAHKSSGTNFQGLPSKIDTLKEEMDEAGNKVEQCKDQLAADMYNFMAKEGEYGKFFVTLLEAQADYHRKALAVLEKTLPEMRAHQDKWAEKPAFGTPLEEHLKRSGREIALPIEACVMLLLETGMKEEGLFRIGAGASKLKKLKAALDCSTSHLDEFYSDPHAVAGALKSYLRELPEPLMTFNLYEEWTQVASVQDQDKKLQDLWRTCQKLPPQNFVNFRYLIKFLAKLAQTSDVNKMTPSNIAIVLGPNLLWARNEGTLAEMAAATSVHVVAVIEPIIQHADWFFPEEVEFNVSEAFVPLTTPSSNHSFHTGNDSDSGTLERKRPASMAVMEGDLVKKESPPKPKDPVSAAVPAPGRNNSQIASGQNQPQAAAGSHQLSMGQPHNAAGPSPHTLRRAVKKPAPAPPKPGNPPPGHPGGQSSSGTSQHPPSLSPKPPTRSPSPPTQHTGQPPGQPSAPSQLSAPRRYSSSLSPIQAPNHPPPQPPTQATPLMHTKPNSQGPPNPMALPSEHGLEQPSHTPPQTPTPPSTPPLGKQNPSLPAPQTLAGGNPETAQPHAGTLPRPRPVPKPRNRPSVPPPPQPPGVHSAGDSSLTNTAPTASKIVTDSNSRVSEPHRSIFPEMHSDSASKDVPGRILLDIDNDTESTAL

SEQ ID NO: 61683 - protein, 226 aa, Homo sapiens
MKKQFNRMKQLANQTVGRAEKTEVLSEDLLQIERRLDTVRSICHHSHKRLVACFQGQHGTDAERRHKKLPLTALAQNMQEASTQLEDSLLGKMLETCGDAENQLALELSQHEVFVEKEIVDPLYGIAEVEIPNIQKQRKQLARLVLDWDSVRARWNQAHKSSGTNFQGLPSKIDTLKEEMDEAGNKVEQCKDQLAADMYNFMAKEGEYGKFFVTISGRKNQPLGLP

SEQ ID NO: 61684 - protein, 840 aa, Homo sapiens
MKKQFNRMKQLANQTVGRAEKTEVLSEDLLQIERRLDTVRSICHHSHKRLVACFQGQHGTDAERRHKKLPLTALAQNMQEASTQLEDSLLGKMLETCGDAENQLALELSQHEVFVEKEIVDPLYGIAEVEIPNIQKQRKQLARLVLDWDSVRARWNQAHKSSGTNFQGLPSKIDTLKEEMDEAGNKVEQCKDQLAADMYNFMAKEGEYGKFFVTLLEAQADYHRKALAVLEKTLPEMRAHQDKWAEKPAFGTPLEEHLKRSGREIALPIEACVMLLLETGMKEEGLFRIGAGASKLKKLKAALDCSTSHLDEFYSDPHAVAGALKSYLRELPEPLMTFNLYEEWTQVASVQDQDKKLQDLWRTCQKLPPQNFVNFRYLIKFLAKLAQTSDVNKMTPSNIAIVLGPNLLWARNEGTLAEMAAATSVHVVAVIEPIIQHADWFFPEEVEFNVSEAFVPLTTPSSNHSFHTGNDSDSGTLERKRPASMAVMEGDLVKKESFGVKLMDFQAHRRGGTLNRKHISPAFQPPLPPTDGSTVVPAGPEPPPQSSRAESSSGGGTVPSSAGILEQGPSPGDGSPPKPKDPVSAAVPAPGRNNSQIASGQNQPQAAAGSHQLSMGQPHNAAGPSPHTLRRAVKKPAPAPPKPGNPPPGHPGGQSSSGTSQHPPSLSPKPPTRSPSPPTQHTGQPPGQPSAPSQLSAPRRYSSSLSPIQAPNHPPPQPPTQATPLMHTKPNSQGPPNPMALPSEHGLEQPSHTPPQTPTPPSTPPLGKQNPSLPAPQTLAGGNPETAQPHAGTLPRPRPVPKPRNRPSVPPPPQPPGVHSAGDSSLTNTAPTASKIVTGV

SEQ ID NO: 61685 - protein, 663 aa, Homo sapiens
MSWLSSSQGVVLTAYHPSGKDQTVGNSHAKAGEEATSSRRYGQYTMNQESTTIKVMEKPPFDRSISQDSLDELSMEDYWIELENIKKSSENSQEDQEVVVVKEPDEGELEEEWLKEAGLSNLFGESAGDPQESIVFLSTLTRTQAAAVQKRVETVSQTLRKKNKQYQIPDVRDIFAQQRESKETAPGGTESQSLRTNENKYQGRDDEASNLVGEEKLIPPEETPAPETDINLEVSFAEQALNQKESSKEKIQKSKGDDATLPSFRLPKDKTGTTRIGDLAPQDMKKVCHLALIELTALYDVLGIELKQQKAVKIKTKDSGLFCVPLTALLEQDQRKVPGMRIPLIFQKLISRIEERGLETEGLLRIPGAAIRIKNLCQELEAKFYEGTFNWESVKQHDAASLLKLFIRELPQPLLSVEYLKAFQAVQNLPTKKQQLQALNLLVILLPDANRDTLKALLEFLQRVIDNKEKNKMTVMNVAMVMAPNLFMCHALGLKSSEQREFVMAAGTANTMHLLIKYQKLLWTIPKFIVNQVRKQNTENHKKDKRAMKKLLKKMAYDREKYEKQDKSTNDADVPQGVIRVQAPHLSKVSMAIQLTEELKASDVLARFLSQESGVAQTLKKGEVFLYEIGGNIGERCLDDDTYMKDLYQLNPNAEWVIKSKPL

SEQ ID NO: 61686 - protein, 618 aa, Homo sapiens
MNQESTTIKVMEKPPFDRSISQDSLDELSMEDYWIELENIKKSSENSQEDQEVVVVKEPDEGELEEEWLKEAGLSNLFGESAGDPQESIVFLSTLTRTQAAAVQKRVETVSQTLRKKNKQYQIPDVRDIFAQQRESKETAPGGTESQSLRTNENKYQGRDDEASNLVGEEKLIPPEETPAPETDINLEVSFAEQALNQKESSKEKIQKSKGDDATLPSFRLPKDKTGTTRIGDLAPQDMKKVCHLALIELTALYDVLGIELKQQKAVKIKTKDSGLFCVPLTALLEQDQRKVPGMRIPLIFQKLISRIEERGLETEGLLRIPGAAIRIKNLCQELEAKFYEGTFNWESVKQHDAASLLKLFIRELPQPLLSVEYLKAFQAVQNLPTKKQQLQALNLLVILLPDANRDTLKALLEFLQRVIDNKEKNKMTVMNVAMVMAPNLFMCHALGLKSSEQREFVMAAGTANTMHLLIKYQKLLWTIPKFIVNQVRKQNTENHKKDKRAMKKLLKKMAYDREKYEKQDKSTNDADVPQGVIRVQAPHLSKVSMAIQLTEELKASDVLARFLSQESGVAQTLKKGEVFLYEIGGNIGERCLDDDTYMKDLYQLNPNAEWVIKSKPL

SEQ ID NO: 61687 - protein, 494 aa, Homo sapiens
MATEAQSEGEVPARESGRSDAICSFVICNDSSLRGQPIIFNPDFFVEKLRHEKPEIFTELVVSNITRLIDLPGTELAQLMGEVDLKLPGGAGPASGFFRSLMSLKRKEKGVIFGSPLTEEGIAQIYQLIEYLHKNLRVEGLFRVPGNSVRQQILRDALNNGTDIDLESGEFHSNDVATLLKMFLGELPEPLLTHKHFNAHLKIADLMQFDDKGNKTNIPDKDRQIEALQLLFLILPPPNRNLLKLLLDLLYQTAKKQDKNKMSAYNLALMFAPHVLWPKNVTANDLQENITKLNSGMAFMIKHSQKLFKAPAYIRECARLHYLGSRTQASKDDLDLIASCHTKSFQLAKSQKRNRVDSCPHQEETQHHTEEALRELFQHVHDMPESAKKKQLIRQFNKQSLTQTPGREPSTSQVQKRARSRSFSGLIKRKVLGNQMMSEKKKKNPTPESVAIGELKGTSKENRNLLFSGSPAVTMTPTRLKWSEGKKEGKKVFL

SEQ ID NO: 61688 - protein, 485 aa, Homo sapiens
MPHQKLSALIDAICSFVICNDSSLRGQPIIFNPDFFVEKLRHEKPEIFTELVVSNITRLIDLPGTELAQLMGEVDLKLPGGAGPASGFFRSLMSLKRKEKGVIFGSPLTEEGIAQIYQLIEYLHKNLRVEGLFRVPGNSVRQQILRDALNNGTDIDLESGEFHSNDVATLLKMFLGELPEPLLTHKHFNAHLKIADLMQFDDKGNKTNIPDKDRQIEALQLLFLILPPPNRNLLKLLLDLLYQTAKKQDKNKMSAYNLALMFAPHVLWPKNVTANDLQENITKLNSGMAFMIKHSQKLFKAPAYIRECARLHYLGSRTQASKDDLDLIASCHTKSFQLAKSQKRNRVDSCPHQEETQHHTEEALRELFQHVHDMPESAKKKQLIRQFNKQSLTQTPGREPSTSQVQKRARSRSFSGLIKRKVLGNQMMSEKKKKNPTPESVAIGELKGTSKENRNLLFSGSPAVTMTPTRLKWSEGKKEGKKVFL

SEQ ID NO: 61689 - protein, 465 aa, Homo sapiens
MATEAQSEGEVPARESGRSDAICSFVICNDSSLRGQPIIFNPDFFVEKLRHEKPEIFTELVVSNITRLIDLPGTELAQLMGEVDLKLPGGAGPASGFFRSLMSLKRKEKGVIFGSPLTEEGIAQIYQLIEYLHKNLRVEGLFRVPGNSVRQQILRDALNNGTDIDLESGEFHSNDVATLLKMFLGELPEPLLTHKHFNAHLKIADLMQFDDKGNKTNIPDKDRQIEALQLLFLILPPPNRNLLKLLLDLLYQTAKKQDKNKMSAYNLALMFAPHVLWPKNAPAYIRECARLHYLGSRTQASKDDLDLIASCHTKSFQLAKSQKRNRVDSCPHQEETQHHTEEALRELFQHVHDMPESAKKKQLIRQFNKQSLTQTPGREPSTSQVQKRARSRSFSGLIKRKVLGNQMMSEKKKKNPTPESVAIGELKGTSKENRNLLFSGSPAVTMTPTRLKWSEGKKEGKKAFV

SEQ ID NO: 61690 - protein, 494 aa, Homo sapiens
MATEAQSEGEVPARESGRSDAICSFVICNDSSLRGQPIIFNPDFFVEKLRHEKPEIFTELVVSNITRLIDLPGTELAQLMGEVDLKLPGGAGPASGFFRSLMSLKRKEKGVIFGSPLTEEGIAQIYQLIEYLHKNLRVEGLFRVPGNSVRQQILRDALNNGTDIDLESGEFHSNDVATLLKMFLGELPEPLLTHKHFNAHLKIADLMQFDDKGNKTNIPDKDRQIEALQLLFLILPPPNRNLLKLLLDLLYQTAKKQDKNKMSAYNLALMFAPHVLWPKNVTANDLQENITKLNSGMAFMIKHSQKLFKAPAYIRECARLHYLGSRTQASKDDLDLIASCHTKSFQLAKSQKRNRVDSCPHQEETQHHTEEALRELFQHVHDMPESAKKKQLIRQFNKQSLTQTPGREPSTSQVQKRARSRSFSGLIKRKVLGNQMMSEKKKKNPTPESVAIGELKGTSKENRNLLFSGSPAVTMTPTRLKWSEGKKEGKKGFL

SEQ ID NO: 61691 - protein, 485 aa, Homo sapiens
MPHQKLSALIDAICSFVICNDSSLRGQPIIFNPDFFVEKLRHEKPEIFTELVVSNITRLIDLPGTELAQLMGEVDLKLPGGAGPASGFFRSLMSLKRKEKGVIFGSPLTEEGIAQIYQLIEYLHKNLRVEGLFRVPGNSVRQQILRDALNNGTDIDLESGEFHSNDVATLLKMFLGELPEPLLTHKHFNAHLKIADLMQFDDKGNKTNIPDKDRQIEALQLLFLILPPPNRNLLKLLLDLLYQTAKKQDKNKMSAYNLALMFAPHVLWPKNVTANDLQENITKLNSGMAFMIKHSQKLFKAPAYIRECARLHYLGSRTQASKDDLDLIASCHTKSFQLAKSQKRNRVDSCPHQEETQHHTEEALRELFQHVHDMPESAKKKQLIRQFNKQSLTQTPGREPSTSQVQKRARSRSFSGLIKRKVLGNQMMSEKKKKNPTPESVAIGELKGTSKENRNLLFSGSPAVTMTPTRLKWSEGKKEGKKGFL

SEQ ID NO: 61692 - protein, 313 aa, Homo sapiens
MFLGELPEPLLTHKHFNAHLKIADLMQFDDKGNKTNIPDKDRQIEALQLLFLILPPPNRNLLKLLLDLLYQTAKKQDKNKMSAYNLALMFAPHVLWPKNVTANDLQENITKLNSGMAFMIKHSQKLFKAPAYIRECARLHYLGSRTQASKDDLDLIASCHTKSFQLAKSQKRNRVDSCPHQEETQHHTEEALRELFQHVHDMPESAKKKQLIRQFNKQSLTQTPGREPSTSQVQKRARSRSFSGLIKRKVLGNQMMSEKKKKNPTPESVAIGELKGTSKENRNLLFSGSPAVTMTPTRLKWSEGKKEGKKGFL

SEQ ID NO: 61693 - protein, 517 aa, Homo sapiens
MATEAQSEGEVPARESGRSDAICSFVICNDSSLRGQPIIFNPDFFVEKLRHEKPEIFTELVVSNITRLIDLPGTELAQLMGEVDLKLPGGAGPASGFFRSLMSLKRKEKGVIFGSPLTEEGIAQIYQLIEYLHKNLRVEGLFRVPGNSVRQQILRDALNNGTDIDLESGEFHSNDVATLLKMFLGELPEPLLTHKHFNAHLKIADLMQFDDKGNKTNIPDKDRQIEALQLLFLILPPPNRNLLKLLLDLLYQTAKKQDKNKMSAYNLALMFAPHVLWPKNVTANDLQENITKLNSGMAFMIKHSQKLFKAPAYIRECARLHYLGSRTQASKDDLDLIASCHTKSFQLAKSQKRNRVDSCPHQEETQHHTEEALRELFQHVHDMPESAKKKQLIRQFNKQSLTQTPGREPSTSQVQKRARSRSFSGLIKRKVLGNQMMSEKKKKNPTPESVAIGELKGTSKENRNLLFSGSPAVTMTPTRLKWSEGKKEGKKGNSMATTSLGSIRMTLRGSSSCGCCS

SEQ ID NO: 61694 - protein, 1217 aa, Homo sapiens
MAQPVEISPPDSSLSKQQTSTPVLTQPGRAYRMEIQVPPSPTDVAKSNTAVCVCNESVRTVIVPSEKVVDLLSNRNNHTGPSHRTEEVRYGVSEQTSLKTVSRTTSPPLSIPTTHLIHQPAGSRSLEPSGILLKSGNYSGHSDGISSSRSQAVEAPSVSVNHYSPNSHQHIDWKNYKTYKEYIDNRRLHIGCRTIQERLDSLRAASQSTTDYNQVVPNRTTLQGRRRSTSHDRVPQSVQIRQRSVSQERLEDSVLMKYCPRSASQGALTSPSVSFSNHRTRSWDYIEGQDETLENVNSGTPIPDSNGEKKQTYKWSGFTEQDDRRGICERPRQQEIHKSFRGSNFTVAPSVVNSDNRRMSGRGVGSVSQFKKIPPDLKTLQSNRNFQTTCGMSLPRGISQDRSPLVKVRSNSLKAPSTHVTKPSFSQKSFVSIKDQRPVNHLHQNSLLNQQTWVRTDSAPDQQVETGKSPSLSGASAKPAPQSSENAGTSDLELPVSQRNQDLSLQEAETEQSDTLDNKEAVILREKPPSGRQTPQPLRHQSYILAVNDQETGSDTTCWLPNDARREVHIKRMEERKASSTSPPGDSLASIPFIDEPTSPSIDHDIAHIPASAVISASTSQVPSIATVPPCLTTSAPLIRRQLSHDHESVGPPSLDAQPNSKTERSKSYDEGLDDYREDAKLSFKHVSSLKGIKIADSQKSSEDSGSRKDSSSEVFSDAAKEGWLHFRPLVTDKGKRVGGSIRPWKQMYVVLRGHSLYLYKDKREQTTPSEEEQPISVNACLIDISYSETKRKNVFRLTTSDCECLFQAEDRDDMLAWIKTIQESSNLNEEDTGVTNRDLISRRIKEYNNLMSKAEQLPKTPRQSLSIRQTLLGAKSEPKTQSPHSPKEESERKLLSKDDTSPPKDKGTWRKGIPSIMRKTFEKKPTATGTFGVRLDDCPPAHTNRYIPLIVDICCKLVEERGLEYTGIYRVPGNNAAISSMQEELNKGMADIDIQDDKWRDLNVISSLLKSFFRKLPEPLFTNDKYADFIEANRKEDPLDRLKTLKRLIHDLPEHHYETLKFLSAHLKTVAENSEKNKMEPRNLAIVFGPTLVRTSEDNMTHMVTHMPDQYKIVETLIQHHDWFFTEEGAEEPLTTVQEESTVDSQPVPNIDHLLTNIGRTGVSPGDVSGEVGGVYHTVMSLVDSVMSLMDSWNCRKKEDCCPHCSCLVCRNPRFL

SEQ ID NO: 61695 - protein, 1165 aa, Homo sapiens
MMATRRTGLSEGDGDKLKACEVSKNKDGKEQSETVSLSEDETFSWPGPKTVTLKRTSQGFGFTLRHFIVYPPESAIQFSYKDEENGNRGGKQRNRLEPMDTIFVKQVKEGGPAFEAGLCTGDRIIKVNGESVIGKTYSQVIALIQNSDTTLELSVMPKDEDILQVAYSQDAYLKGNEAYSGNARNIPEPPPICYPWLPSAPSAMAQPVEISPPDSSLSKQQTSTPVLTQPGRAYRMEIQVPPSPTDVAKSNTAVCVCNESVRTVIVPSEKVVDLLSNRNNHTGPSHRTEEVRYGVSEQTSLKTVSRTTSPPLSIPTTHLIHQPAGSRSLEPSGILLKSGNYSGHSDGISSSRSQAVEAPSVSVNHYSPNSHQHIDWKNYKTYKEYIDNRRLHIGCRTIQERLDSLRAASQSTTDYNQVVPNRTTLQGRRRSTSHDRVPQSVQIRQRSVSQERLEDSVLMKYCPRSASQGALTSPSVSFSNHRTRSWDYIEGQDETLENVNSGTPIPDSNGEKKQTYKWSGFTEQDDRRGICERPRQQEIHKSFRGSNFTVAPSVVNSDNRRMSGRGVGSVSQFKKIPPDLKTLQSNRNFQTTCGMSLPRGISQDRSPLVKVRSNSLKAPSTHVTKPSFSQKSFVSIKDQRPVNHLHQNSLLNQQTWVRTDSAPDQQVETGKSPSLSGASAKPAPQSSENAGTSDLELPVSQRNQDLSLQEAETEQSDTLDNKEAVILREKPPSGRQTPQPLRHQSYILAVNDQETGSDTTCWLPNDARREVHIKRMEERKASSTSPPGDSLASIPFIDEPTSPSIDHDIAHIPASAVISASTSQVPSIATVPPCLTTSAPLIRRQLSHDHESVGPPSLDAQPNSKTERSKSYDEGLDDYREDAKLSFKHVSSLKGIKIADSQKSSEDSGSRKDSSSEVFSDAAKEGWLHFRPLVTDKGKRVGGSIRPWKQMYVVLRGHSLYLYKDKREQTTPSEEEQPISVNACLIDISYSETKRKNVFRLTTSDCECLFQAEDRDDMLAWIKTIQESSNLNEEDTGVTNRDLISRRIKEYNNLMSKAEQLPKTPRQSLSIRQTLLGAKSEPKTQSPHSPKEESERKLLSKDDTSPPKDKGTWRKGIPSIMRKTFEKKPTATGTFGVRLDDCPPAHTNRVGDTSPPDFLKSLIQF

SEQ ID NO: 61696 - protein, 1958 aa, Homo sapiens
MMATRRTGLSEGDGDKLKACEVSKNKDGKEQSETVSLSEDETFSWPGPKTVTLKRTSQGFGFTLRHFIVYPPESAIQFSYKDEENGNRGGKQRNRLEPMDTIFVKQVKEGGPAFEAGLCTGDRIIKVNGESVIGKTYSQVIALIQNSDTTLELSVMPKDEDILQVLQFTKDVTALAYSQDAYLKGNEAYSGNARNIPEPPPICYPWLPSAPSAMAQPVEISPPDSSLSKQQTSTPVLTQPGRAYRMEIQVPPSPTDVAKSNTAVCVCNESVRTVIVPSEKVVDLLSNRNNHTGPSHRTEEVRYGVSEQTSLKTVSRTTSPPLSIPTTHLIHQPAGSRSLEPSGILLKSGNYSGHSDGISSSRSQAVEAPSVSVNHYSPNSHQHIDWKNYKTYKEYIDNRRLHIGCRTIQERLDSLRAASQSTTDYNQVVPNRTTLQGRRRSTSHDRVPQSVQIRQRSVSQERLEDSVLMKYCPRSASQGALTSPSVSFSNHRTRSWDYIEGQDETLENVNSGTPIPDSNGEKKQTYKWSGFTEQDDRRGICERPRQQEIHKSFRGSNFTVAPSVVNSDNRRMSGRGVGSVSQFKKIPPDLKTLQSNRNFQTTCGMSLPRGISQDRSPLVKVRSNSLKAPSTHVTKPSFSQKSFVSIKDQRPVNHLHQNSLLNQQTWVRTDSAPDQQVETGKSPSLSGASAKPAPQSSENAGTSDLELPVSQRNQDLSLQEAETEQSDTLDNKEAVILREKPPSGRQTPQPLRHQSYILAVNDQETGSDTTCWLPNDARREVHIKRMEERKASSTSPPGDSLASIPFIDEPTSPSIDHDIAHIPASAVISASTSQVPSIATVPPCLTTSAPLIRRQLSHDHESVGPPSLDAQPNSKTERSKSYDEGLDDYREDAKLSFKHVSSLKGIKIADSQKSSEDSGSRKDSSSEVFSDAAKEGWLHFRPLVTDKGKRVGGSIRPWKQMYVVLRGHSLYLYKDKREQTTPSEEEQPISVNACLIDISYSETKRKNVFRLTTSDCECLFQAEDRDDMLAWIKTIQESSNLNEEDTGVTNRDLISRRIKEYNNLMSKAEQLPKTPRQSLSIRQTLLGAKSEPKTQSPHSPKEESERKLLSKDDTSPPKDKGTWRKGIPSIMRKTFEKKPTATGTFGVRLDDCPPAHTNRYIPLIVDICCKLVEERGLEYTGIYRVPGNNAAISSMQEELNKGMADIDIQDDKWRDLNVISSLLKSFFRKLPEPLFTNDKYADFIEANRKEDPLDRLKTLKRLIHDLPEHHYETLKFLSAHLKTVAENSEKNKMEPRNLAIVFGPTLVRTSEDNMTHMVTHMPDQYKIVETLIQHHDWFFTEEGAEEPLTTVQEESTVDSQPVPNIDHLLTNIGRTGVSPGDVSDSATSDSTKSKGSWGSGKDQYSRELLVSSIFAAASRKRKKPKEKAQPSSSEDELDNVFFKKENVEQCHNDTKEESKKESETLGRKQKIIIAKENSTRKDPSTTKDEKISLGKESTPSEEPSPPHNSKHNKSPTLSCRFAILKESPRSLLAQKSSHLEETGSDSGTLLSTSSQASLARFSMKKSTSPETKHSEFLANVSTITSDYSTTSSATYLTSLDSSRLSPEVQSVAESKGDEADDERSELISEGRPVETDSESEFPVFPTALTSERLFRGKLQEVTKSSRRNSEGSELSCTEGSLTSSLDSRRQLFSSHKLIECDTLSRKKSARFKSDSGSLGDAKNEKEAPSLTKVFDVMKKGKSTGSLLTPTRGESEKQEPTWKTKIADRLKLRPRAPADDMFGVGNHKVNAETAKRKSIRRRHTLGGHRDATEISVLNFWKVHEQSGERESELSAVNRLKPKCSAQDLSISDWLARERLRTSTSDLSRGEIGDPQTENPSTREIATTDTPLSLHCNTGSSSSTLASTNRPLLSIPPQSPDQINGESFQNVSKNASSAANAQPHKLSETPGSKAEFHPCL

SEQ ID NO: 61697 - protein, 197 aa, Homo sapiens
  VARIANT 1: note = MOD_RES - Any amino acid
XNNAAISSMQEELNKGMADIDIQDDKWRDLNVISSLLKSFFRKLPEPLFTNDKYADFIEANRKEDPLDRLKTLKRLIHDLPEHHYETLKFLSAHLKTVAENSEKNKMEPRNLAIVFGPTLVRTSEDNMTHMVTHMPDQYKIVETLIQHHDWFFTEEGAEEPLIQLLVTQQNLRVLGDLERISIAGNCLCPPSLQLLV

SEQ ID NO: 61698 - protein, 113 aa, Homo sapiens
YIPLIVDICCKLVEERGLEYTGIYRVPGNNAAISSMQEELNKGMADIDIQDDKWRDLNVISSLLKSFFRKLPEPLFTNDKYADFIEANRKEDPLDRLKTLKRLFLSAHLKTVA

SEQ ID NO: 61699 - protein, 907 aa, Homo sapiens
MPKDEDILQVAYSQDAYLKGNEAYSGNARNIPEPPPICYPWLPSAPSAMAQPVEISPPDSSLSKQQTSTPVLTQPGRAYRMEIQVPPSPTDVAKSNTAVCVCNESVRTVIVPSEKVVDLLSNRNNHTGPSHRTEEVRYGVSEQTSLKTVSRTTSPPLSIPTTHLIHQPAGSRSLEPSGILLKSGNYSGHSDGISSSRSQAVEAPSVSVNHYSPNSHQHIDWKNYKTYKEYIDNRRLHIGCRTIQERLDSLRAASQSTTDYNQVVPNRTTLQGRRRSTSHDRVPQSVQIRQRSVSQERLEDSVLMKYCPRSASQGALTSPSVSFSNHRTRSWDYIEGQDETLENVNSGTPIPDSNGEKKQTYKWSGFTEQDDRRGICERPRQQEIHKSFRGSNFTVAPSVVNSDNRRMSGRGVGSVSQFKKIPPDLKTLQSNRNFQTTCGMSLPRGISQDRSPLVKVRSNSLKAPSTHVTKPSFSQKSFVSIKDQRPVNHLHQNSLLNQQTWVRTDSAPDQQVETGKSPSLSGASAKPAPQSSENAGTSDLELPVSQRNQDLSLQEAETEQSDTLDNKEAVILREKPPSGRQTPQPLRHQSYILAVNDQETGSDTTCWLPNDARREVHIKRMEERKASSTSPPGDSLASIPFIDEPTSPSIDHDIAHIPASAVISASTSQVPSIATVPPCLTTSAPLIRRQLSHDHESVGPPSLDAQPNSKTERSKSYDEGLDDYREDAKLSFKHVSSLKGIKIADSQKSSEDSGSRKDSSSEVFSDAAKEGWLHFRPLVTDKGKRVGGSIRPWKQMYVVLRGHSLYLYKDKREQTTPSEEEQPISVNACLIDISYSETKRKNVFRLTTSDCECLFQAEDRDDMLAWIKTIQESSNLNEEDTGVTNRDLISRRIKEYNNLMSKAEQLP

SEQ ID NO: 61700 - protein, 1131 aa, Homo sapiens
MMATRRTGLSEGDGDKLKACEVSKNKDGKEQSETVSLSEDETFSWPGPKTVTLKRTSQGFGFTLRHFIVYPPESAIQFSYKDEENGNRGGKQRNRLEPMDTIFVKQVKEGGPAFEAGLCTGDRIIKVNGESVIGKTYSQVIALIQNSDTTLELSVMPKDEDILQVLQFTKDVTALAYSQDAYLKGNEAYSGNARNIPEPPPICYPWLPSAPSAMAQPVEISPPDSSLSKQQTSTPVLTQPGRAYRMEIQVPPSPTDVAKSNTAVCVCNESVRTVIVPSEKVVDLLSNRNNHTGPSHRTEEVRYGVSEQTSLKTVSRTTSPPLSIPTTHLIHQPAGSRSLEPSGILLKSGNYSGHSDGISSSRSQAVEAPSVSVNHYSPNSHQHIDWKNYKTYKEYIDNRRLHIGCRTIQERLDSLRAASQSTTDYNQVVPNRTTLQGRRRSTSHDRVPQSVQIRQRSVSQERLEDSVLMKYCPRSASQGALTSPSVSFSNHRTRSWDYIEGQDETLENVNSGTPIPDSNGEKKQTYKWSGFTEQDDRRGICERPRQQEIHKSFRGSNFTVAPSVVNSDNRRMSGRGVGSVSQFKKIPPDLKTLQSNRNFQTTCGMSLPRGISQDRSPLVKVRSNSLKAPSTHVTKPSFSQKSFVSIKDQRPVNHLHQNSLLNQQTWVRTDSAPDQQVETGKSPSLSGASAKPAPQSSENAGTSDLELPVSQRNQDLSLQEAETEQSDTLDNKEAVILREKPPSGRQTPQPLRHQSYILAVNDQETGSDTTCWLPNDARREVHIKRMEERKASSTSPPGDSLASIPFIDEPTSPSIDHDIAHIPASAVISASTSQVPSIATVPPCLTTSAPLIRRQLSHDHESVGPPSLDAQPNSKTERSKSYDEGLDDYREDAKLSFKHVSSLKGIKIADSQKSSEDSGSRKDSSSEVFSDAAKEGWLHFRPLVTDKGKRVGGSIRPWKQMYVVLRGHSLYLYKDKREQTTPSEEEQPISVNACLIDISYSETKRKNVFRLTTSDCECLFQAEDRDDMLAWIKTIQESSNLNEEDTGVTNRDLISRRIKEYNNLMSKAEQLPKTPRQSLSIRQTLLGAKSEPKTQSPHSPKEESERKLLSKDDTSPPKDKGTWRKGIPSIM

SEQ ID NO: 61701 - protein, 1407 aa, Homo sapiens
MATRRTGLSEGDGDKLKACEVSKNKDGKEQSETVSLSEDETFSWPGPKTVTLKRTSQGFGFTLRHFIVYPPESAIQFSYKDEENGNRGGKQRNRLEPMDTIFVKQVKEGGPAFEAGLCTGDRIIKVNGESVIGKTYSQVIALIQNSDTTLELSVMPKDEDILQVAYSQDAYLKGNEAYSGNARNIPEPPPICYPWLPSAPSAMAQPVEISPPDSSLSKQQTSTPVLTQPGRAYRMEIQVPPSPTDVAKSNTAVCVCNESVRTVIVPSEKVVDLLSNRNNHTGPSHRTEEVRYGVSEQTSLKTVSRTTSPPLSIPTTHLIHQPAGSRSLEPSGILLKSGNYSGHSDGISSSRSQAVEAPSVSVNHYSPNSHQHIDWKNYKTYKEYIDNRRLHIGCRTIQERLDSLRAASQSTTDYNQVVPNRTTLQGRRRSTSHDRVPQSVQIRQRSVSQERLEDSVLMKYCPRSASQGALTSPSVSFSNHRTRSWDYIEGQDETLENVNSGTPIPDSNGEKKQTYKWSGFTEQDDRRGICERPRQQEIHKSFRGSNFTVAPSVVNSDNRRMSGRGVGSVSHWRKGIPSIMRKTFEKKPTATGTFGVRLDDCPPAHTNRYIPLIVDICCKLVEERGLEYTGIYRVPGNNAAISSMQEELNKGMADIDIQDDKWRDLNVISSLLKSFFRKLPEPLFTNDKYADFIEANRKEDPLDRLKTLKRLIHDLPEHHYETLKFLSAHLKTVAENSEKNKMEPRNLAIVFGPTLVRTSEDNMTHMVTHMPDQYKIVETLIQHHDWFFTEEGAEEPLTTVQEESTVDSQPVPNIDHLLTNIGRTGVSPGDVSDSATSDSTKSKGSWGSGKDQYSRELLVSSIFAAASRKRKKPKEKAQPSSSEDELDNVFFKKENVEQCHNDTKEESKKESETLGRKQKIIIAKENSTRKDPSTTKDEKISLGKESTPSEEPSPPHNSKHNKSPTLSCRFAILKESPRSLLAQKSSHLEETGSDSGTLLSTSSQASLARFSMKKSTSPETKHSEFLANVSTITSDYSTTSSATYLTSLDSSRLSPEVQSVAESKGDEADDERSELISEGRPVETDSESEFPVFPTALTSERLFRGKLQEVTKSSRRNSEGSELSCTEGSLTSSLDSRRQLFSSHKLIECDTLSRKKSARFKSDSGSLGDAKNEKEAPSLTKVFDVMKKGKSTGSLLTPTRGESEKQEPTWKTKIADRLKLRPRAPADDMFGVGNHKVNAETAKRKSIRRRHTLGGHRDATEISVLNFWKVHEQSGERESELSAVNRLKPKCSAQDLSISDWLARERLRTSTSDLSRGEIGDPQTENPSTREIATTDTPLSLHCNTGSSSSTLASTNRPLLSIPPQSPDQINGESFQNVSKNASSAANAQPHKLSETPGSKAEFHPCL

SEQ ID NO: 61702 - protein, 92 aa, Homo sapiens
MDTIFVKQVKEGGPAFEAGLCTGDRIIKVNGESVIGKTYSQVIALIQNSDTTLELSVMPKDEDILQVNLEFSTFYKNTIAKFLQLSDMEMLC

SEQ ID NO: 61703 - protein, 1491 aa, Homo sapiens
MNGVAFCLVGIPPRPEPRPPQLPLGPRDGCSPRRPFPWQGPRTLLLYKSPQDGFGFTLRHFIVYPPESAVHCSLKEEENGGRGGGPSPRYRLEPMDTIFVKNVKEDGPAHRAGLRTGDRLVKVNGESVIGKTYSQVIALIQNSDDTLELSIMPKDEDILQLAYSQDAYLKGNEPYSGEARSIPEPPPICYPRKTYAPPARASTRATMVPEPTSALPSDPRSPAAWSDPGLRVPPAARAHLDNSSLGMSQPRPSPGAFPHLSSEPRTPRAFPEPGSRVPPSRLECQQALSHWLSNQVPRRAGERRCPAMAPRARSASQDRLEEVAAPRPWPCSTSQDALSQLGQEGWHRARSDDYLSRATRSAEALGPGALVSPRFERCGWASQRSSARTPACPTRDLPGPQAPPPSGLQGLDDLGYIGYRSYSPSFQRRTGLLHALSFRDSPFGGLPTFNLAQSPASFPPEASEPPRVVRPEPSTRALEPPAEDRGDEVVLRQKPPTGRKVQLTPARQMNLGFGDESPEPEASGRGERLGRKVAPLATTEDSLASIPFIDEPTSPSIDLQAKHVPASAVVSSAMNSAPVLGTSPSSPTFTFTLGRHYSQDCSSIKAGRRSSYLLAITTERSKSCDDGLNTFRDEGRVLRRLPNRIPSLRMLRSFFTDGSLDSWGTSEDADAPSKRHSTSDLSDATFSDIRREGWLYYKQILTKKGKKAGSGLRQWKRVYAALRARSLSLSKERREPGPAAAGAAAAGAGEDEAAPVCIGSCLVDISYSETKRRHVFRLTTADFCEYLFQAEDRDDMLGWIRAIRENSRAEGEDPGCANQALISKKLNDYRKVSHSSGPKADSSPKGSRGLGGLKSEFLKQSAARGLRTQDLPAGSKDDSAAAPKTPWGINIIKKNKKAAPRAFGVRLEECQPATENQRVPLIVAACCRIVEARGLESTGIYRVPGNNAVVSSLQEQLNRGPGDINLQDERWQDLNVISSLLKSFFRKLPEPLFTDDKYNDFIEANRIEDARERMRTLRKLIRDLPGHYYETLKFLVGHLKTIADHSEKNKMEPRNLALVFGPTLVRTSEDNMTDMVTHMPDRYKIVETLIQHSDWFFSDEEDKGERTPVGDKEPQAVPNIEYLLPNIGRTVPPGDPGSDSTTCSSAKSKGSWAPKKEPYAREMLAISFISAVNRKRKKRREARGLGSSTDDDSEQEAHKPGAGATAPGTQERPQGPLPGAVAPEAPGRLSPPAAPEERPAADTRSIVSGYSTLSTMDRSVCSGASGRRAGAGDEADDERSELSHVETDTEGAAGAGPGGRLTRRPSFSSHHLMPCDTLARRRLARGRPDGEGAGRGGPRAPEPPGSASSSSQESLRPPAAALASRPSRMEALRLRLRGTADDMLAVRLRRPLSPETRRRRSSWRRHTVVVQSPLTDLNFNEWKELGGGGPPEPAGARAHSDNKDSGLSSLESTKARAPSSAASQPPAPGDTGSLQSQPPRRSAASRLHQCL

SEQ ID NO: 61704 - protein, 1144 aa, Homo sapiens
MNGVAFCLVGIPPRPEPRPPQLPLGPRDGCSPRRPFPWQGPRTLLLYKSPQDGFGFTLRHFIVYPPESAVHCSLKEEENGGRGGGPSPRYRLEPMDTIFVKNVKEDGPAHRAGLRTGDRLVKVNGESVIGKTYSQVIALIQNSDDTLELSIMPKDEDILQLAYSQDAYLKGNEPYSGEARSIPEPPPICYPRKTYAPPARASTRATMVPEPTSALPSDPRSPAAWSDPGLRVPPAARAHLDNSSLGMSQPRPSPGAFPHLSSEPRTPRAFPEPGSRVPPSRLECQQALSHWLSNQVPRRAGERRCPAMAPRARSASQDRLEEVAAPRPWPCSTSQDALSQLGQEGWHRARSDDYLSRATRSAEALGPGALVSPRFERCGWASQRSSARTPACPTRDLPGPQAPPPSGLQGLDDLGYIGYRSYSPSFQRRTGLLHALSFRDSPFGGLPTFNLAQSPASFPPEASEPPRVVRPEPSTRALEPPAEDRGDEVVLRQKPPTGRKVQLTPARQMNLGFGDESPEPEASGRGERLGRKVAPLATTEDSLASIPFIDEPTSPSIDLQAKHVPASAVVSSAMNSAPVLGTSPSSPTFTFTLGRHYSQDCSSIKAGRRSSYLLAITTERSKSCDDGLNTFRDEGRVLRRLPNRIPSLRMLRSFFTDGSLDSWGTSEDADAPSKRHSTSDLSDATFSDIRREGWLYYKQILTKKGKKAGSGLRQWKRVYAALRARSLSLSKERREPGPAAAGAAAAGAGEDEAAPVCIGSCLVDISYSETKRRHVFRLTTADFCEYLFQAEDRDDMLGWIRAIRENSRAEGEDPGCANQALISKKLNDYRKVSHSSGPKADSSPKGSRGLGGLKSEFLKQSAARGLRTQDLPAGSKDDSAAAPKTPWGINIIKKNKKAAPRAFGVRLEECQPATENQRVPLIVAACCRIVEARGLESTGIYRVPGNNAVVSSLQEQLNRGPGDINLQDERWQDLNVISSLLKSFFRKLPEPLFTDDKYNDFIEANRIEDARERMRTLRKLIRDLPGHYYETLKFLVGHLKTIADHSEKNKMEPRNLALVFGPTLVRTSEDNMTDMVTHMPDRYKIVETLIQHSDWFFSDEEDKGERTPVGDKEPQAVPNIEYLLPNIGRTVPPGDPGSADLLEI

SEQ ID NO: 61705 - protein, 1397 aa, Homo sapiens
MDTIFVKNVKEDGPAHRAGLRTGDRLVKVNGESVIGKTYSQVIALIQNSDDTLELSIMPKDEDILQLAYSQDAYLKGNEPYSGEARSIPEPPPICYPRKTYAPPARASTRATMVPEPTSALPSDPRSPAAWSDPGLRVPPAARAHLDNSSLGMSQPRPSPGAFPHLSSEPRTPRAFPEPGSRVPPSRLECQQALSHWLSNQVPRRAGERRCPAMAPRARSASQDRLEEVAAPRPWPCSTSQDALSQLGQEGWHRARSDDYLSRATRSAEALGPGALVSPRFERCGWASQRSSARTPACPTRDLPGPQAPPPSGLQGLDDLGYIGYRSYSPSFQRRTGLLHALSFRDSPFGGLPTFNLAQSPASFPPEASEPPRVVRPEPSTRALEPPAEDRGDEVVLRQKPPTGRKVQLTPARQMNLGFGDESPEPEASGRGERLGRKVAPLATTEDSLASIPFIDEPTSPSIDLQAKHVPASAVVSSAMNSAPVLGTSPSSPTFTFTLGRHYSQDCSSIKAGRRSSYLLAITTERSKSCDDGLNTFRDEGRVLRRLPNRIPSLRMLRSFFTDGSLDSWGTSEDADAPSKRHSTSDLSDATFSDIRREGWLYYKQILTKKGKKAGSGLRQWKRVYAALRARSLSLSKERREPGPAAAGAAAAGAGEDEAAPVCIGSCLVDISYSETKRRHVFRLTTADFCEYLFQAEDRDDMLGWIRAIRENSRAEGEDPGCANQALISKKLNDYRKVSHSSGPKADSSPKGSRGLGGLKSEFLKQSAARGLRTQDLPAGSKDDSAAAPKTPWGINIIKKNKKAAPRAFGVRLEECQPATENQRVPLIVAACCRIVEARGLESTGIYRVPGNNAVVSSLQEQLNRGPGDINLQDERWQDLNVISSLLKSFFRKLPEPLFTDDKYNDFIEANRIEDARERMRTLRKLIRDLPGHYYETLKFLVGHLKTIADHSEKNKMEPRNLALVFGPTLVRTSEDNMTDMVTHMPDRYKIVETLIQHSDWFFSDEEDKGERTPVGDKEPQAVPNIEYLLPNIGRTVPPGDPGSDSTTCSSAKSKGSWAPKKEPYAREMLAISFISAVNRKRKKRREARGLGSSTDDDSEQEAHKPGAGATAPGTQERPQGPLPGAVAPEAPGRLSPPAAPEERPAADTRSIVSGYSTLSTMDRSVCSGASGRRAGAGDEADDERSELSHVETDTEGAAGAGPGGRLTRRPSFSSHHLMPCDTLARRRLARGRPDGEGAGRGGPRAPEPPGSASSSSQESLRPPAAALASRPSRMEALRLRLRGTADDMLAVRLRRPLSPETRRRRSSWRRHTVVVQSPLTDLNFNEWKELGGGGPPEPAGARAHSDNKDSGLSSLESTKARAPSSAASQPPAPGDTGSLQSQPPRRSAASRLHQCL

SEQ ID NO: 61706 - protein, 655 aa, Homo sapiens
MPEDRNSGGCPAGALASTPFIPKTTYRRIKRCFSFRKGIFGQKLEDTVRYEKRYGNRLAPMLVEQCVDFIRQRGLKEEGLFRLPGQANLVKELQDAFDCGEKPSFDSNTDVHTVASLLKLYLRELPEPVIPYAKYEDFLSCAKLLSKEEEAGVKELAKQVKSLPVVNYNLLKYICRFLDEVQSYSGVNKMSVQNLATVFGPNILRPKVEDPLTIMEGTVVVQQLMSVMISKHDCLFPKDAELQSKPQDGVSNNNEIQKKATMGQLQNKENNNTKDSPSRQCSWDKSESPQRSSMNNGSPTALSGSKTNSPKNSVHKLDVSRSPPLMVKKNPAFNKGSGIVTNGSFSSSNAEGLEKTQTTPNGSLQARRSSSLKVSGTKMGTHSVQNGTVRMGILNSDTLGNPTNVRNMSWLPNGYVTLRDNKQKEQAGELGQHNRLSTYDNVHQQFSMMNLDDKQSIDSATWSTSSCEISLPENSNSCRSSTTTCPEQDFFGGNFEDPVLDGPPQDDLSHPRDYESKSDHRSVGGRSSRATSSSDNSETFVGNSSSNHSALHSLVSSLKQEMTKQKIEYESRIKSLEQRNLTLETEMMSLHDELDQERKKFTMIEIKMRNAERAKEDAEKRNDMLQKEMEQFFSTFGELTVEPRRTERGNTIWIQ

SEQ ID NO: 61707 - protein, 653 aa, Homo sapiens
MTANHESYLLMASTQNDMEDWVKSIRRVIWGPFGGGIFGQKLEDTVRYEKRYGNRLAPMLVEQCVDFIRQRGLKEEGLFRLPGQANLVKELQDAFDCGEKPSFDSNTDVHTVASLLKLYLRELPEPVIPYAKYEDFLSCAKLLSKEEEAGVKELAKQVKSLPVVNYNLLKYICRFLDEVQSYSGVNKMSVQNLATVFGPNILRPKVEDPLTIMEGTVVVQQLMSVMISKHDCLFPKDAELQSKPQDGVSNNNEIQKKATMGQLQNKENNNTKDSPSRQCSWDKSESPQRSSMNNGSPTALSGSKTNSPKNSVHKLDVSRSPPLMVKKNPAFNKGSGIVTNGSFSSSNAEGLEKTQTTPNGSLQARRSSSLKVSGTKMGTHSVQNGTVRMGILNSDTLGNPTNVRNMSWLPNGYVTLRDNKQKEQAGELGQHNRLSTYDNVHQQFSMMNLDDKQSIDSATWSTSSCEISLPENSNSCRSSTTTCPEQDFFGGNFEDPVLDGPPQDDLSHPRDYESKSDHRSVGGRSSRATSSSDNSETFVGNSSSNHSALHSLVSSLKQEMTKQKIEYESRIKSLEQRNLTLETEMMSLHDELDQERKKFTMIEIKMRNAERAKEDAEKRNDMLQKEMEQFFSTFGELTVEPRRTERGNTIWIQ

SEQ ID NO: 61708 - protein, 748 aa, Homo sapiens
MEENNDSTENPQQGQGRQNAIKCGWLRKQGGFVKTWHTRWFVLKGDQLYYFKDEDETKPLGTIFLPGNKVSEHPCNEENPGKFLFEVVPGGDRDRMTANHESYLLMASTQNDMEDWVKSIRRVIWGPFGGGIFGQKLEDTVRYEKRYGNRLAPMLVEQCVDFIRQRGLKEEGLFRLPGQANLVKELQDAFDCGEKPSFDSNTDVHTVASLLKLYLRELPEPVIPYAKYEDFLSCAKLLSKEEEAGVKELAKQVKSLPVVNYNLLKYICRFLDEVQSYSGVNKMSVQNLATVFGPNILRPKVEDPLTIMEGTVVVQQLMSVMISKHDCLFPKDAELQSKPQDGVSNNNEIQKKATMGQLQNKENNNTKDSPSRQCSWDKSESPQRSSMNNGSPTALSGSKTNSPKNSVHKLDVSRSPPLMVKKNPAFNKGSGIVTNGSFSSSNAEGLEKTQTTPNGSLQARRSSSLKVSGTKMGTHSVQNGTVRMGILNSDTLGNPTNVRNMSWLPNGYVTLRDNKQKEQAGELGQHNRLSTYDNVHQQFSMMNLDDKQSIDSATWSTSSCEISLPENSNSCRSSTTTCPEQDFFGGNFEDPVLDGPPQDDLSHPRDYESKSDHRSVGGRSSRATSSSDNSETFVGNSSSNHSALHSLVSSLKQEMTKQKIEYESRIKSLEQRNLTLETEMMSLHDELDQERKKFTMIEIKMRNAERAKEDAEKRNDMLQKEMEQFFSTFGELTVEPRRTERGNTIWIQ

SEQ ID NO: 61709 - protein, 246 aa, Homo sapiens
MEENNDSTENPQQGQGRQNAIKCGWLRKQGGFVKTWHTRWFVLKGDQLYYFKDEDETKPLGTIFLPGNKVSEHPCNEENPGKFLFEVVPGGDRDRMTANHESYLLMASTQNDMEDWVKSIRRVIWGPFGGGIFGQKLEDTVRYEKRYGNRLAPMLVEQCVDFIRQRGLKEEGLFRLPGQANLVKELQDAFDCGEKPSFDSNTDVHTVASLLKLYLRELPEPVIPYAKYEDFLSCAKLLSKEEEAVS

SEQ ID NO: 61710 - protein, 82 aa, Homo sapiens
MTANHESYLLMASTQNDMEDWVKSIRRVIWGPFGGGIFGQKLEDTVRYEKRYGNRLAPMLVEQCVDFIRQRGLKEEGLFRLP

SEQ ID NO: 61711 - protein, 645 aa, Homo sapiens
MSLKLPRNWDFNLKVEAAKIARSRSVMTGEQMAAFHPSSTPNPLERPIKMGWLKKQRSIVKNWQQRYFVLRAQQLYYYKDEEDTKPQGCMYLPGCTIKEIATNPEEAGKFVFEIIPASWDQNRMGQDSYVLMASSQAEMEEWVKFLRRVAGTPCGVFGQRLDETVAYEQKFGPHLVPILVEKCAEFILEHGRNEEGIFRLPGQDNLVKQLRDAFDAGERPSFDRDTDVHTVASLLKLYLRDLPEPVVPWSQYEGFLLCGQLTNADEAKAQQELMKQLSILPRDNYSLLSYICRFLHEIQLNCAVNKMSVDNLATVIGVNLIRSKVEDPAVIMRGTPQIQRVMTMMIRDHEVLFPKSKDIPLSPPAQKNDPKKAPVARSSVGWDATEDLRISRTDSFSSMTSDSDTTSPTGQQPSDAFPEDSSKVPREKPGDWKMQSRKRTQTLPNRKCFLTSAFQGANSSKMEIFKNEFWSPSSEAKAGEGHRRTMSQDLRQLSDSQRTSTYDNVPSLPGSPGEEASALSSQACDSKGDTLASPNSETGPGKKNSGEEEIDSLQRMVQELRKEIETQKQMYEEQIKNLEKENYDVWAKVVRLNEELEKEKKKSAALEISLRNMERSREDVEKRNKALEEEVKEFVKSMKEPKTEA

SEQ ID NO: 61712 - protein, 638 aa, Homo sapiens
MSLGQSACLFLSIARSRSVMTGEQMAAFHPSSTPNPLERPIKMGWLKKQRSIVKNWQQRYFVLRAQQLYYYKDEEDTKPQGCMYLPGCTIKEIATNPEEAGKFVFEIIPASWDQNRMGQDSYVLMASSQAEMEEWVKFLRRVAGTPCGVFGQRLDETVAYEQKFGPHLVPILVEKCAEFILEHGRNEEGIFRLPGQDNLVKQLRDAFDAGERPSFDRDTDVHTVASLLKLYLRDLPEPVVPWSQYEGFLLCGQLTNADEAKAQQELMKQLSILPRDNYSLLSYICRFLHEIQLNCAVNKMSVDNLATVIGVNLIRSKVEDPAVIMRGTPQIQRVMTMMIRDHEVLFPKSKDIPLSPPAQKNDPKKAPVARSSVGWDATEDLRISRTDSFSSMTSDSDTTSPTGQQPSDAFPEDSSKVPREKPGDWKMQSRKRTQTLPNRKCFLTSAFQGANSSKMEIFKNEFWSPSSEAKAGEGHRRTMSQDLRQLSDSQRTSTYDNVPSLPGSPGEEASALSSQACDSKGDTLASPNSETGPGKKNSGEEEIDSLQRMVQELRKEIETQKQMYEEQIKNLEKENYDVWAKVVRLNEELEKEKKKSAALEISLRNMERSREDVEKRNKALEEEVKEFVKSMKEPKTEA

SEQ ID NO: 61713 - protein, 646 aa, Homo sapiens
MSLKLPRNWDFNLKVEAAKIARSRSVMTGEQMAAFHPSSTPNPLERPIKMGWLKKQRSIVKNWQQRYFVLRAQQLYYYKDEEDTKPQGCMYLPGCTIKEIATNPEEAGKFVFEIIPASWDQNRMGQDSYVLMASSQAEMEEWVKFLRRVAGTPCGAVFGQRLDETVAYEQKFGPHLVPILVEKCAEFILEHGRNEEGIFRLPGQDNLVKQLRDAFDAGERPSFDRDTDVHTVASLLKLYLRDLPEPVVPWSQYEGFLLCGQLTNADEAKAQQELMKQLSILPRDNYSLLSYICRFLHEIQLNCAVNKMSVDNLATVIGVNLIRSKVEDPAVIMRGTPQIQRVMTMMIRDHEVLFPKSKDIPLSPPAQKNDPKKAPVARSSVGWDATEDLRISRTDSFSSMTSDSDTTSPTGQQPSDAFPEDSSKVPREKPGDWKMQSRKRTQTLPNRKCFLTSAFQGANSSKMEIFKNEFWSPSSEAKAGEGHRRTMSQDLRQLSDSQRTSTYDNVPSLPGSPGEEASALSSQACDSKGDTLASPNSETGPGKKNSGEEEIDSLQRMVQELRKEIETQKQMYEEQIKNLEKENYDVWAKVVRLNEELEKEKKKSAALEISLRNMERSREDVEKRNKALEEEVKEFVKSMKEPKTEA

SEQ ID NO: 61714 - protein, 639 aa, Homo sapiens
MSLGQSACLFLSIARSRSVMTGEQMAAFHPSSTPNPLERPIKMGWLKKQRSIVKNWQQRYFVLRAQQLYYYKDEEDTKPQGCMYLPGCTIKEIATNPEEAGKFVFEIIPASWDQNRMGQDSYVLMASSQAEMEEWVKFLRRVAGTPCGAVFGQRLDETVAYEQKFGPHLVPILVEKCAEFILEHGRNEEGIFRLPGQDNLVKQLRDAFDAGERPSFDRDTDVHTVASLLKLYLRDLPEPVVPWSQYEGFLLCGQLTNADEAKAQQELMKQLSILPRDNYSLLSYICRFLHEIQLNCAVNKMSVDNLATVIGVNLIRSKVEDPAVIMRGTPQIQRVMTMMIRDHEVLFPKSKDIPLSPPAQKNDPKKAPVARSSVGWDATEDLRISRTDSFSSMTSDSDTTSPTGQQPSDAFPEDSSKVPREKPGDWKMQSRKRTQTLPNRKCFLTSAFQGANSSKMEIFKNEFWSPSSEAKAGEGHRRTMSQDLRQLSDSQRTSTYDNVPSLPGSPGEEASALSSQACDSKGDTLASPNSETGPGKKNSGEEEIDSLQRMVQELRKEIETQKQMYEEQIKNLEKENYDVWAKVVRLNEELEKEKKKSAALEISLRNMERSREDVEKRNKALEEEVKEFVKSMKEPKTEA

SEQ ID NO: 61715 - protein, 283 aa, Homo sapiens
MTGEQMAAFHPSSTPNPLERPIKMGWLKKQRSIVKNWQQRYFVLRAQQLYYYKDEEDTKPQGCMYLPGCTIKEIATNPEEAGKFVFEIIPASWDQNRMGQDSYVLMASSQAEMEEWVKFLRRVAGTPCGAVFGQRLDETVAYEQKFGPHLVPILVEKCAEFILEHGRNEEGIFRLPGQDNLVKQLRDAFDAGERPSFDRDTDVHTVASLLKLYLRDLPEPVVPWSQYEGFLLCGQLTNADEAKNYRNRNDCQSVVSAQIHQFCPRVSLLAHGQAHLLVNDLLV

SEQ ID NO: 61716 - protein, 591 aa, Homo sapiens
MSLGQSACLFLSIARSRSVMTGEQMAAFHPSSTPNPLERPIKMGWLKKQRSIVKNWQQRYFVLRAQQLYYYKDEEDTKPQGCMYLPGCTIKEIATNPEEAGKFVFEIIPASWDQNRMGQDSYVLMASSQAEMEEWVKFLRRVAGTPCGAVFGQRLDETVAYEQKFGPHLVPILVEKCAEFILEHGRNEEGIFRLPGQDNLVKQLRDAFDAGERPSFDRDTDVHTVASLLKLYLRDLPEPVVPWSQYEGFLLCGQLTNADEAKAQQELMKQLSILPRDNYSLLSYICRFLHEIQLNCAVNKMSVDNLATVIGVNLIRSKVEDPAVIMRGTPQIQRVMTMMIRDHEVLFPKSKDIPLSPPAQKNDPKKAPVARSSVGWDATEDLRISRTDSFSSMTSDSDTTSPTGQQPSDAFPEDSSKVPREKPGDWKMQSRKRTQTLPNRKCFLTSAFQGANSSKMEIFKNEFWSPSSEAKAGEGHRRTMSQDLRQLSDSQRTSTYDNVPSLPGSPGEEASALSSQACDSKGDTLASPNSETGPGKKNSGEEEIDSLQRMVQELRKEIETQKQMYEEQIKNLEKENYDVWAKVVRPFLSAI

SEQ ID NO: 61717 - protein, 458 aa, Homo sapiens
MSLGQSACLFLSIARSRSVMTGEQMAAFHPSSTPNPLERPIKMGWLKKQRSIVKNWQQRYFVLRAQQLYYYKDEEDTKPQGCMYLPGCTIKEIATNPEEAGKFVFEIIPASWDQNRMGQDSYVLMASSQAEMEEWVKFLRRVAGTPCGAVFGQRLDETVAYEQKFGPHLVPILVEKCAEFILEHGRNEEGIFRLPGQDNLVKQLRDAFDAGERPSFDRDTDVHTVASLLKLYLRDLPEPVVPWSQYEGFLLCGQLTNADEAKAQQELMKQLSILPRDNYSLLSYICRFLHEIQLNCAVNKMSVDNLATVIGVNLIRSKVEDPAVIMRGTPQIQRVMTMMIRDHEVLFPKSKDIPLSPPAQKNDPKKAPVARSSVGWDATEDLRISRTDSFSSMVRCREPSCFHWVLPLVQAIPCKACSRVAIWGVLGDAVAVGAAATDSSEHTLKAWPLSKSSFYWHL

SEQ ID NO: 61718 - protein, 630 aa, Homo sapiens
MSLGQSACLFLSIARSRSVMTGEQMAAFHPSSTPNPLERPIKMGWLKKQRSIVKNWQQSYYYKDEEDTKPQGCMYLPGCTIKEIATNPEEAGKFVFEIIPASWDQNRMGQDSYVLMASSQAEMEEWVKFLRRVAGTPCGAVFGQRLDETVAYEQKFGPHLVPILVEKCAEFILEHGRNEEGIFRLPGQDNLVKQLRDAFDAGERPSFDRDTDVHTVASLLKLYLRDLPEPVVPWSQYEGFLLCGQLTNADEAKAQQELMKQLSILPRDNYSLLSYICRFLHEIQLNCAVNKMSVDNLATVIGVNLIRSKVEDPAVIMRGTPQIQRVMTMMIRDHEVLFPKSKDIPLSPPAQKNDPKKAPVARSSVGWDATEDLRISRTDSFSSMTSDSDTTSPTGQQPSDAFPEDSSKVPREKPGDWKMQSRKRTQTLPNRKCFLTSAFQGANSSKMEIFKNEFWSPSSEAKAGEGHRRTMSQDLRQLSDSQRTSTYDNVPSLPGSPGEEASALSSQACDSKGDTLASPNSETGPGKKNSGEEEIDSLQRMVQELRKEIETQKQMYEEQIKNLEKENYDVWAKVVRLNEELEKEKKKSAALEISLRNMERSREDVEKRNKALEEEVKEFVKSMKEPKTEA

SEQ ID NO: 61719 - protein, 283 aa, Homo sapiens; identical to SEQ ID NO: 61715

SEQ ID NO: 61720 - protein, 606 aa, Homo sapiens
MSLKLPRNWDFNLKVEAAKIARSRSVMTGEQMAAFHPSSTPNPLERPIKMGWLKKQRSIVKNWQQRYFVLRAQQLYYYKDEEDTKPQGCMYLPGCTIKEIATNPEEAGKFVFEIIPVFGQRLDETVAYEQKFGPHLVPILVEKCAEFILEHGRNEEGIFRLPGQDNLVKQLRDAFDAGERPSFDRDTDVHTVASLLKLYLRDLPEPVVPWSQYEGFLLCGQLTNADEAKAQQELMKQLSILPRDNYSLLSYICRFLHEIQLNCAVNKMSVDNLATVIGVNLIRSKVEDPAVIMRGTPQIQRVMTMMIRDHEVLFPKSKDIPLSPPAQKNDPKKAPVARSSVGWDATEDLRISRTDSFSSMTSDSDTTSPTGQQPSDAFPEDSSKVPREKPGDWKMQSRKRTQTLPNRKCFLTSAFQGANSSKMEIFKNEFWSPSSEAKAGEGHRRTMSQDLRQLSDSQRTSTYDNVPSLPGSPGEEASALSSQACDSKGDTLASPNSETGPGKKNSGEEEIDSLQRMVQELRKEIETQKQMYEEQIKNLEKENYDVWAKVVRLNEELEKEKKKSAALEISLRNMERSREDVEKRNKALEEEVKEFVKSMKEPKTEA

SEQ ID NO: 61721 - protein, 814 aa, Homo sapiens
MGLPALEFSDCCLDSPHFRETLKSHEAELDKTNKFIKELIKDGKSLISALKNLSSAKRKFADSLNEFKFQCIGDAETDDEMCIARSLQEFATVLRNLEDERIRMIENASEVLITPLEKFRKEQIGAAKEAKKKYDKETEKYCGILEKHLNLSSKKKESQLQEADSQVDLVRQHFYEVSLEYVFKVQEVQERKMFEFVEPLLAFLQGLFTFYHHGYELAKDFGDFKTQLTISIQNTRNRFEGTRSEVESLMKKMKENPLEHKTISPYTMEGYLYVQEKRHFGTSWVKHYCTYQRDSKQITMVPFDQKSGGKGGEDESVILKSCTRRKTDSIEKRFCFDVEAVDRPGVITMQALSEEDRRLWMEAMDGREPVYNSNKDSQSEGTAQLDSIGFSIIRKCIHAVETRGINEQGLYRIVGVNSRVQKLLSVLMDPKTASETETDICAEWEIKTITSALKTYLRMLPGPLMMYQFQRSFIKAAKLENQESRVSEIHSLVHRLPEKNRQMLQLLMNHLANVANNHKQNLMTVANLGVVFGPTLLRPQEETVAAIMDIKFQNIVIEILIENHEKIFNTVPDMPLTNAQLHLSRKKSSDSKPPSCSERPLTLFHTVQSTEKQEQRNSIINSSLESVSSNPNSILNSSSSLQPNMNSSDPDLAVVKPTRPNSLPPNPSPTSPLSPSWPMFSAPSSPMPTSSTSSDSSPVRSVAGFVWFSVAAVVLSLARSSLHAVFSLLVNFVPCHPNLHLLFDRPEEAVHEDSSTPFRKAKALYACKAEHDSELSFTAGTVFDNVHPSQEPGWLEGTLNGKTGLIPENYVEFL

SEQ ID NO: 61722 - protein, 759 aa, Homo sapiens
MGLPALEFSDCCLDSPHFRETLKSHEAELDKTNKFIKELIKDGKSLISALKNLSSAKRKFADSLNEFKFQCIGDAETDDEMCIARSLQEFATVLRNLEDERIRMIENASEVLITPLEKFRKEQIGAAKEAKKKYDKETEKYCGILEKHLNLSSKKKESQLQEADSQVDLVRQHFYEVSLEYVFKVQEVQERKMFEFVEPLLAFLQGLFTFYHHGYELAKDFGDFKTQLTISIQNTRNRFEGTRSEVESLMKKMKENPLEHKTISPYTMEGYLYVQEKRHFGTSWVKHYCTYQRDSKQITMVPFDQKSGGKGGEDESVILKSCTRRKTDSIEKRFCFDVEAVDRPGVITMQALSEEDRRLWMEAMDGREPVYNSNKDSQSEGTAQLDSIGFSIIRKCIHAVETRGINEQGLYRIVGVNSRVQKLLSVLMDPKTASETETDICAEWEIKTITSALKTYLRMLPGPLMMYQFQRSFIKAAKLENQESRVSEIHSLVHRLPEKNRQMLQLLMNHLANVANNHKQNLMTVANLGVVFGPTLLRPQEETVAAIMDIKFQNIVIEILIENHEKIFNTVPDMPLTNAQLHLSRKKSSDSKPPSCSERPLTLFHTVQSTEKQEQRNSIINSSLESVSSNPNSILNSSSSLQPNMNSSDPDLAVVKPTRPNSLPPNPSPTSPLSPSWPMFSAPSSPMPTSSTSSDSSPVSTPFRKAKALYACKAEHDSELSFTAGTVFDNVHPSQEPGWLEGTLNGKTGLIPENYVEFL

SEQ ID NO: 61723 - protein, 294 aa, Homo sapiens
  VARIANT 1: note = MOD_RES - Any amino acid
XPKTASETETDICAEWEIKTITSALKTYLRMLPGPLMMYQFQRSFIKAAKLENQESRVSEIHSLVHRLPEKNRQMLQLLMNHLANVANNHKQNLMTVANLGVVFGPTLLRPQEETVAAIMDIKFQNIVIEILIENHEKIFNTVPDMPLTNAQLHLSRKKSSDSKPPSCSERPLTLFHTVQSTEKQEQRNSIINSSLESVSSNPNSILNSSSSLQPNMNSSDPDLAVVKPTRPNSLTPFRKAKALYACKAEHDSELSFTAGTVFDNVHPSQEPGWLEGTLNGKTGLIPENYVEFL

SEQ ID NO: 61724 - protein, 286 aa, Homo sapiens
MDPKTASETETDICAEWEIKTITSALKTYLRMLPGPLMMYQFQRSFIKAAKLENQESRVSEIHSLVHRLPEKNRQMLQLLMNHLANVANNHKQNLMTVANLGVVFGPTLLRPQEETVAAIMDIKFQNIVIEILIENHEKIFNTVPDMPLTNAQLHLSRKKSSDSKPPSCSERPLTLFHTVQSTEKQEQRNSIINSSLESVSSNPNSILNSSSSLQPNMNSSDPDLAVVKPTRPNSLPPNPSPTSPLSPSWPMFSAPSSPMPTSSTSSDSSPRITWSSSNRGPQQNC

SEQ ID NO: 61725 - protein, 388 aa, Homo sapiens
  VARIANT 1: note = MOD_RES - Any amino acid
XAQLDSIGFSIIRKCIHAVETRGINEQGLYRIVGVNSRVQKLLSVLMDPKTASETETDICAEWEIKTITSALKTYLRMLPGPLMMYQFQRSFIKAAKLENQESRVSEIHSLVHRLPEKNRQMLQLLMNHLANVANNHKQNLMTVANLGVVFGPTLLRPQEETVAAIMDIKFQNIVIEILIENHEKIFNTVPDMPLTNAQLHLSRKKSSDSKPPSCSERPLTLFHTVQSTEKQEQRNSIINSSLESVSSNPNSILNSSSSLQPNMNSSDPDLAVVKPTRPNSLPPNPSPTSPLSPSWPMFSAPSSPMPTSSTSSDSSPVRPEEAVHEDSSTPFRKAKALYACKAEHDSELSFTAGTVFDNVHPSQEPGWLEGTLNGKTGLIPENYVEFL

SEQ ID NO: 61726 - protein, 263 aa, Homo sapiens
MAADVVGDVYVLVEHPFEYTGKDGRRVAIRPNERYRLLRRSTEHWWHVRREPGGRPFYLPAQYVRELPALGNPAAAAPPGPHPSPAAPEPLAYDYRFVSAAATAGPDGAPEESGGRASSLCGPAQRGAATQRSSLAPGLPACLYLRPAAPVRPAQSLNDLACAAVSPPAGLLGSSGSFKACSVAGSWVCPRPLARSDSENVYEVIQDLHVPPPEESAEQVPPRALGRGGGWRARDRARTEPGRKETRSAQRRARRPPLSEDFG

SEQ ID NO: 61727 - protein, 548 aa, Homo sapiens
MQPGLSPGSPGDPRPPTPETDYPESLTSYPEEDYSPVGSFGEPGPTSPLTTPPGWSCHVSQDKQMLYTNHFTQEQWVRLEDPHGKPYFYNPEDSSVRWELPQVPVPAPRSIHKSSQDGDTPAQASPPEEKVPAELDEVGSWEEVSPATAAVRTKTLDKAGVLHRTKTADKGKRLRKKHWSASWTVLEGGVLTFFKDSKTSAAGGLRQPSKFSTPEYTVELRGATLSWAPKDKSSRKNVLELRSRDGSEYLIQHDSEAIISTWHKAIAQGIQELSAELPPEESESSRVDFGSSERLGSWQEKEEDARPNAAAPALGPVGLESDLSKVRHKLRKFLQRRPTLQSLREKGYIKDQVFGCALAALCERERSRVPRFVQQCIRAVEARGLDIDGLYRISGNLATIQKLRYKVDHDERLDLDDGRWEDVHVITGALKLFFRELPEPLFPFSHFRQFIAAIKLQDQARRSRCVRDLVRSLPAPNHDTLRMLFQHLCRVIEHGEQNRMSVQSVAIVFGPTLLRPEVEETSMPMTMVFQNQVVELILQQCADIFPPH

SEQ ID NO: 61728 - protein, 889 aa, Homo sapiens
MAADVVGDVYVLVEHPFEYTGKDGRRVAIRPNERYRLLRRSTEHWWHVRREPGGRPFYLPAQYVRELPALGNPAAAAPPGPHPSPAAPEPLAYDYRFVSAAATAGPDGAPEESGGRASSLCGPAQRGAATQRSSLAPGLPACLYLRPAAPVRPAQSLNDLACAAVSPPAGLLGSSGSFKACSVAGSWVCPRPLARSDSENVYEVIQDLHVPPPEESAEQVDDPPEPVYANIERQPRATSPGAAAAPLPSPVWETHTDAGTGRPYYYNPDTGVTTWESPFEAAEGAASPATSPASVDSHVSLETEWGQYWDEESRRVFFYNPLTGETAWEDEAENEPEEELEMQPGLSPGSPGDPRPPTPETDYPESLTSYPEEDYSPVGSFGEPGPTSPLTTPPGWSCHVSQDKQMLYTNHFTQEQWVRLEDPHGKPYFYNPEDSSVRWELPQVPVPAPRSIHKSSQDGDTPAQASPPEEKVPAELDEVGSWEEVSPATAAVRTKTLDKAGVLHRTKTADKGKRLRKKHWSASWTVLEGGVLTFFKDSKTSAAGGLRQPSKFSTPEYTVELRGATLSWAPKDKSSRKNVLELRSRDGSEYLIQHDSEAIISTWHKAIAQGIQELSAELPPEESESSRVDFGSSERLGSWQEKEEDARPNAAAPALGPVGLESDLSKVRHKLRKFLQRRPTLQSLREKGYIKDQVFGCALAALCERERSRVPRFVQQCIRAVEARGLDIDGLYRISGNLATIQKLRYKVDHDERLDLDDGRWEDVHVITGALKLFFRELPEPLFPFSHFRQFIAAIKLQDQARRSRCVRDLVRSLPAPNHDTLRMLFQHLCRVIEHGEQNRMSVQSVAIVFGPTLLRPEVEETSMPMTMVFQNQVVELILQQCADIFPPH

SEQ ID NO: 61729 - protein, 862 aa, Homo sapiens
MAADVVGDVYVLVEHPFEYTGKDGRRVAIRPNERYRLLRRSTEHWWHVRREPGGRPFYLPAQYVRELPALGNPAAAAPPGPHPSPAAPEPLAYDYRFVSAAATAGPDGAPEESGGRASSLCGPAQRGAATQRSSLAPGLPACLYLRPAAPVRPAQSLNDLACAAVSPPAGLLGSSGSFKACSVAGSWVCPRPLARSDSENVYEVIQDLHVPPPEESAEQVDDPPEPVYANIERQPRATSPGAAAAPLPSPVWETHTDAGTGRPYYYNPDTGVTTWESPFEAAEGAASPATSPASVDSHVSLETEWGQYWDEESRRVFFYNPLTGETAWEDEAENEPEEELEMQPGLSPGSPGDPRPPTPETDYPESLTSYPEEDYSPVGSFGEPGPTSPLTTPPGWSCHVSQDKQMLYTNHFTQEQVPVPAPRSIHKSSQDGDTPAQASPPEEKVPAELDEVGSWEEVSPATAAVRTKTLDKAGVLHRTKTADKGKRLRKKHWSASWTVLEGGVLTFFKDSKTSAAGGLRQPSKFSTPEYTVELRGATLSWAPKDKSSRKNVLELRSRDGSEYLIQHDSEAIISTWHKAIAQGIQELSAELPPEESESSRVDFGSSERLGSWQEKEEDARPNAAAPALGPVGLESDLSKVRHKLRKFLQRRPTLQSLREKGYIKDQVFGCALAALCERERSRVPRFVQQCIRAVEARGLDIDGLYRISGNLATIQKLRYKVDHDERLDLDDGRWEDVHVITGALKLFFRELPEPLFPFSHFRQFIAAIKLQDQARRSRCVRDLVRSLPAPNHDTLRMLFQHLCRVIEHGEQNRMSVQSVAIVFGPTLLRPEVEETSMPMTMVFQNQVVELILQQCADIFPPH

SEQ ID NO: 61730 - protein, 548 aa, Homo sapiens; identical to SEQ ID NO: 61727

SEQ ID NO: 61731 - protein, 263 aa, Homo sapiens; identical to SEQ ID NO: 61726

SEQ ID NO: 61732 - protein, 521 aa, Homo sapiens
MQPGLSPGSPGDPRPPTPETDYPESLTSYPEEDYSPVGSFGEPGPTSPLTTPPGWSCHVSQDKQMLYTNHFTQEQVPVPAPRSIHKSSQDGDTPAQASPPEEKVPAELDEVGSWEEVSPATAAVRTKTLDKAGVLHRTKTADKGKRLRKKHWSASWTVLEGGVLTFFKDSKTSAAGGLRQPSKFSTPEYTVELRGATLSWAPKDKSSRKNVLELRSRDGSEYLIQHDSEAIISTWHKAIAQGIQELSAELPPEESESSRVDFGSSERLGSWQEKEEDARPNAAAPALGPVGLESDLSKVRHKLRKFLQRRPTLQSLREKGYIKDQVFGCALAALCERERSRVPRFVQQCIRAVEARGLDIDGLYRISGNLATIQKLRYKVDHDERLDLDDGRWEDVHVITGALKLFFRELPEPLFPFSHFRQFIAAIKLQDQARRSRCVRDLVRSLPAPNHDTLRMLFQHLCRVIEHGEQNRMSVQSVAIVFGPTLLRPEVEETSMPMTMVFQNQVVELILQQCADIFPPH

SEQ ID NO: 61733 - protein, 670 aa, Homo sapiens
MLSNESLHPPAFSRSNSEASVDSASMEDFWREIESIKDSSMGGQEEPPPAEVTPVDEGELEAEWLQDVGLSTLISGDEEEDGKALLSTLTRTQAAAVQKRYHTYTQTMRKKDKQSIRDVRDIFGVSESPPRDTCGNHTNQLDGTKEERELPRVIKTSGSMPDDASLNSTTLSDASQDKEGSFAVPRSDSVAILETIPVLPVHSNGSPEPGQPVQNAISDDDFLEKNIPPEAEELSFEVSYSEMVTEALKRNKLKKSEIKKEDYVLTKFNVQKTRFGLTEAGDLSAEDMKKIRHLSLIELTAFFDAFGIQLKRNKTEKVKGRDNGIFGVPLTVLLDGDRKKDPGVKVPLVLQKFFEKVEESGLESEGIFRLSGCTAKVKQYREELDAKFNADKFKWDKMCHREAAVMLKAFFRELPTSLFPVEYIPAFISLMERGPHVKVQFQALHLMVMALPDANRDAAQALMTFFNKVIANESKNRMSLWNISTVMAPNLFFSRSKHSDYEELLLANTAAHIIRLMLKYQKILWKVPSFLITQVRRMNEATMLLKKQLPSVRKLLRRKTLERETASPKTSKVLQKSPSARRMSDVPEGVIRVHAPLLSKVSMAIQLNNQTKAKDILAKFQYENRILHWQRAALSFLNGKWVKKEREESTETNRSPKHVFLFTIGLDIST

SEQ ID NO: 61734 - protein, 570 aa, Homo sapiens
MRKKDKQSIRDVRDIFGVSESPPRDTCGNHTNQLDGTKEERELPRVIKTSGSMPDDASLNSTTLSDASQDKEGSFAVPRSDSVAILETIPVLPVHSNGSPEPGQPVQNAISDDDFLEKNIPPEAEELSFEVSYSEMVTEALKRNKLKKSEIKKEDYVLTKFNVQKTRFGLTEAGDLSAEDMKKIRHLSLIELTAFFDAFGIQLKRNKTEKVKGRDNGIFGVPLTVLLDGDRKKDPGVKVPLVLQKFFEKVEESGLESEGIFRLSGCTAKVKQYREELDAKFNADKFKWDKMCHREAAVMLKAFFRELPTSLFPVEYIPAFISLMERGPHVKVQFQALHLMVMALPDANRDAAQALMTFFNKVIANESKNRMSLWNISTVMAPNLFFSRSKHSDYEELLLANTAAHIIRLMLKYQKILWKVPSFLITQVRRMNEATMLLKKQLPSVRKLLRRKTLERETASPKTSKVLQKSPSARRMSDVPEGVIRVHAPLLSKVSMAIQLNNQTKAKDILAKFQYENSHGSSECIKIQNQRLYEIGGNIGEHCLDPDAYILDVYRINPQAEWVIKPQQSS

SEQ ID NO: 61735 - protein, 545 aa, Homo sapiens
MNELPRDTCGNHTNQLDGTKEERELPRVIKTSGSMPDDASLNSTTLSDASQDKEGSFAVPRSDSVAILETIPVLPVHSNGSPEPGQPVQNAISDDDFLEKNIPPEAEELSFEVSYSEMVTEALKRNKLKKSEIKKEDYVLTKFNVQKTRFGLTEAGDLSAEDMKKIRHLSLIELTAFFDAFGIQLKRNKTEKVKGRDNGIFGVPLTVLLDGDRKKDPGVKVPLVLQKFFEKVEESGLESEGIFRLSGCTAKVKQYREELDAKFNADKFKWDKMCHREAAVMLKAFFRELPTSLFPVEYIPAFISLMERGPHVKVQFQALHLMVMALPDANRDAAQALMTFFNKVIANESKNRMSLWNISTVMAPNLFFSRSKHSDYEELLLANTAAHIIRLMLKYQKILWKVPSFLITQVRRMNEATMLLKKQLPSVRKLLRRKTLERETASPKTSKVLQKSPSARRMSDVPEGVIRVHAPLLSKVSMAIQLNNQTKAKDILAKFQYENRILHWQRAALSFLNGKWVKKEREESTETNRSPKHVFLFTIGLDIST

SEQ ID NO: 61736 - protein, 722 aa, Homo sapiens
MEVEDSGGVVLTAYHSYARAQPPNAESRCAPRAAASHPLSRKSIPRCRRINRMLSNESLHPPAFSRSNSEASVDSASMEDFWREIESIKDSSMGGQEEPPPAEVTPVDEGELEAEWLQDVGLSTLISGDEEEDGKALLSTLTRTQAAAVQKRYHTYTQTMRKKDKQSIRDVRDIFGVSESPPRDTCGNHTNQLDGTKEERELPRVIKTSGSMPDDASLNSTTLSDASQDKEGSFAVPRSDSVAILETIPVLPVHSNGSPEPGQPVQNAISDDDFLEKNIPPEAEELSFEVSYSEMVTEALKRNKLKKSEIKKEDYVLTKFNVQKTRFGLTEAGDLSAEDMKKIRHLSLIELTAFFDAFGIQLKRNKTEKVKGRDNGIFGVPLTVLLDGDRKKDPGVKVPLVLQKFFEKVEESGLESEGIFRLSGCTAKVKQYREELDAKFNADKFKWDKMCHREAAVMLKAFFRELPTSLFPVEYIPAFISLMERGPHVKVQFQALHLMVMALPDANRDAAQALMTFFNKVIANESKNRMSLWNISTVMAPNLFFSRSKHSDYEELLLANTAAHIIRLMLKYQKILWKVPSFLITQVRRMNEATMLLKKQLPSVRKLLRRKTLERETASPKTSKVLQKSPSARRMSDVPEGVIRVHAPLLSKVSMAIQLNNQTKAKDILAKFQYENRILHWQRAALSFLNGKWVKKEREESTETNRSPKHVFLFTIGLDIST

SEQ ID NO: 61737 - protein, 563 aa, Homo sapiens
MRKKDKQSIRDVRDIFGVSESPPRDTCGNHTNQLDGTKEERELPRVIKTSGSMPDDASLNSTTLSDASQDKEGSFAVPRSDSVAILETIPVLPVHSNGSPEPGQPVQNAISDDDFLEKNIPPEAEELSFEVSYSEMVTEALKRNKLKKSEIKKEDYVLTKFNVQKTRFGLTEAGDLSAEDMKKIRHLSLIELTAFFDAFGIQLKRNKTEKVKGRDNGIFGVPLTVLLDGDRKKDPGVKVPLVLQKFFEKVEESGLESEGIFRLSGCTAKVKQYREELDAKFNADKFKWDKMCHREAAVMLKAFFRELPTSLFPVEYIPAFISLMERGPHVKVQFQALHLMVMALPDANRDAAQALMTFFNKVIANESKNRMSLWNISTVMAPNLFFSRSKHSDYEELLLANTAAHIIRLMLKYQKILWKVPSFLITQVRRMNEATMLLKKQLPSVRKLLRRKTLERETASPKTSKVLQKSPSARRMSDVPEGVIRVHAPLLSKVSMAIQLNNQTKAKDILAKFQYENRILHWQRAALSFLNGKWVKKEREESTETNRSPKHVFLFTIGLDIST

SEQ ID NO: 61738 - protein, 570 aa, Homo sapiens; identical to SEQ ID NO: 61734

SEQ ID NO: 61739 - protein, 117 aa, Homo sapiens
MLSNESLHPPAFSRSNSEASVDSASMEDFWREIESIKDSSMGGQEEPPPAEVTPVDEGELEAEWLQDVGLSTLISGDEEEDGKALLSTLTRTQAAAVQKRYHTYTQTMRKKDKQSIR

SEQ ID NO: 61740 - protein, 554 aa, Homo sapiens
MAFMRINVIMNELPRDTCGNHTNQLDGTKEERELPRVIKTSGSMPDDASLNSTTLSDASQDKEGSFAVPRSDSVAILETIPVLPVHSNGSPEPGQPVQNAISDDDFLEKNIPPEAEELSFEVSYSEMVTEALKRNKLKKSEIKKEDYVLTKFNVQKTRFGLTEAGDLSAEDMKKIRHLSLIELTAFFDAFGIQLKRNKTEKVKGRDNGIFGVPLTVLLDGDRKKDPGVKVPLVLQKFFEKVEESGLESEGIFRLSGCTAKVKQYREELDAKFNADKFKWDKMCHREAAVMLKAFFRELPTSLFPVEYIPAFISLMERGPHVKVQFQALHLMVMALPDANRDAAQALMTFFNKVIANESKNRMSLWNISTVMAPNLFFSRSKHSDYEELLLANTAAHIIRLMLKYQKILWKVPSFLITQVRRMNEATMLLKKQLPSVRKLLRRKTLERETASPKTSKVLQKSPSARRMSDVPEGVIRVHAPLLSKVSMAIQLNNQTKAKDILAKFQYENRILHWQRAALSFLNGKWVKKEREESTETNRSPKHVFLFTIGLDIST

SEQ ID NO: 61741 - protein, 1261 aa, Homo sapiens
MIAHKQKKTKKKRAWASGQLSTDITTSEMGLKSLSSNSIFDPDYIKELVNDIRKFSHMLLYLKEAIFSDCFKEVIHIRLEELLRVLKSIMNKHQNLNSVDLQNAAEMLTAKVKAVNFTEVNEENKNDLFQEVFSSIETLAFTFGNILTNFLMGDVGNDSLLRLPVSRETKSFENVSVESVDSSSEKGNFSPLELDNVLLKNTDSIELALSYAKTWSKYTKNIVSWVEKKLNLELESTRNMVKLAEATRTNIGIQEFMPLQSLFTNALLNDIESSHLLQQTIAALQANKFVQPLLGRKNEMEKQRKEIKELWKQEQNKMLEAENALKKAKLLCMQRQDEYEKAKSSMFRAEEEHLSSSGGLAKNLNKQLEKKRRLEEEALQKVEEANELYKVCVTNVEERRNDLENTKREILAQLRTLVFQCDLTLKAVTVNLFHMQHLQAASLADSLQSLCDSAKLYDPGQEYSEFVKATNSTEEEKVDGNVNKHLNSSQPSGFGPANSLEDVVRLPDSSNKIEEDRCSNSADITGPSFIRSWTFGMFSDSESTGGSSESRSLDSESISPGDFHRKLPRTPSSGTMSSADDLDEREPPSPSETGPNSLGTFKKTLMSKAALTHKFRKLRSPTKCRDCEGIVVFQGVECEECLLVCHRKCLENLVIICGHQKLPGKIHLFGAEFTQVAKKEPDGIPFILKICASEIENRALCLQGIYRVCGNKIKTEKLCQALENGMHLVDISEFSSHDICDVLKLYLRQLPEPFILFRLYKEFIDLAKEIQHVNEEQETKKNSLEDKKWPNMCIEINRILLKSKDLLRQLPASNFNSLHFLIVHLKRVVDHAEENKMNSKNLGVIFGPSLIRPRPTTAPITISSLAEYSNQARLVEFLITYSQKIFDGSLQPQDVMCSIGVVDQGCFPKPLLSPEERDIERSMKSLFFSSKEDIHTSESESKIFERATSFEESERKQNALGKCDACLSDKAQLLLDQEAESASQKIEDGKTPKPLSLKSDRSTNNVERHTPRTKIRPVSLPVDRLLLASPPNERNGRNMGNVNLDKFCKNPAFEGVNRKDAATTVCSKFNGFDQQTLQKIQDKQYEQNSLTAKTTMIMPSALQEKGVTTSLQISGDHSINATQPSKPYAEPVRSVREASERRSSDSYPLAPVRAPRTLQPQHWTTFYKPHAPIISIRGNEEKPASPSAAVPPGTDHDPHGLVVKSMPDPDKASACPGQATGQPKEDSEELGLPDVNPMCQRPRLKRMQQFEDLEGEIPQFV

SEQ ID NO: 61742 - protein, 393 aa, Homo sapiens
MIAHKQKKTKKKRAWASGQLSTDITTSEMGLKSLSSNSIFDPDYIKELVNDIRKFSHMLLYLKEAIFSDCFKEVIHIRLEELLRVLKSIMNKHQNLNSVDLQNAAEMLTAKVKAVNFTEVNEENKNDLFQEVFSSIETLAFTFGNILTNFLMGDVGNDSLLRLPVSRETKSFENVSVESVDSSSEKGNFSPLELDNVLLKNTDSIELALSYAKTWSKYTKNIVSWVEKKLNLELESTRNMVKLAEATRTNIGIQEFMPLQSLFTNALLNDIESSHLLQQTIAALQANKFVQPLLGRKNEMEKQRKEIKELWKQEQNKMLEAENALKKAKLLCMQRQDEYEKAKSSMFRAEEEHLSSSGGLAKNLNKQLEKKRRLEEEALQKVTIFFFFICKLN

SEQ ID NO: 61743 - protein, 1101 aa, Homo sapiens
MKSRQKGKKKGSAKERVFGCDLQEHLQHSGQEVPQVLKSCAEFVEEYGVVDGIYRLSGVSSNIQKLRQEFESERKPDLRRDVYLQDIHCVSSLCKAYFRELPDPLLTYRLYDKFAEAVGVQLEPERLVKILEVLRELPVPNYRTLEFLMRHLVHMASFSAQTNMHARNLAIVWAPNLLRSKDIEASGFNGTAAFMEVRVQSIVVEFILTHVDQLFGGAALSGGEVESGWRSLPGTRASGSPEDLMPRPLPYHLPSILQAGDGPPQMRPYHTIIEIAEHKRKGSLKVRKWRSIFNLGRSGHETKRKLPRGAEDREDKSNKGTLRPAKSMDSLSAAAGASDEPEGLVGPSSPRPSPLLPESLENDSIEAAEGEQEPEAEALGGTNSEPGTPRAGRSAIRAGGSSRAERCAGVHISDPYNVNLPLHITSILSVPPNIISNVSLARLTRGLECPALQHRPSPASGPGPGPGLGPGPPDEKLEASPASSPLADSGPDDLAPALEDSLSQEVQDSFSFLEDSSSSEPEWVGAEDGEVAQAEAAGAAFSPGEDDPGMGYLEELLGVGPQVEEFSVEPPLDDLSLDEAQFVLAPSCCSLDSAGPRPEVEEENGEEVFLSAYDDLSPLLGPKPPIWKGSGSLEGEAAGCGRQALGQGGEEQACWEVGEDKQAEPGGRLDIREEAEGSPETKVEAGKASEDRGEAGGSQETKVRLREGSREETEAKEEKSKGQKKADSMEAKGVEEPGGDEYTDEKEKEIEREEDEQREEAQVEAGRDLEQGAQEDQVAEEKWEVVQKQEAEGVREDEDKGQREKGYHEARKDQGDGEDSRSPEAATEGGAGEVSKERESGDGEAEGDQRAGGYYLEEDTLSEGSGVASLEVDCAKEGNPHSSEMEEVAPQPPQPEEMEPEGQPSPDGCLCPCSLGLGGVGMRLASTLVQVQQVRSVPVVPPKPQFAKMPSAMCSKIHVAPANPCPRPGRLDGTPGERAWGSRASRSSWRNGGSLSFDAAVALARDRQRTEAQGVRRTQTCTEGGDYCLIPRTSPCSMISAHSPRPLSCLELPSEGAEGSGSRSRLSLPPREPQVPDPLLSSQRRSYAFETQANPGKGEGL

SEQ ID NO: 61744 - protein, 890 aa, Homo sapiens
MKSRQKGKKKGSAKERVFGCDLQEHLQHSGQEVPQVLKSCAEFVEEYGVVDGIYRLSGVSSNIQKLRQEFESERKPDLRRDVYLQDIHCVSSLCKAYFRELPDPLLTYRLYDKFAEAVGVQLEPERLVKILEVLRELPVPNYRTLEFLMRHLVHMASFSAQTNMHARNLAIVWAPNLLRSKDIEASGFNGTAAFMEVRVQSIVVEFILTHVDQLFGGAALSGGEVESGWRSLPGTRASGSPEDLMPRPLPYHLPSILQAGDGPPQMRPYHTIIEIAEHKRKGSLKVRKWRSIFNLGRSGHETKRKLPRGAEDREDKSNKGTLRPAKSMDSLSAAAGASDEPEGLVGPSSPRPSPLLPESLENDSIEAAEGEQEPEAEALGGTNSEPGTPRAGRSAIRAGGSSRAERCAGVHISDPYNVNLPLHITSILSVPPNIISNVSLARLTRGLECPALQHRPSPASGPGPGPGLGPGPPDEKLEASPASSPLADSGPDDLAPALEDSLSQEVQDSFSFLEDSSSSEPEWVGAEDGEVAQAEAAGAAFSPGEDDPGMGYLEELLGVGPQVEEFSVEPPLDDLSLDEAQFVLAPSCCSLDSAGPRPEVEEENGEEVFLSAYDDLSPLLGPKPPIWKGSGSLEGEAAGCGRQALGQGGEEQACWEVGEDKQAEPGGRLDIREEAEGTPQPPQPEEMEPEGQPSPDGCLCPCSLGLGGVGMRLASTLVQVQQVRSVPVVPPKPQFAKMPSAMCSKIHVAPANPCPRPGRLDGTPGERAWGSRASRSSWRNGGSLSFDAAVALARDRQRTEAQGVRRTQTCTEGGDYCLIPRTSPCSMISAHSPRPLSCLELPSEGAEGSGSRSRLSLPPREPQVPDPLLSSQRRSYAFETQANPGKGEGL

SEQ ID NO: 61745 - protein, 499 aa, Homo sapiens
MRHLVHMASFSAQTNMHARNLAIVWAPNLLRSKDIEASGFNGTAAFMEVRVQSIVVEFILTHVDQLFGGAALSGGEVESGWRSLPGTRASGSPEDLMPRPLPYHLPSILQAGDGPPQMRPYHTIIEIAEHKRKGSLKVRKWRSIFNLGRSGHETKRKLPRGAEDREDKSNKGTLRPAKSMDSLSAAAGASDEPEGLVGPSSPRPSPLLPESLENDSIEAAEGEQEPEAEALGGTNSEPGTPRAGRSAIRAGGSSRAERCAGVHISDPYNVNLPLHITSILSVPPNIISNVSLARLTRGLECPALQHRPSPASGPGPGPGLGPGPPDEKLEASPASSPLADSGPDDLAPALEDSLSQEVQDSFSFLEDSSSSEPEWVGAEDGEVAQAEAAGAAFSPGEDDPGMGYLEELLGVGPQVEEFSVEPPLDDLSLDEAQFVLAPSCCSLDSAGPRPEVEEENGEEVFLSAYDDLSPALGLLLQPGWGHRSHSSEGQCLRIKAVFL

SEQ ID NO: 61746 - protein, 1444 aa, Homo sapiens
MKNKGAKQKLKRKGAASAFGCDLTEYLESSGQDVPYVLKSCAEFIETHGIVDGIYRLSGVTSNIQRLRQEFGSDQCPDLTREVYLQDIHCVGSLCKLYFRELPNPLLTYELYEKFTEAVSHCPEEGQLARIQNVIQELPPSHYRTLEYLIRHLAHIASFSSKTNMHARNLALVWAPNLLRSKEIEATGCNGDAAFLAVRVQQVVIEFILNHVDQIFNNGAPGSLENDENRPIMKSLTLPALSLPMKLVSLEEAQARSLATNHPARKERRENSLPEIVPPMGTLFHTVLELPDNKRKLSSKSKKWKSIFNLGRSGSDSKSKLSRNGSVFVRGQRLSVEKATIRPAKSMDSLCSVPVEGKETKGNFNRTVTTGGFFIPATKMHSTGTGSSCDLTKQEGEWGQEGMPPGAEGGFDVSSDRSHLQGAQARPPPEQLKVFRPVEDPESEQTAPKMLGMFYTSNDSPSKSVFTSSLFQMEPSPRNQRKALNISEPFAVSVPLRVSAVISTNSTPCRTPPKELQSLSSLEEFSFHGSESGGWPEEEKPLGAETSAASVPKKAGLEDAKAVPEAPGTVECSKGLSQEPGAHLEEKKTPESSLSSQHLNELEKRPNPEKVVEEGREAGEMESSTLQESPRARAEAVLLHEMDEDDLANALIWPEIQQELKIIESEEELSSLPPPALKTSPIQPILESSLGPFIPSEPPGSLPCGSFPAPVSTPLEVWTRDPANQSTQGASTAASREKPEPEQGLHPDLASLAPLEIVPFEKASPQATVEVGGPGNLSPPLPPAPPPPTPLEESTPVLLSKGGPEREDSSRKLRTDLYIDQLKSQDSPEISSLCQGEEATPRHSDKQNSKNAASEGKGCGFPSPTREVEIVSQEEEDVTHSVQEPSDCDEDDTVTDIAQHGLEMVEPWEEPQWVTSPLHSPTLKDAHKAQVQGLQGHQLEKRLSHRPSLRQSHSLDSKPTVKSQWTLEVPSSSSCANLETERNSDPLQPQAPRREITGWDEKALRSFREFSGLKGAEAPPNQKGPSGVQPNPAETSPISLAEGKELGTHLGHSSPQIRQGGVPGPESSKESSPSVQDSTSPGEHPAKLQLKSTECGPPKGKNRPSSLNLDPAIPIADLFWFENVASFSSPGMQVSEPGDPKVTWMTSSYCKADPWRVYSQDPQDLDIVAHALTGRRNSAPVSVSAVRTSFMVKMCQARAVPVIPPKIQYTQIPQPLPSQSSGENGVQPLERSQEGPSSTSGTTQKPAKDDSPSSLESSKEEKPKQDPGAIKSSPVDATAPCMCEGPTLSPEPGSSNLLSTQDAVVQCRKRMSETEPSGDNLLSSKLERPSGGSKPFHRSRPGRPQSLILFSPPFPIMDHLPPSSTVTDSKVLLSPIRSPTQTVSPGLLCGELAENTWVTPEGVTLRNKMTIPKNGQRLETSTSCFYQPQRRSVILDGRSGRQIE

SEQ ID NO: 61747 - protein, 1099 aa, Homo sapiens
MKNKGAKQKLKRKGAASAFGCDLTEYLESSGQDVPYVLKSCAEFIETHGIVDGIYRLSGVTSNIQRLRQEFGSDQCPDLTREVYLQDIHCVGSLCKLYFRELPNPLLTYELYEKFTEAVSHCPEEGQLARIQNVIQELPPSHYRTLEYLIRHLAHIASFSSKTNMHARNLALVWAPNLLRSKEIEATGCNGDAAFLAVRVQQVVIEFILNHVDQIFNNGAPGSLENDENRPIMKSLTLPALSLPMKLVSLEEAQARSLATNHPARKERRENSLPEIVPPMGTLFHTVLELPDNKRKLSSKSKKWKSIFNLGRSGSDSKSKLSRNGSVFVRGQRLSVEKATIRPAKSMDSLCSVPVEGKETKGNFNRTVTTGGFFIPATKMHSTGTGSSCDLTKQEGEWGQEGMPPGAEGGFDVSSDRSHLQGAQARPPPEQLKVFRPVEDPESEQTAPKMLGMFYTSNDSPSKSVFTSSLFQMEPSPRNQRKALNISEPFAVSVPLRVSAVISTNSTPCRTPPKELQSLSSLEEFSFHGSESGGWPEEEKPLGAETSAASVPKKAGLEDAKAVPEAPGTVECSKGLSQEPGAHLEEKKTPESSLSSQHLNELEKRPNPEKVVEEGREAGEMESSTLQESPRARAEAVLLHEMDEDDLANALIWPEIQQELKIIESEEELSSLPPPALKTSPIQPILESSLGPFIPSEPPGSLPCGSFPAPVSTPLEVWTRDPANQSTQGASTAASREKPEPEQGLHPDLASLAPLEIVPFEKASPQATVEVGGPGNLSPPLPPAPPPPTPLEESTPVLLSKGGPEREDSSRKLRTDLYIDQLKSQDSPEISSLCQGEEATPRHSDKQNSKNAASEGKGCGFPSPTREVEIVSQEEEDVTHSVQEPSDCDEDDTVTDIAQHGLEMVEPWEEPQWVTSPLHSPTLKDAHKAQVQGLQGHQLEKRLSHRPSLRQSHSLDSKPTVKSQWTLEVPSSSSCANLETERNSDPLQPQAPRREITGWDEKALRSFREFSGLKGAEAPPNQKGPSGVQPNPAQPVGPLRNLPKMILPPPWKAQRKKNQSKIPEPLSPHQWMPLHPACARDLPFLQNQARLTCSPPRMQ

SEQ ID NO: 61748 - protein, 1502 aa, Homo sapiens
MMAKNKEPRPPSYTISIVGLSGTEKDKGNCGVGKSCLCNRFVRSKADEYYPEHTSVLSTIDFGGRVVNNDHFLYWGDIIQNSEDGVECKIHVIEQTEFIDDQTFLPHRSTNLQPYIKRAAASKLQSAEKLMYICTDQLGLEQDFEQKQMPEGKLNVDGFLLCIDVSQGCNRKFDDQLKFVNNLFVQLSKSKKPVIIAATKCDECVDHYLREVQAFASNKKNLLVVETSARFNVNIETCFTALVQMLDKTRSKPKIIPYLDAYKTQRQLVVTATDKFEKLVQTVRDYHATWKTVSNKLKNHPDYEEYINLEGTRKARNTFSKHIEQLKQEHIRKRREEYINTLPRAFNTLLPNLEEIEHLNWSEALKLMEKRADFQLCFVVLEKTPWDETDHIDKINDRRIPFDLLSTLEAEKVYQNHVQHLISEKRRVEMKEKFKKTLEKIQFISPGQPWEEVMCFVMEDEAYKYITEADSKEVYGRHQREIVEKAKEEFQEMLFEHSELFYDLDLNATPSSDKMSEIHTVLSEEPRYKALQKLAPDRESLLLKHIGFVYHPTKETCLSGQNCTDIKVEQLLASSLLQLDHGRLRLYHDSTNIDKVNLFILGKDGLAQELANEIRTQSTDDEYALDGKIYELDLRPVDAKSPYFLSQLWTAAFKPHGCFCVFNSIESLSFIGEFIGKIRTEASQIRKDKYMANLPFTLILANQRDSISKNLPILRHQGQQLANKLQCPFVDVPAGTYPRKFNETQIKQALRGVLESVKHNLDVVSPIPANKDLSEADLRIVMCAMCGDPFSVDLILSPFLDSHSCSAAQAGQNNSLMLDKIIGEKRRRIQITILSYHSSIGVRKDELVHGYILVYSAKRKASMGMLRAFLSEVQDTIPVQLVAVTDSQADFFENEAIKELMTEGEHIATEITAKFTALYSLSQYHRQTEVFTLFFSDVLEKKNMIENSYLSDNTRESTHQSEDVFLPSPRDCFPYNNYPDSDDDTEAPPPYSPIGDDVQLLPTPSDRSRYRLDLEGNEYPIHSTPNCHDHERNHKVPPPIKPKPVVPKTNVKKLDPNLLKTIEAGIGKNPRKQTSRVPLAHPEDMDPSDNYAEPIDTIFKQKGYSDEIYVVPDDSQNRIKIRNSFVNNTQGDEENGFSDRTSKSHGERRPSKYKYKSKTLFSKAKSYYRRTHSDASDDEAFTTSKTKRKGRHRGSEEDPLLSPVETWKGGIDNPAITSDQELDDKKMKKKTHKVKEDKKQKKKTKNFNPPTRRNWESNYFGMPLQDLVTAEKPIPLFVEKCVEFIEDTGLCTEGLYRVSGNKTDQDNIQKQFDQDHNINLVSMEVTVNAVAGALKAFFADLPDPLIPYSLHPELLEAAKIPDKTERLHALKEIVKKFHPVNYDVFRYVITHLNRVSQQHKINLMTADNLSICFWPTLMRPDFENREFLSTTKIHQSVVETFIQQCQFFFYNGEIVETTNIVAPPPPSNPGQLVEPMVPLQLPPPLQPQLIQPQLQTDPLGII

SEQ ID NO: 61749 - protein, 237 aa, Homo sapiens
MSLPPPPPGPLPLRRRRRRPTLLGLCTEGLYRVSGNKTDQDNIQKQFDQDHNINLVSMEVTVNAVAGALKAFFADLPDPLIPYSLHPELLEAAKIPDKTERLHALKEIVKKFHPVNYDVFRYVITHLNRVSQQHKINLMTADNLSICFWPTLMRPDFENREFLSTTKIHQSVVETFIQQCQFFFYNGEIVETTNIVAPPPPSNPGQLVEPMVPLQLPPPLQPQLIQPQLQTDPLGII

SEQ ID NO: 61750 - protein, 1501 aa, Homo sapiens
MMAKNKEPRPPSYTISIVGLSGTEKDKGNCGVGKSCLCNRFVRSKADEYYPEHTSVLSTIDFGGRVVNNDHFLYWGDIIQNSEDGVECKIHVIEQTEFIDDQTFLPHRSTNLQPYIKRAAASKLQSAEKLMYICTDQLGLEQDFEQKQMPEGKLNVDGFLLCIDVSQGCNRKFDDQLKFVNNLFVQLSKSKKPVIIAATKCDECVDHYLREVQAFASNKKNLLVVETSARFNVNIETCFTALVQMLDKTRSKPKIIPYLDAYKTQRQLVVTATDKFEKLVQTVRDYHATWKTVSNKLKNHPDYEEYINLEGTRKARNTFSKHIEQLKQEHIRKRREEYINTLPRAFNTLLPNLEEIEHLNWSEALKLMEKRADFQLCFVVLEKTPWDETDHIDKINDRRIPFDLLSTLEAEKVYQNHVQHLISEKRRVEMKEKFKKTLEKIQFISPGQPWEEVMCFVMEDEAYKYITEADSKEVYGRHQREIVEKAKEEFQEMLFEHSELFYDLDLNATPSSDKMSEIHTVLSEEPRYKALQKLAPDRESLLLKHIGFVYHPTKETCLSGQNCTDIKVEQLLASSLLQLDHGRLRLYHDSTNIDKVNLFILGKDGLAQELANEIRTQSTDDEYALDGKIYELDLRPVDAKSPYFLSQLWTAAFKPHGCFCVFNSIESLSFIGEFIGKIRTEASQIRKDKYMANLPFTLILANQRDSISKNLPILRHQGQQLANKLQCPFVDVPAGTYPRKFNETQIKQALRGVLESVKHNLDVVSPIPANKDLSEADLRIVMCAMCGDPFSVDLILSPFLDSHSCSAAQAGQNNSLMLDKIIGEKRRRIQITILSYHSSIGVRKDELVHGYILVYSAKRKASMGMLRAFLSEVQDTIPVQLVAVTDSQADFFENEAIKELMTEGEHIATEITAKFTALYSLSQYHRQTEVFTLFFSDVLEKKNMIENSYLSDNTRESTHQSEDVFLPSPRDCFPYNNYPDSDDDTEAPPPYSPIGDDVQLLPTPSDRSRYRLDLEGNEYPIHSTPNCHDHERNHKVPPPIKPKPVVPKTNVKKLDPNLLKTIEAGIGKNPRKQTSRVPLAHPEDMDPSDNYAEPIDTIFKQKGYSDEIYVVPDDSQNRIKIRNSFVNNTQGDEENGFSDRTSKSHGERRPSKYKYKSKTLFSKAKSYYRRTHSDASDDEAFTTSKTKRKGRHRGSEEDPLLSPVETWKGGIDNPAITSDQELDDKKMKKKTHKVKEDKKKKKTKNFNPPTRRNWESNYFGMPLQDLVTAEKPIPLFVEKCVEFIEDTGLCTEGLYRVSGNKTDQDNIQKQFDQDHNINLVSMEVTVNAVAGALKAFFADLPDPLIPYSLHPELLEAAKIPDKTERLHALKEIVKKFHPVNYDVFRYVITHLNRVSQQHKINLMTADNLSICFWPTLMRPDFENREFLSTTKIHQSVVETFIQQCQFFFYNGEIVETTNIVAPPPPSNPGQLVEPMVPLQLPPPLQPQLIQPQLQTDPLGII

SEQ ID NO: 61751 - protein, 241 aa, Homo sapiens
MPLQDLVTAEKPIPLFVEKCVEFIEDTGLCTEGLYRVSGNKTDQDNIQKQFDQDHNINLVSMEVTVNAVAGALKAFFADLPDPLIPYSLHPELLEAAKIPDKTERLHALKEIVKKFHPVNYDVFRYVITHLNRVSQQHKINLMTADNLSICFWPTLMRPDFENREFLSTTKIHQSVVETFIQQCQFFFYNGEIVETTNIVAPPPPSNPGQLVEPMVPLQLPPPLQPQLIQPQLQTDPLGII

SEQ ID NO: 61752 - protein, 1502 aa, Homo sapiens; identical to SEQ ID NO: 61748

SEQ ID NO: 61753 - protein, 137 aa, Homo sapiens
MPLQDLVTAEKPIPLFVEKCVEFIEDTGLCTEGLYRVSGNKTDQDNIQKQFDQDHNINLVSMEVTVNAVAGALKAFFADLPDPLIPYSLHPELLEAAKIPDKTERLHALKEIVKKFHPVNYDVFRYVITHLNRVSQQ

SEQ ID NO: 61754 - protein, 37 aa, Homo sapiens
MMAKNKEPRPPSYTISIVGLSGTEKDKGNCGVGKSCL

SEQ ID NO: 61755 - protein, 140 aa, Homo sapiens
MMAKNKEPRPPSYTISIVGLSGTEKDKGNCGVGKSCLCNRFVRSKADEYYPEHTSVLSTIDFGGRVVNNDHFLYWGDIIQNSEDGVECKIHVIEQTEFIDDQTFLPHRSTNLQPYIKRAAASKLQSAEKLMYICTDQLGL

SEQ ID NO: 61756 - protein, 1501 aa, Homo sapiens; identical to SEQ ID NO: 61750

SEQ ID NO: 61757 - protein, 771 aa, Homo sapiens
MSGRSVRLRSVPIQSLSELERARLQEVAFYQLQQDCDLSCQITIPKDGQKRKKSLRKKLDSLGKEKNKDKEFIPQAFGMPLSQVIANDRAYKLKQDLQRDEQKDASDFVASLLPFGNKRQNKELSSSNSSLSSTSETPNESTSPNTPEPAPRARRRGAMSVDSITDLDDNQSRLLEALQLSLPAEAQSKKEKARDKKLSLNPIYRQVPRLVDSCCQHLEKHGLQTVGIFRVGSSKKRVRQLREEFDRGIDVSLEEEHSVHDVAALLKEFLRDMPDPLLTRELYTAFINTLLLEPEEQLGTLQLLIYLLPPCNCDTLHRLLQFLSIVARHADDNISKDGQEVTGNKMTSLNLATIFGPNLLHKQKSSDKEFSVQSSARAEESTAIIAVVQKMIENYEALFMVPPDLQNEVLISLLETDPDVVDYLLRRKASQSSSPDMLQSEVSFSVGGRHSSTDSNKASSGDISPYDNNSPVLSERSLLAMQEDAAPGGSEKLYRVPGQFMLVGHLSSSKSRESSPGPRLGKDLSEEPFDIWGTWHSTLKSGSKDPGMTGSSGDIFESSSLRAGPCSLSQGNLSPNWPRWQGSPAELDSDTQGARRTQAAAPATEGRAHPAVSRACSTPHVQVAGKAERPTARSEQYLTLSGAHDLSESELDVAGLQSRATPQCQRPHGSGRDDKRPPPPYPGPGKPAAAAAWIQGPPEGVETPTDQGGQAAEREQQVTQKKLSSANSLPAGEQDSPRLGDAGWLDWQRERWQIWELLSTDNPDALPETLV

SEQ ID NO: 61758 - protein, 974 aa, Homo sapiens
MSAQSLLHSVFSCSSPASSSAASAKGFSKRKLRQTRSLDPALIGGCGSDEAGAEGSARGATAGRLYSPSLPAESLGPRLASSSRGPPPRATRLPPPGPLCSSFSTPSTPQEKSPSGSFHFDYEVPLGRGGLKKSMAWDLPSVLAGPASSRSASSILCSSGGGPNGIFASPRRWLQQRKFQSPPDSRGHPYVVWKSEGDFTWNSMSGRSVRLRSVPIQSLSELERARLQEVAFYQLQQDCDLSCQITIPKDGQKRKKSLRKKLDSLGKEKNKDKEFIPQAFGMPLSQVIANDRAYKLKQDLQRDEQKDASDFVASLLPFGNKRQNKELSSSNSSLSSTSETPNESTSPNTPEPAPRARRRGAMSVDSITDLDDNQSRLLEALQLSLPAEAQSKKEKARDKKLSLNPIYRQVPRLVDSCCQHLEKHGLQTVGIFRVGSSKKRVRQLREEFDRGIDVSLEEEHSVHDVAALLKEFLRDMPDPLLTRELYTAFINTLLLEPEEQLGTLQLLIYLLPPCNCDTLHRLLQFLSIVARHADDNISKDGQEVTGNKMTSLNLATIFGPNLLHKQKSSDKEFSVQSSARAEESTAIIAVVQKMIENYEALFMVPPDLQNEVLISLLETDPDVVDYLLRRKASQSSSPDMLQSEVSFSVGGRHSSTDSNKASSGDISPYDNNSPVLSERSLLAMQEDAAPGGSEKLYRVPGQFMLVGHLSSSKSRESSPGPRLGKDLSEEPFDIWGTWHSTLKSGSKDPGMTGSSGDIFESSSLRAGPCSLSQGNLSPNWPRWQGSPAELDSDTQGARRTQAAAPATEGRAHPAVSRACSTPHVQVAGKAERPTARSEQYLTLSGAHDLSESELDVAGLQSRATPQCQRPHGSGRDDKRPPPPYPGPGKPAAAAAWIQGPPEGVETPTDQGGQAAEREQQVTQKKLSSANSLPAGEQDSPRLGDAGWLDWQRERWQIWELLSTDNPDALPETLV

SEQ ID NO: 61759 - protein, 601 aa, Homo sapiens
LELYDLQILGTKPPMNSDTHRNFDPTATLRNQGDFTWNSMSGRSVRLRSVPIQSLSELERARLQEVAFYQLQQDCDLSCQITIPKDGQKRKKSLRKKLDSLGKEKNKDKEFIPQAFGMPLSQVIANDRAYKLKQDLQRDEQKDASDFVASLLPFGNKRQNKELSSSNSSLSSTSETPNESTSPNTPEPAPRARRRGAMSVDSITDLDDNQSRLLEALQLSLPAEAQSKKEKARDKKLSLNPIYRQVPRLVDSCCQHLEKHGLQTVGIFRVGSSKKRVRQLREEFDRGIDVSLEEEHSVHDVAALLKEFLRDMPDPLLTRELYTAFINTLLLEPEEQLGTLQLLIYLLPPCNCDTLHRLLQFLSIVARHADDNISKDGQEVTGNKMTSLNLATIFGPNLLHKQKSSDKEFSVQSSARAEESTAIIAVVQKMIENYEALFMVPPDLQNEVLISLLETDPDVVDYLLRRKASQSSSPDMLQSEVSFSVGGRHSSTDSNKASSGDISPYDNNSPVLSERSLLAMQEDAAPGGSEKLYRVPGQFMLVGHLSSSKSRESSPGPRLGKGNWSLASRRWPKQATLLLLHVAWCGALRTFSSSLPYLMFL

SEQ ID NO: 61760 - protein, 765 aa, Homo sapiens
MSAQSLLHSVFSCSSPASSSAASAKGFSKRKLRQTRSLDPALIGGCGSDEAGAEGSARGATAGRLYSPSLPAESLGPRLASSSRGPPPRATRLPPPGPLCSSFSTPSTPQEKSPSGSFHFDYEVPLGRGGLKKSMAWDLPSVLAGPASSRSASSILCSSGGGPNGIFASPRRWLQQRKFQSPPDSRGHPYVVWKSEGDFTWNSMSGRSVRLRSVPIQSLSELERARLQEVAFYQLQQDCDLSCQITIPKDGQKRKKSLRKKLDSLGKEKNKDKEFIPQAFGMPLSQVIANDRAYKLKQDLQRDEQKDASDFVASLLPFGNKRQNKELSSSNSSLSSTSETPNESTSPNTPEPAPRARRRGAMSVDSITDLDDNQSRLLEALQLSLPAEAQSKKEKARDKKLSLNPIYRQVPRLVDSCCQHLEKHGLQTVGIFRVGSSKKRVRQLREEFDRGIDVSLEEEHSVHDVAALLKEFLRDMPDPLLTRELYTAFINTLLLEPEEQLGTLQLLIYLLPPCNCDTLHRLLQFLSIVARHADDNISKDGQEVTGNKMTSLNLATIFGPNLLHKQKSSDKEFSVQSSARAEESTAIIAVVQKMIENYEALFMVPPDLQNEVLISLLETDPDVVDYLLRRKASQSSSPDMLQSEVSFSVGGRHSSTDSNKASSGDISPYDNNSPVLSERSLLAMQEDAAPGGSEKLYRVPGQFMLVGHLSSSKSRESSPGPRLGKGNWSLASRRWPKQATLLLLHVAWCGALRTFSSSLPYLMFL

SEQ ID NO: 61761 - protein, 690 aa, Homo sapiens
MSAQSLLHSVFSCSSPASSSAASAKGFSKRKLRQTRSLDPALIGGCGSDEAGAEGSARGATAGRLYSPSLPAESLGPRLASSSRGPPPRATRLPPPGPLCSSFSTPSTPQEKSPSGSFHFDYEVPLGRGGLKKSMAWDLPSVLAGPASSRSASSILCSSGGGPNGIFASPRRWLQQRKFQSPPDSRGHPYVVWKSELELYDLQILGTKPPMNSDTHRNFDPTATLRNQGDFTWNSMSGRSVRLRSVPIQSLSELERARLQEVAFYQLQQDCDLSCQITIPKDGQKRKKSLRKKLDSLGKEKNKDKEFIPQAFGMPLSQVIANDRAYKLKQDLQRDEQKDASDFVASLLPFGNKRQNKELSSSNSSLSSTSETPNESTSPNTPEPAPRARRRGAMSVDSITDLDDNQSRLLEALQLSLPAEAQSKKEKARDKKLSLNPIYRQVPRLVDSCCQHLEKHGLQTVGIFRVGSSKKRVRQLREEFDRGIDVSLEEEHSVHDVAALLKEFLRDMPDPLLTRELYTAFINTLLLEPEEQLGTLQLLIYLLPPCNCDTLHRLLQFLSIVARHADDNISKDGQEVTGNKMTSLNLATIFGPNLLHKQKSSDKEFSVQSSARAEESTAIIAVVQKMIENYEALFMVPPDLQNEVLISLLETDPDVVDYLLRRKASQSSTSSVLPAAVQACPQYPASMFTP

SEQ ID NO: 61762 - protein, 771 aa, Homo sapiens; identical to SEQ ID NO: 61757

SEQ ID NO: 61763 - protein, 467 aa, Homo sapiens [sequence omitted]

SEQ ID NO: 61764 - protein, 604 aa, Homo sapiens
MKRLHIFGPKIHSSGGLWQQKGDFTWNSMSGRSVRLRSVPIQSLSELERARLQEVAFYQLQQDCDLSCQITIPKDGQKRKKSLRKKLDSLGKEKNKDKEFIPQAFGMPLSQVIANDRAYKLKQDLQRDEQKDASDFVASLLPFGNKRQNKELSSSNSSLSSTSETPNESTSPNTPEPAPRARRRGAMSVDSITDLDDNQSRLLEALQLSLPAEAQSKKEKARDKKLSLNPIYRQVPRLVDSCCQHLEKHGLQTVGIFRVGSSKKRVRQLREEFDRGIDVSLEEEHSVHDVAALLKEFLRDMPDPLLTRELYTAFINTLLLEPEEQLGTLQLLIYLLPPCNCDTLHRLLQFLSIVARHADDNISKDGQEVTGNKMTSLNLATIFGPNLLHKQKSSDKEFSVQSSARAEESTAIIAVVQKMIENYEALFMVPPDLQNEVLISLLETDPDVVDYLLRRKASQSSSPDMLQSEVSFSVGGRHSSTDSNKASSGDISPYDNNSPVLSERSLLAMQEDAAPGGSEKLYRVPGQFMLVGHLSSSKSRESSPGPRLGKDLSEEPFDIWGTWHSTLKSGSKDPGMTGTTPLLNISSQEDHRQKDLRLIFKIYP

SEQ ID NO: 61765 - protein, 305 aa, Homo sapiens
MAGQDPALSTSHPFYDVARHGILQVAGDDRFGRRVVTFSCCRMPPSHELDHQRLLEYLKYTLDQYVENDYTIVYFHYGLNSRNKPSLGWLQSAYKEFDRKYKKNLKALYVVHPTSFIKVLWNILKPLISHKFGKKVIYFNYLSELHEHLKYDQLVIPPEVLRYDEKLQSLHEGRTPPPTKTPPPRPPLPTQQFGVSLQYLKDKNQGELIPPVLRFTVTYLREKGLRTEGLFRRSASVQTVREIQRLYNQGKPVNFDDYGDIHIPAVILKTFLRELPQPLLTFQAYEQILGITCVPGEHLQQNEQL

SEQ ID NO: 61766 - protein, 433 aa, Homo sapiens
MAGQDPALSTSHPFYDVARHGILQVAGDDRFGRRVVTFSCCRMPPSHELDHQRLLEYLKYTLDQYVENDYTIVYFHYGLNSRNKPSLGWLQSAYKEFDRKYKKNLKALYVVHPTSFIKVLWNILKPLISHKFGKKVIYFNYLSELHEHLKYDQLVIPPEVLRYDEKLQSLHEGRTPPPTKTPPPRPPLPTQQFGVSLQYLKDKNQGELIPPVLRFTVTYLREKGLRTEGLFRRSASVQTVREIQRLYNQGKPVNFDDYGDIHIPAVILKTFLRELPQPLLTFQAYEQILGITCVESSLRVTGCRQILRSLPEHNYVVLRYLMGFLHAVSRESIFNKMNSSNLACVFGLNLIWPSQGVSSLSALVPLNMFTELLIEYYEKIFSTPEAPGEHGLAPWEQGSRAAPLQEAVPRTQATGLTKPTLPPSPLMAARRRL

SEQ ID NO: 61767 - protein, 555 aa, Homo sapiens
MSSPSLSDLGKREPAAAADERGTQQRRACANATWNSIHNGVIAVFQRKGLPDQELFSLNEGVRQLLKTELGSFFTEYLQNQLLTKGMVILRDKIRFYEELQRDKAAAAAVLGAVRKRPSVVPMAGQDPALSTSHPFYDVARHGILQVAGDDRFGRRVVTFSCCRMPPSHELDHQRLLEYLKYTLDQYVENDYTIVYFHYGLNSRNKPSLGWLQSAYKEFDRKYKKNLKALYVVHPTSFIKVLWNILKPLISHKFGKKVIYFNYLSELHEHLKYDQLVIPPEVLRYDEKLQSLHEGRTPPPTKTPPPRPPLPTQQFGVSLQYLKDKNQGELIPPVLRFTVTYLREKGLRTEGLFRRSASVQTVREIQRLYNQGKPVNFDDYGDIHIPAVILKTFLRELPQPLLTFQAYEQILGITCVESSLRVTGCRQILRSLPEHNYVVLRYLMGFLHAVSRESIFNKMNSSNLACVFGLNLIWPSQGVSSLSALVPLNMFTELLIEYYEKIFSTPEAPGEHGLAPWEQGSRAAPLQEAVPRTQATGLTKPTLPPSPLMAARRRL

SEQ ID NO: 61768 - protein, 464 aa, Homo sapiens
MAGQDPALSTSHPFYDVARHGILQVAGDDRFGRRVVTFSCCRMPPSHELDHQRLLEYLKYTLDQYVENDYTIVYFHYGLNSRNKPSLGWLQSAYKEFDRKDGDLTMWPRLVSNSKLKRSSHLSLPKYWDYRYKKNLKALYVVHPTSFIKVLWNILKPLISHKFGKKVIYFNYLSELHEHLKYDQLVIPPEVLRYDEKLQSLHEGRTPPPTKTPPPRPPLPTQQFGVSLQYLKDKNQGELIPPVLRFTVTYLREKGLRTEGLFRRSASVQTVREIQRLYNQGKPVNFDDYGDIHIPAVILKTFLRELPQPLLTFQAYEQILGITCVESSLRVTGCRQILRSLPEHNYVVLRYLMGFLHAVSRESIFNKMNSSNLACVFGLNLIWPSQGVSSLSALVPLNMFTELLIEYYEKIFSTPEAPGEHGLAPWEQGSRAAPLQEAVPRTQATGLTKPTLPPSPLMAARRRL

SEQ ID NO: 61769 - protein, 130 aa, Homo sapiens
MAGQDPALSTSHPFYDVARHGILQVAGDDRFGRRVVTFSCCRMPPSHELDHQRLLEYLKYTLDQYVENDYTIVYFHYGLNSRNKPSLGWLQSAYKEFDRKDGDLTMWPRLVSNSKLKRSSHLSLPKYWDY

SEQ ID NO: 61770 - protein, 115 aa, Homo sapiens
MAGQDPALSTSHPFYDVARHGILQVAGDDRFGRRVVTFSCCRMPPSHELDHQRLLEYLKYTLDQYVENDYTIVYFHYGLNSRNKPSLGWLQSAYKEFDRKYKKNLKALYVVHPTS

SEQ ID NO: 61771 - protein, 643 aa, Homo sapiens
MRTLRRLKFMSSPSLSDLGKREPAAAADERGTQQRRACANATWNSIHNGVIAVFQRKGLPDQELFSLNEGVRQLLKTELGSFFTEYLQNQLLTKGMVILRDKIRFYEGQKLLDSLAETWDFFFSDVLPMLQAIFYPVQGKEPSVRQLALLHFRNAITLSVKLEDALARAHARVPPAIVQMLLVLQGVHESRGVTEDYLRLETLVQKVVSPYLGTYGLHSSEGPFTHSCILELQRDKAAAAAVLGAVRKRPSVVPMAGQDPALSTSHPFYDVARHGILQVAGDDRFGRRVVTFSCCRMPPSHELDHQRLLEYKKNLKALYVVHPTSFIKVLWNILKPLISHKFGKKVIYFNYLSELHEHLKYDQLVIPPEVLRYDEKLQSLHEGRTPPPTKTPPPRPPLPTQQFGVSLQYLKDKNQGELIPPVLRFTVTYLREKGLRTEGLFRRSASVQTVREIQRLYNQGKPVNFDDYGDIHIPAVILKTFLRELPQPLLTFQAYEQILGITCVESSLRVTGCRQILRSLPEHNYVVLRYLMGFLHAVSRESIFNKMNSSNLACVFGLNLIWPSQGVSSLSALVPLNMFTELLIEYYEKIFSTPEAPGEHGLAPWEQGSRAAPLQEAVPRTQATGLTKPTLPPSPLMAARRRL

SEQ ID NO: 61772 - protein, 773 aa, Homo sapiens
QTQTESLTLCSGEAERRGKEEWPDSHHYPGPTPAPESSDGPHKVTVLATMLSSRWWPSSWGILGLGPRSPPRGSQLCALYAFTYTGADGQQVSLAEGDRFLLLRKTNSDWWLARRLEAPSTSRPIFVPAAYMIEESIPSQSPTTVIPGQLLWTPGPKLFHGSLEELSQALPSRAQASSEQPPPLPRKMCRSVSTDNLSPSLLKPFQEGPSGRSLSQEDLPSEASASTAGPQPLMSEPPVYCNLVDLRRCPRSPPPGPACPLLQRLDAWEQHLDPNSGRCFYINSLTGCKSWKPPRRSRSETNPGSMEGTQTLKRNNDVLQPQAKGFRSDTGTPEPLDPQGSLSLSQRTSQLDPPALQAPRPLPQLLDDPHEVEKSGLLNMTKIAQGGRKLRKNWGPSWVVLTGNSLVFYREPPPTAPSSGWGPAGSRPESSVDLRGAALAHGRHLSSRRNVLHIRTIPGHEFLLQSDHETELRAWHRALRTVIERLDRENPLELRLSGSGPAELSAGEDEEEESELVSKPLLRLSSRRSSIRGPEGTEQNRVRNKLKRLIAKRPPLQSLQERGLLRDQVFGCQLESLCQREGDTVPSFLRLCIAAVDKRGLDVDGIYRVSGNLAVVQKLRFLVDRERAVTSDGRYVFPEQPGQEGRLDLDSTEWDDIHVVTGALKLFLRELPQPLVPPLLLPHFRAALALSQIQELIGSMPKPNHDTLRYLLEHLCRVIAHSDKNRMTPHNLGIVFGPTLFRPEQETSDPAAHALYPGQLVQLMLTNFTSLFP

SEQ ID NO: 61773 - protein, 750 aa, Homo sapiens
MLSSRWWPSSWGILGLGPRSPPRGSQLCALYAFTYTGADGQQVSLAEGDRFLLLRKTNSDWWLARRLEAPSTSRPIFVPAAYMIEESIPSQSPTTVIPGQLLWTPGPKLFHGSLEELSQALPSRAQASSEQPPPLPRKMCRSVSTDNLSPSLLKPFQEGPSGRSLSQEDLPSEASASTAGPQPLMSEPPVYCNLVDLRRCPRSPPPGPACPLLQRLDAWEQHLDPNSGRCFYINSLTGCKSWKPPRRSRSETNPGSMEGTQTLKRNNDVLQPQAKGFRSDTGTPEPLDPQGSLSLSQRTSQLDPPALQAPRPLPQLLDDPHEVEKSGLLNMTKIAQGGRKLRKNWGPSWVVLTGNSLVFYREPPPTAPSSGWGPAGSRPESSVDLRGAALAHGRHLSSRRNVLHIRTIPGHEFLLQSDHETELRAWHRALRTVIERLVRWVEARREAPTGRDQGSGDRENPLELRLSGSGPAELSAGEDEEEESELVSKPLLRLSSRRSSIRGPEGTEQNRVRNKLKRLIAKRPPLQSLQERGLLRDQVFGCQLESLCQREGDTVPSFLRLCIAAVDKRGLDVDGIYRVSGNLAVVQKLRFLVDRERAVTSDGRYVFPEQPGQEGRLDLDSTEWDDIHVVTGALKLFLRELPQPLVPPLLLPHFRAALALSESEQCLSQIQELIGSMPKPNHDTLRYLLEHLCRVIAHSDKNRMTPHNLGIVFGPTLFRPEQETSDPAAHALYPGQLVQLMLTNFTSLFP

SEQ ID NO: 61774 - protein, 731 aa, Homo sapiens
MLSSRWWPSSWGILGLGPRSPPRGSQLCALYAFTYTGADGQQVSLAEGDRFLLLRKTNSDWWLARRLEAPSTSRPIFVPAAYMIEESIPSQSPTTVIPGQLLWTPGPKLFHGSLEELSQALPSRAQASSEQPPPLPRKMCRSVSTDNLSPSLLKPFQEGPSGRSLSQEDLPSEASASTAGPQPLMSEPPVYCNLVDLRRCPRSPPPGPACPLLQRLDAWEQHLDPNSGRCFYINSLTGCKSWKPPRRSRSETNPGSMEGTQTLKRNNDVLQPQAKGFRSDTGTPEPLDPQGSLSLSQRTSQLDPPALQAPRPLPQLLDDPHEVEKSGLLNMTKIAQGGRKLRKNWGPSWVVLTGNSLVFYREPPPTAPSSGWGPAGSRPESSVDLRGAALAHGRHLSSRRNVLHIRTIPGHEFLLQSDHETELRAWHRALRTVIERLDRENPLELRLSGSGPAELSAGEDEEEESELVSKPLLRLSSRRSSIRGPEGTEQNRVRNKLKRLIAKRPPLQSLQERGLLRDQVFGCQLESLCQREGDTVPSFLRLCIAAVDKRGLDVDGIYRVSGNLAVVQKLRFLVDRERAVTSDGRYVFPEQPGQEGRLDLDSTEWDDIHVVTGALKLFLRELPQPLVPPLLLPHFRAALALSESEQCLSQIQELIGSMPKPNHDTLRYLLEHLCRVIAHSDKNRMTPHNLGIVFGPTLFRPEQETSDPAAHALYPGQLVQLMLTNFTSLFP

SEQ ID NO: 61775 - protein, 821 aa, Homo sapiens
MRRGSSDSCASGSQVAGTTVAGPAHPESLTLCSGEAERRGKEEWPDSHHYPGPTPAPESSDGPHKVTVLATMLSSRWWPSSWGILGLGPRSPPRGSQLCALYAFTYTGADGQQVSLAEGDRFLLLRKTNSDWWLARRLEAPSTSRPIFVPAAYMIEESIPSQSPTTVIPGQLLWTPGPKLFHGSLEELSQALPSRAQASSEQPPPLPRKMCRSVSTDNLSPSLLKPFQEGPSGRSLSQEDLPSEASASTAGPQPLMSEPPVYCNLVDLRRCPRSPPPGPACPLLQRLDAWEQHLDPNSGRCFYINSLTGCKSWKPPRRSRSETNPGSMEGTQTLKRNNDVLQPQAKGFRSDTGTPEPLDPQGSLSLSQRTSQLDPPALQAPRPLPQLLDDPHEVEKSGLLNMTKIAQGGRKLRKNWGPSWVVLTGNSLVFYREPPPTAPSSGWGPAGSRPESSVDLRGAALAHGRHLSSRRNVLHIRTIPGHEFLLQSDHETELRAWHRALRTVIERLVRWVEARREAPTGRDQGSGDRENPLELRLSGSGPAELSAGEDEEEESELVSKPLLRLSSRRSSIRGPEGTEQNRVRNKLKRLIAKRPPLQSLQERGLLRDQVFGCQLESLCQREGDTVPSFLRLCIAAVDKRGLDVDGIYRVSGNLAVVQKLRFLVDRERAVTSDGRYVFPEQPGQEGRLDLDSTEWDDIHVVTGALKLFLRELPQPLVPPLLLPHFRAALALSESEQCLSQIQELIGSMPKPNHDTLRYLLEHLCRVIAHSDKNRMTPHNLGIVFGPTLFRPEQETSDPAAHALYPGQLVQLMLTNFTSLFP

SEQ ID NO: 61776 - protein, 299 aa, Homo sapiens
MTKIAQGGRKLRKNWGPSWVVLTGNSLVFYREPPPTAPSSGWGPAGSRPESSVDLRGAALAHGRHLSSRRNVLHIRTIPGHEFLLQSDHETELRAWHRALRTVIERLDRENPLELRLSGSGPAELSAGEDEEEESELVSKPLLRLSSRRSSIRGPEGTEQNRVRNKLKRLIAKRPPLQSLQERGLLRDQVFGCQLESLCQREGDTVPSFLRLCIAAVDKRGLDVDGIYRVSGNLAVVQKLRFLVDRERAVTSDGRYVFPEQPGQALSESEQCLSQIQELIGSMPKPNHDTLRYLLEHLC

SEQ ID NO: 61777 - protein, 640 aa, Homo sapiens
MLSSRWWPSSWGILGLGPRSPPRGSQLCALYAFTYTGADGQQVSLAEGDRFLLLRKTNSDWWLARRLEAPSTSRPIFVPAAYMIEESIPSQSPTTVIPGQLLWTPGPKLFHGSLEELSQALPSRAQASSEQPPPLPRKMCRSVSTDNLSPSLLKPFQEGPSGRSLSQEDLPSEASASTAGPQPLMSEPPVYCNLVDLRRCPRSPPPGPACPLLQRLDAWEQHLDPNSGRCFYINSLTGCKSWKPPRRSRSETNPGSMEGTQTLKRNNDVLQPQAKGFRSDTGTPEPLDPQGSLSLSQRTSQLDPPALQAPRPLPQLLDDPHEVEKSGLLNMTKIAQGGRKLRKNWGPSWVVLTGNSLVFYREPPPTAPSSGWGPAGSRPESSVDLRGAALAHGRHLSSRRNVLHIRTIPGHEFLLQSDHETELRAWHRALRTVIERLDRENPLELRLSGSGPAELSAGEDEEEESELVSKPLLRLSSRRSSIRGPEGTEQNRVRNKLKRLIAKRPPLQSLQERGLLRDQVFGCQLESLCQREGDTVPSFLRLCIAAVDKRGLDVDGIYRVSGNLAVVQKLRFLVDRERAVTSDGRYVFPEQPGQEGRLDLDSTEWDDIHVVTGALKLFLRELPQPLVPPLLLPHFRAALG

SEQ ID NO: 61778 - protein, 547 aa, Homo sapiens
MSEPPVYCNLVDLRRCPRSPPPGPACPLLQRLDAWEQHLDPNSGRCFYINSLTGCKSWKPPRRSRSETNPGSMEGTQTLKRNNDVLQPQAKGFRSDTGTPEPLDPQGSLSLSQRTSQLDPPALQAPRPLPQLLDDPHEVEKSGLLNMTKIAQGGRKLRKNWGPSWVVLTGNSLVFYREPPPTAPSSGWGPAGSRPESSVDLRGAALAHGRHLSSRRNVLHIRTIPGHEFLLQSDHETELRAWHRALRTVIERLDRENPLELRLSGSGPAELSAGEDEEEESELVSKPLLRLSSRRSSIRGPEGTEQNRVRNKLKRLIAKRPPLQSLQERGLLRDQVFGCQLESLCQREGDTVPSFLRLCIAAVDKRGLDVDGIYRVSGNLAVVQKLRFLVDRERAVTSDGRYVFPEQPGQEGRLDLDSTEWDDIHVVTGALKLFLRELPQPLVPPLLLPHFRAALALSESEQCLSQIQELIGSMPKPNHDTLRYLLEHLCRVIAHSDKNRMTPHNLGIVFGPTLFRPEQETSDPAAHALYPGQLVQLMLTNFTSLFP

SEQ ID NO: 61779 - protein, 297 aa, Homo sapiens
MSEPPVYCNLVDLRRCPRSPPPGPACPLLQRLDAWEQHLDPNSGRCFYINSLTGCKSWKPPRRSRSETNPGSMEGTQTLKRNNDVLQPQAKGFRSDTGTPEPLDPQGSLSLSQRTSQLDPPALQAPRPLPQLLDDPHEVEKSGLLNMTKIAQGGRKLRKNWGPSWVVLTGNSLVFYREPPPTAPSSGWGPAGSRPESSVDLRGAALAHGRHLSSRRNVLHIRTIPGHEFLLQSDHETELRAWHRALRTVIERLDRENPLELRLSGSGPAELSAGEDEEEESELVSKPLLRLSSRRSS

SEQ ID NO: 61780 - protein, 61 aa, Homo sapiens
MSEPPVYCNLVDLRRCPRSPPPGPACPLLQRLDAWEQHLDPNSGRCFYINSLTGCKSWKPP

SEQ ID NO: 61781 - protein, 156 aa, Homo sapiens
  VARIANT 1: note = MOD_RES - Any amino acid
XEGDTVPSFLRLCIAAVDKRGLDVDGIYRVSGNLAVVQKLRFLVDRERAVTSDGRYVFPEQPGQALSESEQCLSQIQELIGSMPKPNHDTLRYLLEHLCRVIAHSDKNRMTPHNLGIVFGPTLFRPEQETSDPAAHALYPGQLVQLMLTNFTSLFP

SEQ ID NO: 61782 - protein, 131 aa, Homo sapiens
MSEPPVYCNLVDLRRCPRSPPPGPACPLLQRLDAWEQHLDPNSGRCFYINSLTGCKSWKPPRRSRSETNPGSMEGTQTLKRNNDVLQPQAKGFRSDTGTPEPLDPQGSLSLSQRTSQLDPPALQAPRPLPQ

SEQ ID NO: 61783 - protein, 675 aa, Homo sapiens
EPGSGSRDPGPGIAEPDLGRPAGHLRADTSPAEPREMEDFARGAASPGPSRPGLVPVSIIGAEDEDFENELETNSEEQNSQFQSLEQVKRRPAHLMALLQHVALQFEPGPLLCCLHADMLGSLGPKEAKKAFLDFYHSFLEKTAVLRVPVPPNVAFELDRTRADLISEDVQRRFVQEVVQSQQVAVGRQLEDFRSKRLMGMTPWEQELAQLEAWVGRDRASYEARERHVAERLLMHLEEMQHTISTDEEKSAAVVNAIGLYMRHLGVRTKSGDKKSGRNFFRKKVMGNRRSDEPAKTKKGLSSILDAARWNRGEPQVPDFRHLKAEVDAEKPGATDRKGGVGMPSRDRNIGAPGQDTPGVSLHPLSLDSPDREPGADAPLELGDSSPQGPMSLESLAPPESTDEGAETERCPGWGAGAGGVAYWALVGGCRVTAAICACLSQALAPHAPLLLSGSGHSSPFFFPFLISLLLPHCPPFLLSFLFPLLLPLLPFFTNPSPPPFLSTTPSISFISSPLLSHLPPPLFPPHSSLTWVFFPHLPSPSDLPATFHFFSPSPFSFKPPCPLPPTPRLAPASWCPSLNPPPLCSVPWGPCPPYSWGAGSASCPSLCRCFGDPLVGAGRWVRFHLGPPLTLCPSLPRRWKRWVPGPWVGEGLAPPPFLPAPPLSPWPLPPLHSL

SEQ ID NO: 61784 - protein, 927 aa, Homo sapiens
MASLSTWSSPAEPREMEDFARGAASPGPSRPGLVPVSIIGAEDEDFENELETNSEEQNSQFQSLEQVKRRPAHLMALLQHVALQFEPGPLLCCLHADMLGSLGPKEAKKAFLDFYHSFLEKTAVLRVPVPPNVAFELDRTRADLISEDVQRRFVQEVVQSQQVAVGRQLEDFRSKRLMGMTPWEQELAQLEAWVGRDRASYEARERHVAERLLMHLEEMQHTISTDEEKSAAVVNAIGLYMRHLGVRTKSGDKKSGRNFFRKKVMGNRRSDEPAKTKKGLSSILDAARWNRGEPQVPDFRHLKAEVDAEKPGATDRKGGVGMPSRDRNIGAPGQDTPGVSLHPLSLDSPDREPGADAPLELGDSSPQGPMSLESLAPPESTDEGAETESPEPGDEGEPGRSGLELEPEEPPGWRELVPPDTLHSLPKSQVKRQEVISELLVTEAAHVRMLRVLHDLFFQPMAECLFFPLEELQNIFPSLDELIEVHSLFLDRLMKRRQESGYLIEEIGDVLLARFDGAEGSWFQKISSRFCSRQSFALEQLKAKQRKDPRFCAFVQEAESRPRCRRLQLKDMIPTEMQRLTKYPLLLQSIGQNTEEPTEREKVELAAECCREILHHVNQAVRDMEDLLRLKDYQRRLDLSHLRQSSDPMLSEFKNLDITKKKLVHEGPLTWRVTKDKAVEVHVLLLDDLLLLLQRQDERLLLKSHSRTLTPTPDGKTMLRPVLRLTSAMTREVATDHKAFYVLFTWDQEAQIYELVAQTVSERKNWCALITETAGSLKVPAPASRPKPRPSPSSTREPLLSSSENGNGGRETSPADARTERILSDLLPFCRPGPEGQLAATALRKVLSLKQLLFPAEEDNGAGPPRDGDGVPGGGPLSPARTQEIQENLLSLEETMKQLEELEEEFCRLRPLLSQLGGNSVPQPGCT

SEQ ID NO: 61785 - protein, 879 aa, Homo sapiens
MEDFARGAASPGPSRPGLVPVSIIGAEDEDFENELETNSEEQNSQFQSLEQVKRRPAHLMALLQHVALQFEPGPLVLRVPVPPNVAFELDRTRADLISEDVQRRFVQEVVQSQQVAVGRQLEDFRSKRLMGMTPWEQELAQLEAWVGRDRASYEARERHVAERLLMHLEEMQHTISTDEEKSAAVVNAIGLYMRHLGVRTKSGDKKSGRNFFRKKVMGNRRSDEPAKTKKGLSSILDAARWNRGEPQVPDFRHLKAEVDAEKPGATDRKGGVGMPSRDRNIGAPGQDTPGVSLHPLSLDSPDREPGADAPLELGDSSPQGPMSLESLAPPESTDEGAETESPEPGDEGEPGRSGLELEPEEPPGWRELVPPDTLHSLPKSQVKRQEVISELLVTEAAHVRMLRVLHDLFFQPMAECLFFPLEELQNIFPSLDELIEVHSLFLDRLMKRRQESGYLIEEIGDVLLARFDGAEGSWFQKISSRFCSRQSFALEQLKAKQRKDPRFCAFVQEAESRPRCRRLQLKDMIPTEMQRLTKYPLLLQSIGQNTEEPTEREKVELAAECCREILHHVNQAVRDMEDLLRLKDYQRRLDLSHLRQSSDPMLSEFKNLDITKKKLVHEGPLTWRVTKDKAVEVHVLLLDDLLLLLQRQDERLLLKSHSRTLTPTPDGKTMLRPVLRLTSAMTREVATDHKAFYVLFTWDQEAQIYELVAQTVSERKNWCALITETAGSLKVPAPASRPKPRPSPSSTREPLLSSSENGNGGRETSPADARTERILSDLLPFCRPGPEGQLAATALRKVLSLKQLLFPAEEDNGAGPPRDGDGVPGGGPLSPARTQEIQENLLSLEETMKQLEELEEEFCRLRPLLSQLGGNSVPQPGCT

SEQ ID NO: 61786 - protein, 912 aa, Homo sapiens
MEDFARGAASPGPSRPGLVPVSIIGAEDEDFENELETNSEEQNSQFQSLEQVKRRPAHLMALLQHVALQFEPGPLLCCLHADMLGSLGPKEAKKAFLDFYHSFLEKTAVLRVPVPPNVAFELDRTRADLISEDVQRRFVQEVVQSQQVAVGRQLEDFRSKRLMGMTPWEQELAQLEAWVGRDRASYEARERHVAERLLMHLEEMQHTISTDEEKSAAVVNAIGLYMRHLGVRTKSGDKKSGRNFFRKKVMGNRRSDEPAKTKKGLSSILDAARWNRGEPQVPDFRHLKAEVDAEKPGATDRKGGVGMPSRDRNIGAPGQDTPGVSLHPLSLDSPDREPGADAPLELGDSSPQGPMSLESLAPPESTDEGAETESPEPGDEGEPGRSGLELEPEEPPGWRELVPPDTLHSLPKSQVKRQEVISELLVTEAAHVRMLRVLHDLFFQPMAECLFFPLEELQNIFPSLDELIEVHSLFLDRLMKRRQESGYLIEEIGDVLLARFDGAEGSWFQKISSRFCSRQSFALEQLKAKQRKDPRFCAFVQEAESRPRCRRLQLKDMIPTEMQRLTKYPLLLQSIGQNTEEPTEREKVELAAECCREILHHVNQAVRDMEDLLRLKDYQRRLDLSHLRQSSDPMLSEFKNLDITKKKLVHEGPLTWRVTKDKAVEVHVLLLDDLLLLLQRQDERLLLKSHSRTLTPTPDGKTMLRPVLRLTSAMTREVATDHKAFYVLFTWDQEAQIYELVAQTVSERKNWCALITETAGSLKVPAPASRPKPRPSPSSTREPLLSSSENGNGGRETSPADARTERILSDLLPFCRPGPEGQLAATALRKVLSLKQLLFPAEEDNGAGPPRDGDGVPGGGPLSPARTQEIQENLLSLEETMKQLEELEEEFCRLRPLLSQLGGNSVPQPGCT

SEQ ID NO: 61787 - protein, 948 aa, Homo sapiens
MASLSTWSSPAEPREMEDFARGAASPGPSRPGLVPVSIIGAEDEDFENELETNSEEQNSQFQSLEQVKRRPAHLMALLQHVALQFEPGPLVLRVPVPPNVAFELDRTRADLISEDVQRRFVQEVVQSQQVAVGRQLEDFRSKRLMGMTPWEQELAQLEAWVGRDRASYEARERHVAERLLMHLEEMQHTISTDEEKSAAVVNAIGLYMRHLGVRTKSGDKKSGRNFFRKKVMGNRRSDEPAKTKKGLSSILDAARWNRGEPQVPDFRHLKAEVDAEKPGATDRKGGVGMPSRDRNIGAPGQDTPGVSLHPLSLDSPDREPGADAPLELGDSSPQGPMSLESLAPPESTDEGAETESPEPGDEGEPGRSGLELEPEEPPGWRELVPPDTLHSLPKSQVKRQEVISELLVTEAAHVRMLRVLHDLFFQPMAECLFFPLEELQNIFPSLDELIEVHSLFLDRLMKRRQESGYLIEEIGDVLLARFDGAEGSWFQKISSRFCSRQSFALEQLKAKQRKDPRFCAFVQEAESRPRCRRLQLKDMIPTEMQRLTKYPLLLQSIGQNTEEPTEREKVELAAECCREILHHVNQAVRDMEDLLRLKDYQRRLDLSHLRQSSDPMLSEFKNLDITKKKLVHEGPLTWRVTKDKAVEVHVLLLDDLLLLLQRQDERLLLKSHSRTLTPTPDGKTMLRPVLRLTSAMTREVATDHKAFYVLFTWDQEAQIYELVAQTVSERKNWCALITETAGSLKVPAPASRPKPRPSPSSTREPLLSSSENGNGGRETSPADARTERILSDLLPFCRPGPEGQLAATALRKGVGGGILPPETPPVSAWGELCPPAWLHLRFPPRKAFCKKERNGGEDVRDHPHPHSCRSISHPEGLRRGSCGPRLGGAQLGLLAPHEPRPSLPPALCLGDSGLHSGGHHGDPGHLSIACGGHPSTPTPKCLRSVFIP

SEQ ID NO: 61788 - protein, 1340 aa, Homo sapiens
MRPPGFLSRAPSLNRAERGIWSCSMDQREPLPPAPAENEMKYDTNNNEEEEGEQFDFDSGDEIPEADRQAPSAPETGGAGASEAPAPTGGEDGAGAETTPVAEPTKLVLPMKVNPYSVIDITPFQEDQPPTPVPSAEEENVGLHVPCGYLVPVPCGYAVPSNLPLLLPAYSSPVIICATSLDEEAETPEVTEDRQPNSLSSEEPPTSEDQVGREDSALARWAADPANTAWMENPEEAIYDDVPRENSDSEPDEMIYDDVENGDEGGNSSLEYGWSSSEFESYEEQSDSECKNGIPRSFLRSNHKKQLSHDLTRLKEHYEKKMRDLMASTVGVVEIQQLRQKHELKMQKLVKAAKDGTKDGLERTRAAVKRGRSFIRTKSLIAQDHRSSLEEEQNLFIDVDCKHPEAILTPMPEGLSQQQVVRRYILGSVVDSEKNYVDALKRILEQYEKPLSEMEPKVLSERKLKTVFYRVKEILQCHSLFQIALASRVSEWDSVEMIGDVFVASFSKSMVLDAYSEYVNNFSTAVAVLKKTCATKPAFLEFLKQEQEASPDRTTLYSLMMKPIQRFPQFILLLQDMLKNTSKGHPDRLPLQMALTELETLAEKLNERKRDADQRCEVKQIAKAINERYLNKLLSSGSRYLIRSDDMIETVYNDRGEIVKTKERRVFMLNDVLMCATVSSRPSHDSRVMSSQRYLLKWSVPLGHVDAIEYGSSAGTGEHSRHLAVHPPESLAVVANAKPNKVYMGPGQLYQDLQNLLHDLNVIGQITQLIGNLKGNYQNLNQSVAHDWTSGLQRLILKKEDEIRAADCCRIQLQLPGKQDKSGRPTFFTAVFNTFTPAIKESWVNSLQMAKLALEEENHMGWFCVEDDGNHIKKEKHPLLVGHMPVMVAKQQEFKIGSCTHQMGQIAIVSFQNSTPKVIECFNVESRILCMLYVPVEEKRREPGAPPDPETPAVRASDVPTICVGTEEGSISIYKSSQGSKKVRLQHFFTPEKSTVMSLACTSQSLYAGLVNGAVASYARAPDGSWDSEPQKVIKLGVLPVRSLLMMEDTLWAASGGQVFIISVETHAVEGQLEAHQEEGMVISHMAVSGVGIWIAFTSGSTLRLFHTETLKHLQDINIATPVHNMLPGHQRLSVTSLLVCHGLLMVGTSLGVLVALPVPRLQGIPKVTGRGMVSYHAHNSPVKFIVLATALHEKDKDKSRDSLAPGPEPQDEDQKDALPSGGAGSSLSQGDPDAAIWLGDSLGSMTQKSDLSSSSGSLSLSHGSSSLEHRSEDSTIYDLLKDPVSLRSKARRAKKAKASSALVVCGGQGHRRVHRKARQPHQEELAPTVMVWQIPLLNI

SEQ ID NO: 61789 - protein, 1344 aa, Homo sapiens
MDQREPLPPAPAENEMKYDTNNNEEEEGEQFDFDSGDEIPEADRQAPSAPETGGAGASEAPAPTGGEDGAGAETTPVAEPTKLVLPMKVNPYSVIDITPFQEDQPPTPVPSAEEENVGLHVPCGYLVPVPCGYAVPSNLPLLLPAYSSPVIICATSLDEEETPEVTEDRQPNSLSSEEPPTSEDQVGREDSALARWAADPANTAWMENPEEAIYDDVPRENSDSEPDEMIYDDVENGDEGGNSSLEYGWSSSEFESYEEQSDSECKNGIPRSFLRSNHKKQLSHDLTRLKEHYEKKMRDLMASTVGVVEIQQLRQKHELKMQKLVKAAKDGTKDGLERTRAAVKRGRSFIRTKSLIAQDHRSSLEEEQNLFIDVDCKHPEAILTPMPEGLSQQQVVRRYILGSVVDSEKNYVDALKRILEQYEKPLSEMEPKVLSERKLKTVFYRVKEILQCHSLFQIALASRVSEWDSVEMIGDVFVASFSKSMVLDAYSEYVNNFSTAVAVLKKTCATKPAFLEFLKQEQEASPDRTTLYSLMMKPIQRFPQFILLLQDMLKNTSKGHPDRLPLQMALTELETLAEKLNERKRDADQRCEVKQIAKAINERYLNKLLSSGSRYLIRSDDMIETVYNDRGEIVKTKERRVFMLNDVLMCATVSSRPSHDSRVMSSQRYLLKWSVPLGHVDAIEYGSSAGTGEHSRHLAVHPPESLAVVANAKPNKVYMGPGQLYQDLQNLLHDLNVIGQITQLIGNLKGNYQNLNQSVAHDWTSGLQRLILKKEDEIRAADCCRIQLQLPGKQDKSGRPTFFTAVFNTFTPAIKESWVNSLQMAKLALEEENHMGWFCVEDDGNHIKKEKHPLLVGHMPVMVAKQQEFKIECAAYNPEPYLNNESQPDSFSTAHGFLWIGSCTHQMGQIAIVSFQNSTPKVIECFNVESRILCMLYVPVEEKRREPGAPPDPETPAVRASDVPTICVGTEEGSISIYKSSQGSKKVRLQHFFTPEKSTVMSLACTSQSLYAGLVNGAVASYARAPDGSWDSEPQKVIKLGVLPVRSLLMMEDTLWAASGGQVFIISVETHAVEGQLEAHQEEGMVISHMAVSGVGIWIAFTSGSTLRLFHTETLKHLQDINIATPVHNMLPGHQRLSVTSLLVCHGLLMVGTSLGVLVALPVPRLQGIPKVTGRGMVSYHAHNSPVKFIVLATALHEKDKDKSRDSLAPGPEPQDEDQKDALPSGGAGSSLSQGDPDAAIWLGDSLGSMTQKSDLSSSSGSLSLSHGSSSLEHRSEDSTIYDLLKDPVSLRSKARRAKKAKASSALVVCGGQGHRRVHRKARQPHQEELAPTVMVWQIPLLNI

SEQ ID NO: 61790 - protein, 610 aa, Homo sapiens
MRPPGFLSRAPSLNRAERGIWSCSMDQREPLPPAPAENEMKYDTNNNEEEEGEQFDFDSGDEIPEADRQAPSAPETGGAGASEAPAPTGGEDGAGAETTPVAEPTKLVLPMKVNPYSVIDITPFQEDQPPTPVPSAEEENVGLHVPCGYLVPVPCGYAVPSNLPLLLPAYSSPVIICATSLDEEAETPEVTEDRQPNSLSSEEPPTSEDQVGREDSALARWAADPANTAWMENPEEAIYDDVPRENSDSEPDEMIYDDVENGDEGGNSSLEYGWSSSEFESYEEQSDSECKNGIPRSFLRSNHKKQMQKLVKAAKDGTKDGLERTRAAVKRGRSFIRTKSLIAQDHRSSLEEEQNLFIDVDCKHPEAILTPMPEGLSQQQVVRRYILGSVVDSEKNYVDALKRILEQYEKPLSEMEPKVLSERKLKTVFYRVKEILQCHSLFQIALASRVSEWDSVEMIGDVFVASFSKSMVLDAYSEYVNNFSTAVAVLKKTCATKPAFLEFLKQEQEASPDRTTLYSLMMKPIQRFPQFILLLQDMLKNTSKGHPDRLPLQMALTELETLAEKLNERKRDADQRCEVKQIAKAINERYLNKVERGFLQLYSKIIFALC

SEQ ID NO: 61791 - protein, 1369 aa, Homo sapiens
MRPPGFLSRAPSLNRAERGIWSCSMDQREPLPPAPAENEMKYDTNNNEEEEGEQFDFDSGDEIPEADRQAPSAPETGGAGASEAPAPTGGEDGAGAETTPVAEPTKLVLPMKVNPYSVIDITPFQEDQPPTPVPSAEEENVGLHVPCGYLVPVPCGYAVPSNLPLLLPAYSSPVIICATSLDEEAETPEVTEDRQPNSLSSEEPPTSEDQVGREDSALARWAADPANTAWMENPEEAIYDDVPRENSDSEPDEMIYDDVENGDEGGNSSLEYGWSSSEFESYEEQSDSECKNGIPRSFLRSNHKKQLSHDLTRLKEHYEKKMRDLMASTVGVVEIQQLRQKHELKMQKLVKAAKDGTKDGLERTRAAVKRGRSFIRTKSLIAQDHRSSLEEEQNLFIDVDCKHPEAILTPMPEGLSQQQVVRRYILGSVVDSEKNYVDALKRILEQYEKPLSEMEPKVLSERKLKTVFYRVKEILQCHSLFQIALASRVSEWDSVEMIGDVFVASFSKSMVLDAYSEYVNNFSTAVAVLKKTCATKPAFLEFLKQEQEASPDRTTLYSLMMKPIQRFPQFILLLQDMLKNTSKGHPDRLPLQMALTELETLAEKLNERKRDADQRCEVKQIAKAINERYLNKLLSSGSRYLIRSDDMIETVYNDRGEIVKTKERRVFMLNDVLMCATVSSRPSHDSRVMSSQRYLLKWSVPLGHVDAIEYGSSAGTGEHSRHLAVHPPESLAVVANAKPNKVYMGPGQLYQDLQNLLHDLNVIGQITQLIGNLKGNYQNLNQSVAHDWTSGLQRLILKKEDEIRAADCCRIQLQLPGKQDKSGRPTFFTAVFNTFTPAIKESWVNSLQMAKLALEEENHMGWFCVEDDGNHIKKEKHPLLVGHMPVMVAKQQEFKIECAAYNPEPYLNNESQPDSFSTAHGFLWIGSCTHQMGQIAIVSFQNSTPKVIECFNVESRILCMLYVPVEEKRREPGAPPDPETPAVRASDVPTICVGTEEGSISIYKSSQGSKKVRLQHFFTPEKSTVMSLACTSQSLYAGLVNGAVASYARAPDGSWDSEPQKVIKLGVLPVRSLLMMEDTLWAASGGQVFIISVETHAVEGQLEAHQEEGMVISHMAVSGVGIWIAFTSGSTLRLFHTETLKHLQDINIATPVHNMLPGHQRLSVTSLLVCHGLLMVGTSLGVLVALPVPRLQGIPKVTGRGMVSYHAHNSPVKFIVLATALHEKDKDKSRDSLAPGPEPQDEDQKDALPSGGAGSSLSQGDPDAAIWLGDSLGSMTQKSDLSSSSGSLSLSHGSSSLEHRSEDSTIYDLLKDPVSLRSKARRAKKAKASSALVVCGGQGHRRVHRKARQPHQEELAPTVMVWQIPLLNI

SEQ ID NO: 61792 - protein, 1368 aa, Homo sapiens
MRPPGFLSRAPSLNRAERGIWSCSMDQREPLPPAPAENEMKYDTNNNEEEEGEQFDFDSGDEIPEADRQAPSAPETGGAGASEAPAPTGGEDGAGAETTPVAEPTKLVLPMKVNPYSVIDITPFQEDQPPTPVPSAEEENVGLHVPCGYLVPVPCGYAVPSNLPLLLPAYSSPVIICATSLDEEAETPEVTEDRQPNSLSSEEPPTSEDQVGREDSALARWAADPANTAWMENPEEAIYDDVPRENSDSEPDEMIYDDVENGDEGGNSSLEYGWSSSEFESYEEQSDSECKNGIPRSFLRSNHKKQLSHDLTRLKEHYEKKMRDLMASTVGVVEIQQLRQKHELKMQKLVKAAKDGTKDGLERTRAAVKRGRSFIRTKSLIAQDHRSSLEEEQNLFIDVDCKHPEAILTPMPEGLSQQQVVRRYILGSVVDSEKNYVDALKRILEQYEKPLSEMEPKVLSERKLKTVFYRVKEILQCHSLFQIALASRVSEWDSVEMIGDVFVASFSKSMVLDAYSEYVNNFSTAVAVLKKTCATKPAFLEFLKEQEASPDRTTLYSLMMKPIQRFPQFILLLQDMLKNTSKGHPDRLPLQMALTELETLAEKLNERKRDADQRCEVKQIAKAINERYLNKLLSSGSRYLIRSDDMIETVYNDRGEIVKTKERRVFMLNDVLMCATVSSRPSHDSRVMSSQRYLLKWSVPLGHVDAIEYGSSAGTGEHSRHLAVHPPESLAVVANAKPNKVYMGPGQLYQDLQNLLHDLNVIGQITQLIGNLKGNYQNLNQSVAHDWTSGLQRLILKKEDEIRAADCCRIQLQLPGKQDKSGRPTFFTAVFNTFTPAIKESWVNSLQMAKLALEEENHMGWFCVEDDGNHIKKEKHPLLVGHMPVMVAKQQEFKIECAAYNPEPYLNNESQPDSFSTAHGFLWIGSCTHQMGQIAIVSFQNSTPKVIECFNVESRILCMLYVPVEEKRREPGAPPDPETPAVRASDVPTICVGTEEGSISIYKSSQGSKKVRLQHFFTPEKSTVMSLACTSQSLYAGLVNGAVASYARAPDGSWDSEPQKVIKLGVLPVRSLLMMEDTLWAASGGQVFIISVETHAVEGQLEAHQEEGMVISHMAVSGVGIWIAFTSGSTLRLFHTETLKHLQDINIATPVHNMLPGHQRLSVTSLLVCHGLLMVGTSLGVLVALPVPRLQGIPKVTGRGMVSYHAHNSPVKFIVLATALHEKDKDKSRDSLAPGPEPQDEDQKDALPSGGAGSSLSQGDPDAAIWLGDSLGSMTQKSDLSSSSGSLSLSHGSSSLEHRSEDSTIYDLLKDPVSLRSKARRAKKAKASSALVVCGGQGHRRVHRKARQPHQEELAPTVMVWQIPLLNI

SEQ ID NO: 61793 - protein, 982 aa, Homo sapiens
MLPSSSWGKRKLRGRLGWVRSDARGVMWARQEGLHHPHPHAVIRCPSSSSSSVSCSGDSEEEDMGLLEVSVSDIKPPAPELGPMPEGLSPQQVVRRHILGSIVQSEGSYVESLKRILQDYRNPLMEMEPKALSARKCQVVFFRVKEILHCHSMFQIALSSRVAEWDSTEKIGDLFVASDMLKNTPRGHPDRLSLQLALTELETLAEKLNEQKRLADQVAEIQQLTKSVSDRSSLNKLLTSGQRQLLLCETLTETVYGDRGQLIKSKERRVFLLNDMLVCANINFKGQLEISSLVPLGPKYVVKWNTALPQVQVVEVGQDGGTYDKDNVLIQHSGAKKASASGQAQNKVYLGPPRLFQELQDLQKDLAVVEQITLLISTLHGTYQNLNMTVAQDWCLALQRLMRVKEEEIHSANKCRLRLLLPGKPDKSGRPISFMVVFITPNPLSKISWVNRLHLAKIGLREENQPGWLCPDEDKKSKAPFWCPILACCIPAFSSRALSLQLGALVHSPVNCPLLGFSAVSTSLPQGYLWVGGGQEGAGGQVEIFSLNRPSPRTVKSFPLAAPVLCMEYIPELEEEAESRDESPTVADPSATVHPTICLGLQDGSILLYSSVDTGTQCLVSCRSPGLQPVLCLRHSPFHLLAGLQDGTLAAYPRTSGGVLWDLESPPVCLTVGPGPVRTLLSLEDAVWASCGPWVTVLEATTLQPQQSFEAHQDEAVSVTHMVKAGSGVWMAFSSGTSIRLFHTETLEHLQEINIATRTTFLLPGQKHLCVTSLLICQGLLWVGTDQGVIVLLPVPRLEGIPKITGKGMVSLNGHCGPVAFLAVATSILAPDILRSDQEEAEGPRAEEDKPDGQAHEPMPDSHVGRELTRKKGILLQYRLRSTAHLPGPLLSMREPAPADGAALEHSEEDGSIYEMADDPDIWVRSRPCARDAHRKEICSVAIISGGQGYRNFGSALGSSGRQAPCGETDSTLLIWQVPLML

SEQ ID NO: 61794 - protein, 1279 aa, Homo sapiens
MASSNPPPQPAIGDQLVPGVPGPSSEAEDDPGEAFEFDDSDDEEDTSAALGVPSLAPERDTDPPLIHLDSIPVTDPDPAAAPPGTGVPAWVSNGDAADAAFSGARHSSWKRKSSRRIDRFTFPALEEDVIYDDVPCESPDAHQPGAERNLLYEDAHRAGAPRQAEDLGWSSSEFESYSEDSGEEAKPEVEVEPAKHRVSFQPKLSPDLTRLKERYARTKRDILALRVGGRDMQELKHKYDCKMTQLMKAAKSGTKDGLEKTRMAVMRKVSFLHRKDVLGDSEEEDMGLLEVSVSDIKPPAPELGPMPEGLSPQQVVRRHILGSIVQSEGSYVESLKRILQDYRNPLMEMEPKALSARKCQVVFFRVKEILHCHSMFQIALSSRVAEWDSTEKIGDLFVASFSKSMVLDVYSDYVNNFTSAMSIIKKACLTKPAFLEFLKRRQVCSPDRVTLYGLMVKPIQRFPQFILLLQDMLKNTPRGHPDRLSLQLALTELETLAEKLNEQKRLADQVAEIQQLTKSVSDRSSLNKLLTSGQRQLLLCETLTETVYGDRGQLIKSKERRVFLLNDMLVCANINFKPANHRGQLEISSLVPLGPKYVVKWNTALPQVQVVEVGQDGGTYDKDNVLIQHSGAKKASASGQAQNKVYLGPPRLFQELQDLQKDLAVVEQITLLISTLHGTYQNLNMTVAQDWCLALQRLMRVKEEEIHSANKCRLRLLLPGKPDKSGRPISFMVVFITPNPLSKISWVNRLHLAKIGLREENQPGWLCPDEDKKSKAPFWCPILACCIPAFSSRALSLQLGALVHSPVNCPLLGFSAVSTSLPQGYLWVGGGQEGAGGQVEIFSLNRPSPRTVKSFPLAAPVLCMEYIPELEEEAESRDESPTVADPSATVHPTICLGLQDGSILLYSSVDTGTQCLVSCRSPGLQPVLCLRHSPFHLLAGLQDGTLAAYPRTSGGVLWDLESPPVCLTVGPGPVRTLLSLEDAVWASCGPWVTVLEATTLQPQQSFEAHQDEAVSVTHMVKAGSGVWMAFSSGTSIRLFHTETLEHLQEINIATRTTFLLPGQKHLCVTSLLICQGLLWVGTDQGVIVLLPVPRLEGIPKITGKGMVSLNGHCGPVAFLAVATSILAPDILRSDQEEAEGPRAEEDKPDGQAHEPMPDSHVGRELTRKKGILLQYRLRSTAHLPGPLLSMREPAPADGAALEHSEEDGSIYEMADDPDIWVRSRPCARDAHRKEICSVAIISGGQGYRNFGSALGSSGRQAPCGETDSTLLIWQVPLML

SEQ ID NO: 61795 - protein, 1052 aa, Homo sapiens
MLPSSSWGKRKLRGRLGWVRSDARGVMWARQEGLHHPHPHAVIRCPSSSSSSVSCSGDSEEEDMGLLEVSVSDIKPPAPELGPMPEGLSPQQVVRRHILGSIVQSEGSYVESLKRILQDYRNPLMEMEPKALSARKCQVVFFRVKEILHCHSMFQIALSSRVAEWDSTEKIGDLFVASFSKSMVLDVYSDYVNNFTSAMSIIKKACLTKPAFLEFLKRRQVCSPDRVTLYGLMVKPIQRFPQFILLLQDMLKNTPRGHPDRLSLQLALTELETLAEKLNEQKRLADQVAEIQQLTKSVSDRSSLNKLLTSGQRQLLLCETLTETVYGDRGQLIKSKERRVFLLNDMLVCANINFKGQLEISSLVPLGPKYVVKWNTALPQVQVVEVGQDGGTYDKDNVLIQHSGAKKASASGQAQNKVYLGPPRLFQELQDLQKDLAVVEQITLLISTLHGTYQNLNMTVAQDWCLALQRLMRVKEEEIHSANKCRLRLLLPGKPDKSGRPISFMVVFITPNPLSKISWVNRLHLAKIGLREENQPGWLCPDEDKKSKAPFWCPILACCIPAFSSRALSLQLGALVHSPVNCPLLGFSAVSTSLPQGYLWVGGGQEGAGGQVEIFSLNRPSPRTVKSFPLAAPVLCMEYIPELEEEAESRDESPTVADPSATVHPTICLGLQDGSILLYSSVDTGTQCLVSCRSPGLQPVLCLRHSPFHLLAGLQDGTLAAYPRTSGGVLWDLESPPVCLTVGPGPVRTLLSLEDAVWASCGPWVTVLEATTLQPQQSFEAHQDEAVSVTHMVKAGSGVWMAFSSGTSIRLFHTETLEHLQEINIATRTTFLLPGQKHLCVTSLLICQGLLWVGTDQGVIVLLPVPRLEGIPKITGKGMVSLNGHCGPVAFLAVATSILAPDILRSDQEEAEGPRAEEDKPDGQAHEPMPDSHVGRELTRKKGILLQYRLRSTAHLPGPLLSMREPAPADGAALEHSEEDGSIYEMADDPDIWVRSRPCARDAHRKEICSVAIISGGQGYRNFGSALGSSGRQAPCGETDSTLLIWQVPLML

SEQ ID NO: 61796 - protein, 1240 aa, Homo sapiens
MASSNPPPQPAIGDQLVPGVPGPSSEAEDDPGEAFEFDDSDDEEDTSAALGVPSLAPERDTDPPLIHLDSIPVTDPDPAAAPPGTGVPAWVSNGDAADAAFSGARHSSWKRKSSRRIDRFTFPALEEDVIYDDVPCESPDAHQPGAERNLLYEDAHRAGAPRQAEDLGWSSSEFESYSEDSGEEAKPEVEVEPAKHRVSFQPKMTQLMKAAKSGTKDGLEKTRMAVMRKVSFLHRKDVLGDSEEEDMGLLEVSVSDIKPPAPELGPMPEGLSPQQVVRRHILGSIVQSEGSYVESLKRILQDYRNPLMEMEPKALSARKCQVVFFRVKEILHCHSMFQIALSSRVAEWDSTEKIGDLFVASFSKSMVLDVYSDYVNNFTSAMSIIKKACLTKPAFLEFLKRRQVCSPDRVTLYGLMVKPIQRFPQFILLLQDMLKNTPRGHPDRLSLQLALTELETLAEKLNEQKRLADQVAEIQQLTKSVSDRSSLNKLLTSGQRQLLLCETLTETVYGDRGQLIKSKERRVFLLNDMLVCANINFKPANHRGQLEISSLVPLGPKYVVKWNTALPQVQVVEVGQDGGTYDKDNVLIQHSGAKKASASGQAQNKVYLGPPRLFQELQDLQKDLAVVEQITLLISTLHGTYQNLNMTVAQDWCLALQRLMRVKEEEIHSANKCRLRLLLPGKPDKSGRPISFMVVFITPNPLSKISWVNRLHLAKIGLREENQPGWLCPDEDKKSKAPFWCPILACCIPAFSSRALSLQLGALVHSPVNCPLLGFSAVSTSLPQGYLWVGGGQEGAGGQVEIFSLNRPSPRTVKSFPLAAPVLCMEYIPELEEEAESRDESPTVADPSATVHPTICLGLQDGSILLYSSVDTGTQCLVSCRSPGLQPVLCLRHSPFHLLAGLQDGTLAAYPRTSGGVLWDLESPPVCLTVGPGPVRTLLSLEDAVWASCGPWVTVLEATTLQPQQSFEAHQDEAVSVTHMVKAGSGVWMAFSSGTSIRLFHTETLEHLQEINIATRTTFLLPGQKHLCVTSLLICQGLLWVGTDQGVIVLLPVPRLEGIPKITGKGMVSLNGHCGPVAFLAVATSILAPDILRSDQEEAEGPRAEEDKPDGQAHEPMPDSHVGRELTRKKGILLQYRLRSTAHLPGPLLSMREPAPADGAALEHSEEDGSIYEMADDPDIWVRSRPCARDAHRKEICSVAIISGGQGYRNFGSALGSSGRQAPCGETDSTLLIWQVPLML

SEQ ID NO: 61797 - protein, 488 aa, Homo sapiens
MTQLMKAAKSGTKDGLEKTRMAVMRKVSFLHRKDVLGDSEEEDMGLLEVSVSDIKPPAPELGPMPEGLSPQQVVRRHILGSIVQSEGSYVESLKRILQDYRNPLMEMEPKALSARKCQVVFFRVKEILHCHSMFQIALSSRVAEWDSTEKIGDLFVASFSKSMVLDVYSDYVNNFTSAMSIIKKACLTKPAFLEFLKRRQVCSPDRVTLYGLMVKPIQRFPQFILLLQDMLKNTPRGHPDRLSLQLALTELETLAEKLNEQKRLADQVAEIQQLTKSVSDRSSLNKLLTSGQRQLLLCETLTETVYGDRGQLIKSKERRVFLLNDMLVCANINFKPANHRGQLEISSLVPLGPKYVVKWNTALPQVQVVEVGQDGGTYDKDNVLIQHSGAKKASASGQAQNKVYLGPPRLFQELQDLQKDLAVVEQITLLISTLHGTYQNLNMTVAQDWCLALQRLMRVKEEEIHSANKCRLRLLLPGKPDKGTWSDM

SEQ ID NO: 61798 - protein, 1067 aa, Homo sapiens
MASSNPPPQPAIGDQLVPGVPGPSSEAEDDPGEAFEFDDSDDEEDTSAALGVPSLAPERDTDPPLIHLDSIPVTDPDPAAAPPGTGVPAWVSNGDAADAAFSGARHSSWKRKSSRRIDRFTFPALEEDVIYDDVPCESPDAHQPGAERNLLYEDAHRAGAPRQAEDLGWSSSEFESYSEDSGEEAKPEVEVEPAKHRVSFQPKLSPDLTRLKERYARTKRDILALRVGGRDMQELKHKYDCKMTQLMKAAKSGTKDGLEKTRMAVMRKVSFLHRKDVLGDSEEEDMGLLEVSVSDIKPPAPELGPMPEGLSPQQVVRRHILGSIVQSEGSYVESLKRILQDYRNPLMEMEPKALSARKCQVVFFRVKEILHCHSMFQIALSSRVAEWDSTEKIGDLFVASFSKSMVLDVYSDYVNNFTSAMSIIKKACLTKPAFLEFLKRRQVCSPDRVTLYGLMVKPIQRFPQFILLLQDMLKNTPRGHPDRLSLQLALTELETLAEKLNEQKRLADQVAEIQQLTKSVSDRSSLNKLLTSGQRQLLLCETLTETVYGDRGQLIKSKERRVFLLNDMLVCANINFKGQLEISSLVPLGPKYVVKWNTALPQVQVVEVGQDGGTYDKDNVLIQHSGAKKASASGQAQNKVYLGPPRLFQELQDLQKDLAVVEQITLLISTLHGTYQNLNMTVAQDWCLALQRLMRVKEEEIHSANKCRLRLLLPGKPDKSGRPISFMVVFITPNPLSKISWVNRLHLAKIGLREENQPGWLCPDEDKKSKAPFWCPILACCIPAFSSRALSLQLGALVHSPVNCPLLGFSAVSTSLPQGYLWVGGGQEGAGGQVEIFSLNRPSPRTVKSFPLAAPVLCMEYIPELEEEAESRDESPTVADPSATVHPTICLGLQDGSILLYSSVDTGTQCLVSCRSPGLQPVLCLRHSPFHLLAGLQDGTLAAYPRTSGGVLWDLESPPVCLTVGPGPVRTLLSLEDAVWASCGPWVTVLEATTLQPQQSFEAHQDEAVSVTHMVKAGSGVWMAFSSGTSIRLFHTETLEHLQEINIATRTTFLLPDRSLIKCSPRA

SEQ ID NO: 61799 - protein, 1240 aa, Homo sapiens; identical to SEQ ID NO: 61796

SEQ ID NO: 61800 - protein, 1042 aa, Homo sapiens
MLPSSSWGKRKLRGRLGWVRSDARGVMWARQEGLHHPHPHAVIRCPSSSSSSVSCSGDSEEEDMGLLEVSVSDIKPPAPELGPMPEGLSPQQVVRRHILGSIVQSEGSYVESLKRILQDYRNPLMEMEPKALSARKCQVVFFRVKEILHCHSMFQIALSSRVAEWDSTEKIGDLFVASFSKSMVLDVYSDYVNNFTSAMSIIKKACLTKPAFLEFLKRRQVCSPDRVTLYGLMVKPIQRFPQFILLLQDMLKNTPRGHPDRLSLQLALTELETLAEKLNEQKRLADQVAEIQQLTKSVSDRSSLNKLLTSGQRQLLLCETLTETVYGDRGQLIKSKERRVFLLNDMLVCANINFKGQLEISSLVPLGPKYVVKWNTALPQVQVVEVGQDGGTYDKDNVLIQHSGAKKASASGQAQNKVYLGPPRLFQELQDLQKDLAVVEQITLLISTLHGTYQNLNMTVAQDWCLALQRLMRVKEEEIHSANKCRLRLLLPGKPDKSGRPISFMVVFITPNPLSKISWVNRLHLAKIGLREENQPGWLCPDEDKKSKAPFWCPILACCIPAFSSRALSLQLGALVHSPVNCPLLGFSAVSTSLPQGYLWVGGGQEGAGGQVEIFSLNRPSPRTVKSFPLAAPVLCMEYIPELEEEAESRDESPTVADPSATVHPTICLGLQDGSILLYSSVDTGTQCLVSCRSPGLQPVLCLRHSPFHLLAGLQDGTLAAYPRTSGGVLWDLESPPVCLTVGPGPVRTLLSLEDAVWASCGPWVTVLEATTLQPQQSFEAHQDEAVSVTHMVKAGSGVWMAFSSGTSIRLFHTETLEHLQEINIATRTTFLLPGQKHLCVTSLLICQGLLWVGTDQGVIVLLPVPRLEGIPKITGKGMVSLNGHCGPVAFLAVATSILAPDILRSDQEEAEGPRAEEDKPDGQAHEPMPDSHVGRELTRKKGILLQYRLRSTAHLPGPLLSMREPAPADGAALEHSEEDGSIYEMAFFLKAKNTKPHNCLASPVSLVWALAGLQGSHTPLLEGCVRVSVCECVGWCVNIYK

SEQ ID NO: 61801 - protein, 1525 aa, Homo sapiens
MSGTQSTITDRFPLKKPIRHGSILNRESPTDKKQKVERIASHDFDPTGLVQRCVIIQKDDNGFGLTVSGDNPVFVQSVKEDGAAMRAGVQTGDRIIKVNGTLVTHSNHLEVVKLIKSGSYVALTVQGRPPGSPQIPLADSEVEPSVIGHMSPIMTSPHSPGASGNMERITSPVLMGEENNVVHNQKVEILRKMLQKEQERLQLLQEDYNRTPAQRLLKEIQEAKKHIPQLQEQLSKATGSAQDGAVVTPSRPLGDTLTVSEAETDPGDVLGRTDCSSGDASRPSSDNADSPKSGPKERIYLEENPEKSETIQDTDTQSLVGSPSTRIAPHIIGAEDDDFGTEHEQINGQCSCFQSIELLKSRPAHLAVFLHHVVSQFDPATLLCYLYSDLYKHTNSKETRRIFLEFHQFFLDRSAHLKVSVPDEMSADLEKRRPELIPEDLHRHYIQTMQERVHPEVQRHLEDFRQKRSMGLTLAESELTKLDAERDKDRLTLEKERTCAEQIVAKIEEVLMTAQAVEEDKSSTMQYVILMYMKHLGVKVKEPRNLEHKRGRIGFLPKIKQSMKKDKEGEEKGKRRGFPSILGPPRRPSRHDNSAIGRAMELQKARHPKHLSTPSSVSPEPQDSAKLRQSGLANEGTDAGYLPANSMSSVASGASFSQEGGKENDTGSKQVGETSAPGDTLDGTPRTLNTVFDFPPPPLDQVQEEECEVERVTEHGTPKPFRKFDSVAFGESQSEDEQFENDLETDPPNWQQLVSREVLLGLKPCEIKRQEVINELFYTERAHVRTLKVLDQVFYQRVSREGILSPSELRKIFSNLEDILQLHIGLNEQMKAVRKRNETSVIDQIGEDLLTWFSGPGEEKLKHAAATFCSNQPFALEMIKSRQKKDSRFQTFVQDAESNPLCRRLQLKDIIPTQMQRLTKYPLLLDNIAKYTEWPTEREKVKKAADHCRQILNYVNQAVKEAENKQRLEDYQRRLDTSSLKLSEYPNVEELRNLDLTKRKMIHEGPLVWKVNRDKTIDLYTLLLEDILVLLQKQDDRLVLRCHSKILASTADSKHTFSPVIKLSTVLVRQVATDNKALFVISMSDNGAQIYELVAQTVSEKTVWQDLICRMAASVKEQSTKPIPLPQSTPGEGDNDEEDPSKLKEEQHGISVTGLQSPDRDLGLESTLISSKPQSHSLSTSGKSEVRDLFVAERQFAKEQHTDGTLKEVGEDYQIAIPDSHLPVSEERWALDALRNLGLLKQLLVQQLGLTEKSVQEDWQHFPRYRTASQGPQTDSVIQNSENIKAYHSGEGHMPFRTGTGDIATCYSPRTSTESFAPRDSVGLAPQDSQASNILVMDHMIMTPEMPTMEPEGGLDDSGEHFFDAREAHSDENPSEGDGAVNKEEKDVNLRISGNYLILDGYDPVQESSTDEEVASSLTLQPMTGIPAVESTHQQQHSPQNTHSDGAISPFTPEFLVQQRWGAMEYSCFEIQSPSSCADSQSQIMEYIHKIEADLEHLKKVEESYTILCQRLAGSALTDKHSDKS

SEQ ID NO: 61802 - protein, 1544 aa, Homo sapiens
MSGTQSTITDRFPLKKPIRHGSILNRESPTDKKQKVERIASHDFDPTDSSSKKTKSSSEESRSEIYGLVQRCVIIQKDDNGFGLTVSGDNPVFVQSVKEDGAAMRAGVQTGDRIIKVNGTLVTHSNHLEVVKLIKSGSYVALTVQGRPPGSPQIPLADSEVEPSVIGHMSPIMTSPHSPGASGNMERITSPVLMGEENNVVHNQKVEILRKMLQKEQERLQLLQEDYNRTPAQRLLKEIQEAKKHIPQLQEQLSKATGSAQDGAVVTPSRPLGDTLTVSEAETDPGDVLGRTDCSSGDASRPSSDNADSPKSGPKERIYLEENPEKSETIQDTDTQSLVGSPSTRIAPHIIGAEDDDFGTEHEQINGQCSCFQSIELLKSRPAHLAVFLHHVVSQFDPATLLCYLYSDLYKHTNSKETRRIFLEFHQFFLDRSAHLKVSVPDEMSADLEKRRPELIPEDLHRHYIQTMQERVHPEVQRHLEDFRQKRSMGLTLAESELTKLDAERDKDRLTLEKERTCAEQIVAKIEEVLMTAQAVEEDKSSTMQYVILMYMKHLGVKVKEPRNLEHKRGRIGFLPKIKQSMKKDKEGEEKGKRRGFPSILGPPRRPSRHDNSAIGRAMELQKARHPKHLSTPSSVSPEPQDSAKLRQSGLANEGTDAGYLPANSMSSVASGASFSQEGGKENDTGSKQVGETSAPGDTLDGTPRTLNTVFDFPPPPLDQVQEEECEVERVTEHGTPKPFRKFDSVAFGESQSEDEQFENDLETDPPNWQQLVSREVLLGLKPCEIKRQEVINELFYTERAHVRTLKVLDQVFYQRVSREGILSPSELRKIFSNLEDILQLHIGLNEQMKAVRKRNETSVIDQIGEDLLTWFSGPGEEKLKHAAATFCSNQPFALEMIKSRQKKDSRFQTFVQDAESNPLCRRLQLKDIIPTQMQRLTKYPLLLDNIAKYTEWPTEREKVKKAADHCRQILNYVNQAVKEAENKQRLEDYQRRLDTSSLKLSEYPNVEELRNLDLTKRKMIHEGPLVWKVNRDKTIDLYTLLLEDILVLLQKQDDRLVLRCHSKILASTADSKHTFSPVIKLSTVLVRQVATDNKALFVISMSDNGAQIYELVAQTVSEKTVWQDLICRMAASVKEQSTKPIPLPQSTPGEGDNDEEDPSKLKEEQHGISVTGLQSPDRDLGLESTLISSKPQSHSLSTSGKSEVRDLFVAERQFAKEQHTDGTLKEVGEDYQIAIPDSHLPVSEERWALDALRNLGLLKQLLVQQLGLTEKSVQEDWQHFPRYRTASQGPQTDSVIQNSENIKAYHSGEGHMPFRTGTGDIATCYSPRTSTESFAPRDSVGLAPQDSQASNILVMDHMIMTPEMPTMEPEGGLDDSGEHFFDAREAHSDENPSEGDGAVNKEEKDVNLRISGNYLILDGYDPVQESSTDEEVASSLTLQPMTGIPAVESTHQQQHSPQNTHSDGAISPFTPEFLVQQRWGAMEYSCFEIQSPSSCADSQSQIMEYIHKIEADLEHLKKVEESYTILCQRLAGSALTDKHSDKS

SEQ ID NO: 61803 - protein, 802 aa, Homo sapiens
MDCGPPATLQPHLTGPPGTAHHPVAVCQQESLSFAELPALKPPSPVCLDLFPVAPEELRAPGSRWSLGTPAPLQGLLWPLSPGGSDTEITSGGMRPSRAGSWPHCPGAQPPALEGPWSPRHTQPQRRASHGSEKKSAWRKMRVYQREEVPGCPEAHAVFLEPGQVVQEQALSTEEPRVELSGSTRVSLEGPERRRFSASELMTRLHSSLRLGRNSAARALISGSGTGAAREGKASGMEARSVEMSGDRVSRPAPGDSREGDWSEPRLDTQEEPPLGSRSTNERRQSRFLLNSVLYQEYSDVASARELRRQQREEEGPGDEAEGAEEGPGPPRANLSPSSSFRAQRSARGSTFSLWQDIPDVRGSGVLATLSLRDCKLQEAKFELITSEASYIHSLSVAVGHFLGSAELSECLGAQDKQWLFSKLPEVKSTSERFLQDLEQRLEADVLRFSVCDVVLDHCPAFRRVYLPYVTNQAYQERTYQRLLLENPRFPGILARLEESPVCQRLPLTSFLILPFQRITRLKMLVENILKRTAQGSEDEDMATKAFNALKELVQECNASVQSMKRTEELIHLSKKIHFEGKIFPLISQARWLVRHGELVELAPLPAAPPAKLKLSSKAVYLHLFNDCLLLSRRKELGKFAVFVHAKMAELQVRDLSLKLQGIPGHVFLLQLLHGQHMKHQFLLRARTESEKQRWISALCPSSPQEDKEVISEGEDCPQVQCVRTYKALHPDELTLEKTDILSVRTWTSDGWLEGVRLADGEKGWVPQAYVEEISSLSARLRNLRENKRVTSATSKLGEAPV

SEQ ID NO: 61804 - protein, 524 aa, Homo sapiens
MDCGPPATLQPHLTGPPGTAHHPVAVCQQESLSFAELPALKPPSPVCLDLFPVAPEELRAPGSRWSLGTPAPLQGLLWPLSPGGSDTEITSGGMRPSRAGSWPHCPGAQPPALEGPWSPRHTQPQRRASHGSEKKSAWRKMRVYQREEVPGCPEAHAVFLEPGQVVQEQALSTEEPRVELSGSTRVSLEGPERRRFSASELMTRLHSSLRLGRNSAARALISGSGTGAAREGKASGMEARSVEMSGDRVSRPAPGDSREGDWSEPRLDTQEEPPLGSRSTNERRQSRFLLNSVLYQEYSDVASARELRRQQREEEGPGDEAEGAEEGPGPPRANLSPSSSFRAQRSARGSTFSLWQDIPDVRGSGVLATLSLRDCKLQEAKFELITSEASYIHSLSVAVGHFLGSAELSECLGAQDKQWLFSKLPEVKSTSERFLQDLEQRLEADVLRFSVCDVVLDHCPAFRRVYLPYVTNQAYQERTYQRLLLENPRFPGILARLEESPVCQRLPLTSFLILQPPGGQGGHQ

SEQ ID NO: 61805 - protein, 502 aa, Homo sapiens
MDCGPPATLQPHLTGPPGTAHHPVAVCQQESLSFAELPALKPPSPVCLDLFPVAPEELRAPGSRWSLGTPAPLQGLLWPLSPGGSDTEITSGGMRPSRAGSWPHCPGAQPPALEGPWSPRHTQPQRRASHGSEKKSAWRKMRVYQREEVPGCPEAHAVFLEPGQVVQEQALSTEEPRVELSGSTRVSLEGPERRRFSASELMTRLHSSLRLGRNSAARALISGSGTGAAREGKASGMEARSVEMSGDRVSRPAPGDSREGDWSEPRLDTQEEPPLGSRSTNERRQSRFLLNSVLYQEYSDVASARELRRQQREEEGPGDEAEGAEEGPGPPRANLSPSSSFRAQRSARGSTFSLWQDIPDVRGSGVLATLSLRDCKLQEAKFELITSEASYIHSLSVAVGHFLGSAELSECLGAQDKQWLFSKLPEVKSTSERFLQDLEQRLEADVLRFSVCDVVLDHCPAFRRVYLPYVTNQAYQERTYQRLLRENKRVTSATSKLGEAPV

SEQ ID NO: 61806 - protein, 167 aa, Homo sapiens
ERLAQFPAAGRGSPGPPGARLGVGLEKGRGREVWRPGVWGCEARASEVNWSCPFDPVCALPQAKFELITSEASYIHSLSVAVGHFLGSAELSECLGAQDKQWLFSKLPEVKSTSERFLQDLEQRLEADVLRFSVCDVVLDHCPAFRRVYLPYVTNQAYQERTYQRLL

SEQ ID NO: 61807 - protein, 307 aa, Homo sapiens
  VARIANT 1: note = MOD_RES - Any amino acid
XRDRGQERLAQFPAAGRGSPGPPGARLGVGLEKGRGREVWRPGVWGCEARASEVNWSCPFDPVCALPQAKFELITSEASYIHSLSVAVGHFLGSAELSECLGAQDKQWLFSKLPEVKSTSERFLQDLEQRLEADVLRFSVCDVVLDHCPAFRRVYLPYVTNQAYQERTYQRLLLENPRFPGILARLEESPVCQRLPLTSFLILPFQRITRLKMLVENILKRTAQGSEDEDMATKAFNALKELVQECNASVQSMKRTEELIHLSKKIHFEGKIFPLISQARWLVRHGELVELAPLPAAPPAKLKLSSK

SEQ ID NO: 61808 - protein, 526 aa, Homo sapiens
MVAKDYPFYLTVKRANCSLELPPASGPAKDAEEPSNKRVKPLSRVTSLANLIPPVKATPLKRFSQTLQRSISFRSESRPDILAPRPWSRNAAPSSTKRRDSKLWSETFDVCVNQMLTSKEIKRQEAIFELSQGEEDLIEDLKLAKKAYHDPMLKLSIMTEQELNQIFGTLDSLIPLHEELLSQLRDVRKPDGSTEHVGPILVGWLPCLSSYDSYCSNQVAAKALLDHKKQDHRVQDFLQRCLESPFSRKLDLWNFLDIPRSRLVKYPLLLREILRHTPNDNPDQQHLEEAINIIQGIVAEINTKTGESECRYYKERLLYLEEGQKDSLIDSSRVLCCHGELKNNRGVKLHVFLFQEVLVITRAVTHNEQLCYQLYRQPIPVKDLLLEDLQDGEVRLGGSLRGAFSNNERIKNFFRVSFKNGSQSQTHSLQANDTFNKQQWLNCIRQAKETVLCAAGQAGVLDSEGSFLNPTTGSRELQGETKLEQMDQSDSESDCSMDTSEVSLDCERMEQTDSSCGNSRHGESNV

SEQ ID NO: 61809 - protein, 558 aa, Homo sapiens
MDSSTAMNQCSCRGMEENKERPKRQRQNNFPMFPSPKAWNFRGRKRKQSTQDEDAVSLCSLDISEPSNKRVKPLSRVTSLANLIPPVKATPLKRFSQTLQRSISFRSESRPDILAPRPWSRNAAPSSTKRRDSKLWSETFDVCVNQMLTSKEIKRQEAIFELSQGEEDLIEDLKLAKKAYHDPMLKLSIMTEQELNQIFGTLDSLIPLHEELLSQLRDVRKPDGSTEHVGPILVGWLPCLSSYDSYCSNQVAAKALLDHKKQDHRVQDFLQRCLESPFSRKLDLWNFLDIPRSRLVKYPLLLREILRHTPNDNPDQQHLEEAINIIQGIVAEINTKTGESECRYYKERLLYLEEGQKDSLIDSSRVLCCHGELKNNRGVKLHVFLFQEVLVITRAVTHNEQLCYQLYRQPIPVKDLLLEDLQDGEVRLGGSLRGAFSNNERIKNFFRVSFKNGSQSQTHSLQANDTFNKQQWLNCIRQAKETVLCAAGQAGVLDSEGSFLNPTTGSRELQGETKLEQMDQSDSESDCSMDTSEVSLDCERMEQTDSSCGNSRHGESNV

SEQ ID NO: 61810 - protein, 532 aa, Homo sapiens
MIEVCHHNWLLWLCPSKFGIFMCCLASTTGQMELRRTREPSNKRVKPLSRVTSLANLIPPVKATPLKRFSQTLQRSISFRSESRPDILAPRPWSRNAAPSSTKRRDSKLWSETFDVCVNQMLTSKEIKRQEAIFELSQGEEDLIEDLKLAKKAYHDPMLKLSIMTEQELNQIFGTLDSLIPLHEELLSQLRDVRKPDGSTEHVGPILVGWLPCLSSYDSYCSNQVAAKALLDHKKQDHRVQDFLQRCLESPFSRKLDLWNFLDIPRSRLVKYPLLLREILRHTPNDNPDQQHLEEAINIIQGIVAEINTKTGESECRYYKERLLYLEEGQKDSLIDSSRVLCCHGELKNNRGVKLHVFLFQEVLVITRAVTHNEQLCYQLYRQPIPVKDLLLEDLQDGEVRLGGSLRGAFSNNERIKNFFRVSFKNGSQSQTHSLQANDTFNKQQWLNCIRQAKETVLCAAGQAGVLDSEGSFLNPTTGSRELQGETKLEQMDQSDSESDCSMDTSEVSLDCERMEQTDSSCGNSRHGESNV

SEQ ID NO: 61811 - protein, 690 aa, Homo sapiens
MPWEEPAGEKPSCSHSQKAFHMEPAQKPCFTTDMVTWALLCISAETVRGEAPSQPRGIPHRSPVSVDDLWLEKTQRKKLQKQAHVERRLHIGAVHKDGVKCWRKTIITSPESLNLPRRSHPLSQSAPTGLNHMGWPEHTPGTAMPDGALDTAVCADEVGSEEDLYDDLHSSSHHYSHPGGGGEQLAINELISDGSVVCAEALWDHVTMDDQELGFKAGDVIEVMDATNREWWWGRVADGEGWFPASFVRLRVNQDEPADDDAPLAGNSGAEDGGAEAQSSKDQMRTNVINEILSTERDYIKHLRDICEGYVRQCRKRADMFSEEQLRTIFGNIEDIYRCQKAFVKALEQRFNRERPHLSELGACFLEHQADFQIYSEYCNNHPNACVELSRLTKLSKYVYFFEACRLLQKMIDISLDGFLLTPVQKICKYPLQLAELLKYTHPQHRDFKDVEAALHAMKNVAQLINERKRRLENIDKIAQWQSSIEDWEGEDLLVRSSELIYSGELTRVTQPQAKSQQRMFFLFDHQLIYCKKDLLRRDVLYYKGRLDMDGLEVVDLEDGKDRDLHVSIKNAFRLHRGATGDSHLLCTRKPEQKQRWLKAFAREREQVQLDQETGFSITELQRKQAMLNASKQQVTGKPKAVGRPCYLTRQKHPALPSNRPQQQVLVLAEPRRKPSTFWHSISRLAPFRK

SEQ ID NO: 61812 - protein, 619 aa, Homo sapiens
MRPDGQQALDAVVRSFDCHSEAALRQRNDVIYCSLPRTAQGIVQREDQLEVLVSLREVWGRRRGRDGTCTGAMPDGALDTAVCADEVGSEEDLYDDLHSSSHHYSHPGGGGEQLAINELISDGSVVCAEALWDHVTMDDQELGFKAGDVIEVMDATNREWWWGRVADGEGWFPASFVRLRVNQDEPADDDAPLAGNSGAEDGGAEAQSSKDQMRTNVINEILSTERDYIKHLRDICEGYVRQCRKRADMFSEEQLRTIFGNIEDIYRCQKAFVKALEQRFNRERPHLSELGACFLEHQADFQIYSEYCNNHPNACVELSRLTKLSKYVYFFEACRLLQKMIDISLDGFLLTPVQKICKYPLQLAELLKYTHPQHRDFKDVEAALHAMKNVAQLINERKRRLENIDKIAQWQSSIEDWEGEDLLVRSSELIYSGELTRVTQPQAKSQQRMFFLFDHQLIYCKKDLLRRDVLYYKGRLDMDGLEVVDLEDGKDRDLHVSIKNAFRLHRGATGDSHLLCTRKPEQKQRWLKAFAREREQVQLDQETGFSITELQRKQAMLNASKQQVTGKPKAVGRPCYLTRQKHPALPSNRPQQQVLVLAEPRRKPSTFWHSISRLAPFRK

SEQ ID NO: 61813 - protein, 670 aa, Homo sapiens
MPWEEPAGEKPSCSHSQKAFHMEPAQKPCFTTDMVTWALLCISAETVRGEAPSQPRGIPHRSPVSVDDLWLEKTQRKKLQKQAHVERRLHIGAVHKDGVKCWRKTIITSPESLNLPRRSHPLSQSAPTGLNHMGWPEHTPGTAMPDGALDTAVCADEVGSEEDLYDDLHSSSHHYSHPGGGGEQLAINELISDGSVVCAEALWDHVTMDDQELGFKAGDVIEVMDATNREWWWGRVADGEGWFPASFVRLRVNQDEPADDDAPLAGNSGAEDGGAEAQSSKDQMRTNVINEILSTERDYIKHLRDICEGYVRQCRKRADMFSEEQLRTIFGNIEDIYRCQKAFVKALEQRFNRERPHLSELGACFLEHQADFQIYSEYCNNHPNACVELSRLTKLSKYVYFFEACRLLQKMIDISLDGFLLTPVQKICKYPLQLAELLKYTHPQHRDFKDVEAALHAMKNVAQLINERKRRLENIDKIAQWQSSIEDWEGEDLLVRSSELIYSGELTRVTQPQAKSQQRMFFLFDHQLIYCKKDLLRRDVLYYKGRLDMDGLEVVDLEDGKDRDLHVSIKNAFRLHRGATGDSHLLCTRKPEQKQRWLKAFAREREQVQLDQETGFSITELQRKQAMLNASKQQVTGKPKGRRTAAPPPRLPGPYPADIIPFSEPQSQAS

SEQ ID NO: 61814 - protein, 630 aa, Homo sapiens
MPWEEPAGEKPSCSHSQKAFHMEPAQKPCFTTDMVTWALLCISAETVRGEAPSQPRGIPHRSPVSVDDLWLEKTQRKKLQKQAHVERRLHIGAVHKDGVKCWRKTIITSPESLNLPRRSHPLSQSAPTGLNHMGWPEHTPGTAMPDGALDTAVCADEVGSEEDLYDDLHSSSHHYSHPGGGGEQLAINELISDGSVVCAEALWDHVTMDDQELGFKAGDVIEVMDATNREWWWGRVADGEGWFPASFVRLRVNQDEPADDDAPLAGNSGAEDGGAEAQSSKDQMRTNVINEILSTERDYIKHLRDICEQADFQIYSEYCNNHPNACVELSRLTKLSKYVYFFEACRLLQKMIDISLDGFLLTPVQKICKYPLQLAELLKYTHPQHRDFKDVEAALHAMKNVAQLINERKRRLENIDKIAQWQSSIEDWEGEDLLVRSSELIYSGELTRVTQPQAKSQQRMFFLFDHQLIYCKKDLLRRDVLYYKGRLDMDGLEVVDLEDGKDRDLHVSIKNAFRLHRGATGDSHLLCTRKPEQKQRWLKAFAREREQVQLDQETGFSITELQRKQAMLNASKQQVTGKPKAVGRPCYLTRQKHPALPSNRPQQQVLVLAEPRRKPSTFWHSISRLAPFRK

SEQ ID NO: 61815 - protein, 192 aa, Homo sapiens
MPWEEPAGEKPSCSHSQKAFHMEPAQKPCFTTDMVTWALLCISAETVRGEAPSQPRGIPHRSPVSVDDLWLEKTQRKKLQKQAHVERRLHIGAVHKDGVKCWRKTIITSPESLNLPRRSHPLSQSAPTGLNHMGWPEHTPGTAVGRPCYLTRQKHPALPSNRPQQQVLVLAEPRRKPSTFWHSISRLAPFRK

SEQ ID NO: 61816 - protein, 670 aa, Homo sapiens; identical to SEQ ID NO: 61813

SEQ ID NO: 61817 - protein, 1597 aa, Homo sapiens
MEAEEAQRGASPPISAIEEFSIIPEAPMRSSQVSALGLEAQEDEDPSYKWREEHRLSATQQSELRDVCDYAIETMPSFPKEGSADVEPNQESLVAEACDTPEHWEAVPQSLAGRQARTLAPPELWACPIQSEHLDMAPFSSDLGSEEEEVEFWPGLTSLTLGSGQAEEEEETSSDNSGQTRYYSPCEEHPAETNQNEGSESGTIRQGEELPPEELQESQGLLHPQEVQVLEEQGQQEAGFRGEGTLREDVCADGLLGEEQMIEQVNDEKGEQKQKQEQVQDVMLGRQGERMGLTGEPEGLNDGEWEQEDMERKAQGQGGPEQGEERKRELQVPEENRADSQDEKSQTFLGKSEEVTGKQEDHGIKEKGVPVSGQEAKEPESWDGGRLGAVGRARSREEENEHHGPSMPALIAPEDSPHCDLFPGASYLMTQIPGTQTESRAEELSPAALSPSLEPIRCSHQPISLLGSFLTEESPDKEIDQNSQQEESRLRKGTVSSQGTEVVFASASVTPPRTPDSAPPSPAEAYPITPASVSARPPVAFPRRETSCAARAPETASAPLSMDDPSPCGTSEMCPAALYGFPSTGTSPPRPPANSTGTVQHLRSDSFPGSHRTEQTPDLVGMLLSYSHSELPQRPPKPAIYSSVTPRRDRRSGRDYSTVSASPTALSTLKQDSQESISNLERPSSPPSIQPWVSPHNPAFATESPAYGSSPSFVSMEDVRIHEPLPPPPPQRRDTHPSVVETDGHARVVVPTLKQHSHPPPLALGSGLHAPHKGPLPQASDPAVARQHRPLPSTPDSSHHAQATPRWRYNKPLPPTPDLPQPHLPPISAPGSSRIYRPLPPLPIIDPPTEPPPLPPKSRGRSRSTRGGHMNSGGHAKTRPACQDWTVPLPASAGRTSWPPATARSTESFTSTSRSKSEVSPGMAFSNMTNFLCPSSPTTPWTPELQGPTSKDEAGVSEHPEAPAREPLRRTTPQQGASGPGRSPVGQARQPEKPSHLHLEKASSWPHRRDSGRPPGDSSGQAVAPSEGANKHKGWSRQGLRRPSILPEGSSDSRGPAVEKHPGPSDTVVFREKKPKEVMGGFSRRCSKLINSSQLLYQEYSDVVLNKEIQSQQRLESLSETPGPSSPRQPRKALVSSESYLQRLSMASSGSLWQEIPVVRNSTVLLSMTHEDQKLQEVKFELIVSEASYLRSLNIAVDHFQLSTSLRATLSNQEHQWLFSRLQDVRDVSATFLSDLEENFENNIFSFQVCDVVLNHAPDFRRVYLPYVTNQTYQERTFQSLMNSNSNFREVLEKLESDPVCQRLSLKSFLILPFQRITRLKLLLQNILKRTQPGSSEEAEATKAHHALEQLIRDCNNNVQSMRRTEELIYLSQKIEFECKIFPLISQSRWLVKSGELTALEFSASPGLRRKLNTRPVHLHLFNDCLLLSRPREGSRFLVFDHAPFSSIRGEKCEMKLHGPHKNLFRLFLRQNTQGAQAEFLFRTETQSEKLRWISALAMPREELDLLECYNSPQVQCLRAYKPRENDELALEKADVVMVTQQSSDGWLEGVRLSDGERGWFPVQQVEFISNPEVRAQNLKEAHRVKTAKLQLVEQQA

SEQ ID NO: 61818 - protein, 398 aa, Homo sapiens
MASSGSLWQEIPVVRNSTVLLSMTHEDQKLQEVKFELIVSEASYLRSLNIAVDHFQLSTSLRATLSNQEHQWLFSRLQDVRDVSATFLSDLEENFENNIFSFQVCDVVLNHAPDFRRVYLPYVTNQTYQERTFQSLMNSNSNFREVLEKLESDPVCQRLSLKSFLILPFQRITRLKLLLQNILKRTQPGSSEEAEATKAHHALEQLIRDCNNNVQSMRRTEELIYLSQKIEFECKIFPLISQSRWLVKSGELTALEFSASPGLRRKLNTRPVHLHLFNDCLLLSRPRESEKLRWISALAMPREELDLLECYNSPQVQCLRAYKPRENDELALEKADVVMVTQQSSDGWLEGVRLSDGERGWFPVQQVEFISNPEVRAQNLKEAHRVKTAKLQLVEQQA

SEQ ID NO: 61819 - protein, 519 aa, Homo sapiens
MGGFSRRCSKLINSSQLLYQEYSDVVLNKEIQSQQRLESLSETPGPSSPRQPRKALVSSESYLQRLSMASSGSLWQEIPVVRNSTVLLSMTHEDQKLQEVKFELIVSEASYLRSLNIAVDHFQLSTSLRATLSNQEHQWLFSRLQDVRDVSATFLSDLEENFENNIFSFQVCDVVLNHAPDFRRVYLPYVTNQTYQERTFQSLMNSNSNFREVLEKLESDPVCQRLSLKSFLILPFQRITRLKLLLQNILKRTQPGSSEEAEATKAHHALEQLIRDCNNNVQSMRRTEELIYLSQKIEFECKIFPLISQSRWLVKSGELTALEFSASPGLRRKLNTRPVHLHLFNDCLLLSRPREGSRFLVFDHAPFSSIRGEKCEMKLHGPHKNLFRLFLRQNTQGAQAEFLFRTETQSEKLRWISALAMPREELDLLECYNSPQVQCLRAYKPRENDELALEKADVVMVTQQSSDGWLEGVRLSDGERGWFPVQQVEFISNPEVRAQNLKEAHRVKTAKLQLVEQQA

SEQ ID NO: 61820 - protein, 797 aa, Homo sapiens
  VARIANT 1: note = MOD_RES - Any amino acid
XVVVPTLKQHSHPPPLALGSGLHAPHKGPLPQASDPAVARQHRPLPSTPDSSHHAQATPRWRYNKPLPPTPDLPQPHLPPISAPGSSRIYRPLPPLPIIDPPTEPPPLPPKSRGRSRSTRGGHMNSGGHAKTRPACQDWTVPLPASAGRTSWPPATARSTESFTSTSRSKSEVSPGMAFSNMTNFLCPSSPTTPWTPELQGPTSKDEAGVSEHPEAPAREPLRRTTPQQGASGPGRSPVGQARQPEKPSHLHLEKASSWPHRRDSGRPPGDSSGQAVAPSEGANKHKGWSRQGLRRPSILPEGSSDSRGPAVEKHPGPSDTVVFREKKPKEVMGGFSRRCSKLINSSQLLYQEYSDVVLNKEIQSQQRLESLSETPGPSSPRQPRKALVSSESYLQRLSMASSGSLWQEIPVVRNSTVLLSMTHEDQKLQEVKFELIVSEASYLRSLNIAVDHFQLSTSLRATLSNQEHQWLFSRLQDVRDVSATFLSDLEENFENNIFSFQVCDVVLNHAPDFRRVYLPYVTNQTYQERTFQSLMNSNSNFREVLEKLESDPVCQRLSLKSFLILPFQRITRLKLLLQNILKRTQPGSSEEAEATKAHHALEQLIRDCNNNVQSMRRTEELIYLSQKIEFECKIFPLISQSRWLVKSGELTALEFSASPGLRRKLNTRPVHLHLFNDCLLLSRPRESEKLRWISALAMPREELDLLECYNSPQVQCLRAYKPRENDELALEKADVVMVTQQSSDGWLEGVRLSDGERGWFPVQQVEFISNPEVRAQNLKEAHRVKTAKLQLVEQQA

SEQ ID NO: 61821 - protein, 985 aa, Homo sapiens
MSRIESLTRARIDRSRELASKTREKEKMKEAKDARYTNGHLFTTISVSGMTMCYACNKSITAKEALICPTCNVTIHNRCKDTLANCTKVKQKQQKAALLKNNTALQSVSLRSKTTIRERPSSAIYPSDSFRQSLLGSRRGRSSLSLAKSVSTTNIAGHFNDESPLGLRRILSQSTDSLNMRNRTLSVESLIDEEVIYSELMSDFEMDEKDFAADSWSLAVDSSFLQQHKKEVMKQQDVIYELIQTELHHVRTLKIMTRLFRTGMLEELHLEPGVVQGLFPCVDELSDIHTRFLSQLLERRRQALCPGSTRNFVIHRLGDLLISQFSGPSAEQMCKTYSEFCSRHSKALKLYKELYARDKRFQQFIRKVTRPAVLKRHGVQECILLVTQRITKYPLLISRILQHSHGIEEERQDLTTALGLVKELLSNVDEGIYQLEKGARLQEIYNRMDPRAQTPVPGKGPFGREELLRRKLIHDGCLLWKTATGRFKDVLVLLMTDVLVFLQEKDQKYIFPTLDKPSVVSLQNLIVRDIANQEKGMFLISAAPPEMYEVHTASRDDRSTWIRVIQQSVRTCPSREDFPLIETEDEAYLRRIKMELQQKDRALVELLREKVGLFAEMTHFQAEEDGGSGMALPTLPRGLFRSESLESPRGERLLQDAIREVEGLKDLLVGPGVELLLTPREPALPLEPDSGGNTSPGVTANGEARTFNGSIELCRADSDSSQRDRNGNQLRSPQEEALQRLVNLYGLLHGLQAAVAQQDTLMEARFPEGPERREKLCRANSRDGEAGRAGAAPVAPEKQATELALLQRQHALLQEELRRCRRLGEERATEAGSLEARLRESEQARALLEREAEEARRQLAALGQTEPLPAEAPWARRPVDPRRRSLPAGDALYLSFNPPQPSRGTDRLDLPVTTRSVHRNFEDRERQELGSPEERLQDSSDPDTGSEEEGSSRLSPPHSPRDFTRMQDIPEETESRDGEAVASES

SEQ ID NO: 61822 - protein, 958 aa, Homo sapiens
MKEAKDARYTNGHLFTTISVSGMTMCYACNKSITAKEALICPTCNVTIHNRCKDTLANCTKVKQKQQKAALLKNNTALQSVSLRSKTTIRERPSSAIYPSDSFRQSLLGSRRGRSSLSLAKSVSTTNIAGHFNDESPLGLRRILSQSTDSLNMRNRTLSVESLIDEEVIYSELMSDFEMDEKDFAADSWSLAVDSSFLQQHKKEVMKQQDVIYELIQTELHHVRTLKIMTRLFRTGMLEELHLEPGVVQGLFPCVDELSDIHTRFLSQLLERRRQALCPGSTRNFVIHRLGDLLISQFSGPSAEQMCKTYSEFCSRHSKALKLYKELYARDKRFQQFIRKVTRPAVLKRHGVQECILLVTQRITKYPLLISRILQHSHGIEEERQDLTTALGLVKELLSNVDEGIYQLEKGARLQEIYNRMDPRAQTPVPGKGPFGREELLRRKLIHDGCLLWKTATGRFKDVLVLLMTDVLVFLQEKDQKYIFPTLDKPSVVSLQNLIVRDIANQEKGMFLISAAPPEMYEVHTASRDDRSTWIRVIQQSVRTCPSREDFPLIETEDEAYLRRIKMELQQKDRALVELLREKVGLFAEMTHFQAEEDGGSGMALPTLPRGLFRSESLESPRGERLLQDAIREVEGLKDLLVGPGVELLLTPREPALPLEPDSGGNTSPGVTANGEARTFNGSIELCRADSDSSQRDRNGNQLRSPQEEALQRLVNLYGLLHGLQAAVAQQDTLMEARFPEGPERREKLCRANSRDGEAGRAGAAPVAPEKQATELALLQRQHALLQEELRRCRRLGEERATEAGSLEARLRESEQARALLEREAEEARRQLAALGQTEPLPAEAPWARRPVDPRRRSLPAGDALYLSFNPPQPSRGTDRLDLPVTTRSVHRNFEDRERQELGSPEERLQDSSDPDTGSEEEGSSRLSPPHSPRDFTRMQDIPEETESRDGEAVASES

SEQ ID NO: 61823 - protein, 986 aa, Homo sapiens
MSRIESLTRARIDRSRELASKTREKEKMKEAKDARYTNGHLFTTISVSGMTMCYACNKSITAKEALICPTCNVTIHNRCKDTLANCTKVKQKQQKAALLKNNTALQSVSLRSKTTIRERPSSAIYPSDSFRQSLLGSRRGRSSLSLAKSVSTTNIAGHFNDESPLGLRRILSQSTDSLNMRNRTLSVESLIDEAEVIYSELMSDFEMDEKDFAADSWSLAVDSSFLQQHKKEVMKQQDVIYELIQTELHHVRTLKIMTRLFRTGMLEELHLEPGVVQGLFPCVDELSDIHTRFLSQLLERRRQALCPGSTRNFVIHRLGDLLISQFSGPSAEQMCKTYSEFCSRHSKALKLYKELYARDKRFQQFIRKVTRPAVLKRHGVQECILLVTQRITKYPLLISRILQHSHGIEEERQDLTTALGLVKELLSNVDEGIYQLEKGARLQEIYNRMDPRAQTPVPGKGPFGREELLRRKLIHDGCLLWKTATGRFKDVLVLLMTDVLVFLQEKDQKYIFPTLDKPSVVSLQNLIVRDIANQEKGMFLISAAPPEMYEVHTASRDDRSTWIRVIQQSVRTCPSREDFPLIETEDEAYLRRIKMELQQKDRALVELLREKVGLFAEMTHFQAEEDGGSGMALPTLPRGLFRSESLESPRGERLLQDAIREVEGLKDLLVGPGVELLLTPREPALPLEPDSGGNTSPGVTANGEARTFNGSIELCRADSDSSQRDRNGNQLRSPQEEALQRLVNLYGLLHGLQAAVAQQDTLMEARFPEGPERREKLCRANSRDGEAGRAGAAPVAPEKQATELALLQRQHALLQEELRRCRRLGEERATEAGSLEARLRESEQARALLEREAEEARRQLAALGQTEPLPAEAPWARRPVDPRRRSLPAGDALYLSFNPPQPSRGTDRLDLPVTTRSVHRNFEDRERQELGSPEERLQDSSDPDTGSEEEGSSRLSPPHSPRDFTRMQDIPEETESRDGEAVASES

SEQ ID NO: 61824 - protein, 987 aa, Homo sapiens
MCCCCGCCPLLAHLEQGSLRERTREKEKMKEAKDARYTNGHLFTTISVSGMTMCYACNKSITAKEALICPTCNVTIHNRCKDTLANCTKVKQKQQKAALLKNNTALQSVSLRSKTTIRERPSSAIYPSDSFRQSLLGSRRGRSSLSLAKSVSTTNIAGHFNDESPLGLRRILSQSTDSLNMRNRTLSVESLIDEAEVIYSELMSDFEMDEKDFAADSWSLAVDSSFLQQHKKEVMKQQDVIYELIQTELHHVRTLKIMTRLFRTGMLEELHLEPGVVQGLFPCVDELSDIHTRFLSQLLERRRQALCPGSTRNFVIHRLGDLLISQFSGPSAEQMCKTYSEFCSRHSKALKLYKELYARDKRFQQFIRKVTRPAVLKRHGVQECILLVTQRITKYPLLISRILQHSHGIEEERQDLTTALGLVKELLSNVDEGIYQLEKGARLQEIYNRMDPRAQTPVPGKGPFGREELLRRKLIHDGCLLWKTATGRFKDVLVLLMTDVLVFLQEKDQKYIFPTLDKPSVVSLQNLIVRDIANQEKGMFLISAAPPEMYEVHTASRDDRSTWIRVIQQSVRTCPSREDFPLIETEDEAYLRRIKMELQQKDRALVELLREKVGLFAEMTHFQAEEDGGSGMALPTLPRGLFRSESLESPRGERLLQDAIREVEGLKDLLVGPGVELLLTPREPALPLEPDSGGNTSPGVTANGEARTFNGSIELCRADSDSSQRDRNGNQLRSPQEEALQRLVNLYGLLHGLQAAVAQQDTLMEARFPEGPERREKLCRANSRDGEAGRAGAAPVAPEKQATELALLQRQHALLQEELRRCRRLGEERATEAGSLEARLRESEQARALLEREAEEARRQLAALGQTEPLPAEAPWARRPVDPRRRSLPAGDALYLSFNPPQPSRGTDRLDLPVTTRSVHRNFEDRERQELGSPEERLQDSSDPDTGSEEEGSSRLSPPHSPRDFTRMQDIPEETESRDGEAVASES

SEQ ID NO: 61825 - protein, 958 aa, Homo sapiens; identical to SEQ ID NO: 61822

SEQ ID NO: 61826 - protein, 515 aa, Homo sapiens
MLSKSVPVSGINCLLDRSDTDGNVSQSSAIDLRKRCSQLEGHSGTRVGSSLRQTFSFLSGMTGKAKTREKEKMKEAKDARYTNGHLFTTISVSGMTMCYACNKSITAKEALICPTCNVTIHNRCKDTLANCTKVKQKQQKAALLKNNTALQSVSLRSKTTIRERPSSAIYPSDSFRQSLLGSRRGRSSLSLAKSVSTTNIAGHFNDESPLGLRRILSQSTDSLNMRNRTLSVESLIDEAEVIYSELMSDFEMDEKDFAADSWSLAVDSSFLQQHKKEVMKQQDVIYELIQTELHHVRTLKIMTRLFRTGMLEELHLEPGVVQGLFPCVDELSDIHTRFLSQLLERRRQALCPGSTRNFVIHRLGDLLISQFSGPSAEQMCKTYSEFCSRHSKALKLYKELYARDKRFQQFIRKVTRPAVLKRHGVQECILLVTQRITKYPLLISRILQHSHGIEEERQDLTTALGLVKELLSNVDEGIYQLEKGARLQEIYNLLLLFSLSPSFMEALGDNLASWS

SEQ ID NO: 61827 - protein, 443 aa, Homo sapiens
MKEAKDARYTNGHLFTTISVSGMTMCYACNKSITAKEALICPTCNVTIHNRCKDTLANCTKVKQKQQKAALLKNNTALQSVSLRSKTTIRERPSSAIYPSDSFRQSLLGSRRGRSSLSLAKSVSTTNIAGHFNDESPLGLRRILSQSTDSLNMRNRTLSVESLIDEAEVIYSELMSDFEMDEKDFAADSWSLAVDSSFLQQHKKEVMKQQDVIYELIQTELHHVRTLKIMTRLFRTGMLEELHLEPGVVQGLFPCVDELSDIHTRFLSQLLERRRQALCPGSTRNFVIHRLGDLLISQFSGPSAEQMCKTYSEFCSRHSKALKLYKELYARDKRFQQFIRKVTRPAVLKRHGVQECILLVTQRITKYPLLISRILQHSHGIEEERQDLTTALGLVKELLSNVDEGIYQLEKGARLQEIYNLLLLFSLSPSFMEALGDNLASWS

SEQ ID NO: 61828 - protein, 1388 aa, Homo sapiens
MSRPPPTGKMPGAPETAPGDGAGASRQRKLEALIRDPRSPINVESLLDGLNSLVLDLDFPALRKNKNIDNFLNRYEKIVKKIRGLQMKAEDYDVVKVIGRGAFGEVQLVRHKASQKVYAMKLLSKFEMIKRSDSAFFWEERDIMAFANSPWVVQLFYAFQDDRYLYMVMEYMPGGDLVNLMSNYDVPEKWAKFYTAEVVLALDAIHSMGLIHRDVKPDNMLLDKHGHLKLADFGTCMKMDETGMVHCDTAVGTPDYISPEVLKSQGGDGFYGRECDWWSVGVFLYEMLVGDTPFYADSLVGTYSKIMDHKNSLCFPEDAEISKHAKNLICAFLTDREVRLGRNGVEEIRQHPFFKNDQWHWDNIRETAAPVVPELSSDIDSSNFDDIEDDKGDVETFPIPKAFVGNQLPFIGFTYYRENLLLSDSPSCRETDSIQSRKNEESQEIQKKLYTLEEHLSNEMQAKEELEQKCKSVNTRLEKTAKELEEEITLRKSVESALRQLEREKALLQHKNAEYQRKADHEADKKRNLENDVNSLKDQLEDLKKRNQNSQISTEKVNQLQRQLDETNALLRTESDTAARLRKTQAESSKQIQQLESNNRDLQDKNCLLETAKLKLEKEFINLQSALESERRDRTHGSEIINDLQGRICGLEEDLKNGKILLAKVELEKRQLQERFTDLEKEKSNMEIDMTYQLKVIQQSLEQEEAEHKATKARLADKNKIYESIEEAKSEAMKEMEKKLLEERTLKQKVENLLLEAEKRCSLLDCDLKQSQQKINELLKQKDVLNEDVRNLTLKIEQETQKRCLTQNDLKMQTQQVNTLKMSEKQLKQENNHLMEMKMNLEKQNAELRKERQDADGQMKELQDQLEAEQYFSTLYKTQVRELKEECEEKTKLGKELQQKKQELQDERDSLAAQLEITLTKADSEQLARSIAEEQYSDLEKEKIMKELEIKEMMARHKQELTEKDATIASLEETNRTLTSDVANLANEKEELNNKLKDVQEQLSRLKDEEISAAAIKAQFEKQLLTERTLKTQAVNKLAEIMNRKEPVKRGNDTDVRRKEKENRKLHMELKSEREKLTQQMIKYQKELNEMQAQIAEESQIRIELQMTLDSKDSDIEQLRSQLQALHIGLDSSSIGSGPGDAEADDGFPESRLEGWLSLPVRNNTKKFGWVKKYVIVSSKKILFYDSEQDKEQSNPYMVLDIDKLFHVRPVTQTDVYRADAKEIPRIFQILYANEGESKKEQEFPVEPVGEKSNYICHKGHEFIPTLYHFPTNCEACMKPLWHMFKPPPALECRRCHIKCHKDHMDKKEEIIAPCKVYYDISTAKNLLLLANSTEEQQKWVSRLVKKIPKKPPAPDPFARSSPRTSMKIQQNQSIRRPSRQLAPNKPS

SEQ ID NO: 61829 - protein, 746 aa, Homo sapiens
MIYKVECGLEEDLKNGKILLAKVELEKRQLQERFTDLEKEKSNMEIDMTYQLKVIQQSLEQEEAEHKATKARLADKNKIYESIEEAKSEAMKEMEKKLLEERTLKQKVENLLLEAEKRCSLLDCDLKQSQQKINELLKQKDVLNEDVRNLTLKIEQETQKRCLTQNDLKMQTQQVNTLKMSEKQLKQENNHLMEMKMNLEKQNAELRKERQDADGQMKELQDQLEAEQYFSTLYKTQVRELKEECEEKTKLGKELQQKKQELQDERDSLAAQLEITLTKADSEQLARSIAEEQYSDLEKEKIMKELEIKEMMARHKQELTEKDATIASLEETNRTLTSDVANLANEKEELNNKLKDVQEQLSRLKDEEISAAAIKAQFEKQLLTERTLKTQAVNKLAEIMNRKEPVKRGNDTDVRRKEKENRKLHMELKSEREKLTQQMIKYQKELNEMQAQIAEESQIRIELQMTLDSKDSDIEQLRSQLQALHIGLDSSSIGSGPGDAEADDGFPESRLEGWLSLPVRNNTKKFGWVKKYVIVSSKKILFYDSEQDKEQSNPYMVLDIDKLFHVRPVTQTDVYRADAKEIPRIFQILYANEGESKKEQEFPVEPVGEKSNYICHKGHEFIPTLYHFPTNCEACMKPLWHMFKPPPALECRRCHIKCHKDHMDKKEEIIAPCKVYYDISTAKNLLLLANSTEEQQKWVSRLVKKIPKKPPAPDPFARSSPRTSMKIQQNQSIRRPSRQLAPNKPS

SEQ ID NO: 61830 - protein, 1145 aa, Homo sapiens
MVHCDTAVGTPDYISPEVLKSQGGDGFYGRECDWWSVGVFLYEMLVGDTPFYADSLVGTYSKIMDHKNSLCFPEDAEISKHAKNLICAFLTDREVRLGRNGVEEIRQHPFFKNDQWHWDNIRETAAPVVPELSSDIDSSNFDDIEDDKGDVETFPIPKAFVGNQLPFIGFTYYRENLLLSDSPSCRETDSIQSRKNEESQEIQKKLYTLEEHLSNEMQAKEELEQKCKSVNTRLEKTAKELEEEITLRKSVESALRQLEREKALLQHKNAEYQRKADHEADKKRNLENDVNSLKDQLEDLKKRNQNSQISTEKVNQLQRQLDETNALLRTESDTAARLRKTQAESSKQIQQLESNNRDLQDKNCLLETAKLKLEKEFINLQSALESERRDRTHGSEIINDLQGRICGLEEDLKNGKILLAKVELEKRQLQERFTDLEKEKSNMEIDMTYQLKVIQQSLEQEEAEHKATKARLADKNKIYESIEEAKSEAMKEMEKKLLEERTLKQKVENLLLEAEKRCSLLDCDLKQSQQKINELLKQKDVLNEDVRNLTLKIEQETQKRCLTQNDLKMQTQQVNTLKMSEKQLKQENNHLMEMKMNLEKQNAELRKERQDADGQMKELQDQLEAEQYFSTLYKTQVRELKEECEEKTKLGKELQQKKQELQDERDSLAAQLEITLTKADSEQLARSIAEEQYSDLEKEKIMKELEIKEMMARHKQELTEKDATIASLEETNRTLTSDVANLANEKEELNNKLKDVQEQLSRLKDEEISAAAIKAQFEKQLLTERTLKTQAVNKLAEIMNRKEPVKRGNDTDVRRKEKENRKLHMELKSEREKLTQQMIKYQKELNEMQAQIAEESQIRIELQMTLDSKDSDIEQLRSQLQALHIGLDSSSIGSGPGDAEADDGFPESRLEGWLSLPVRNNTKKFGWVKKYVIVSSKKILFYDSEQDKEQSNPYMVLDIDKLFHVRPVTQTDVYRADAKEIPRIFQILYANEGESKKEQEFPVEPVGEKSNYICHKGHEFIPTLYHFPTNCEACMKPLWHMFKPPPALECRRCHIKCHKDHMDKKEEIIAPCKVYYDISTAKNLLLLANSTEEQQKWVSRLVKKIPKKPPAPDPFARSSPRTSMKIQQNQSIRRPSRQLAPNKPS

SEQ ID NO: 61831 - protein, 855 aa, Homo sapiens
MSEARRDSTSSLQRKKPPWLKLDIPSAVPLTAEEPSFLQPLRRQAFLRSVSMPAETAHISSPHHELRRPVLQRQTSITQTIRRGTADWFGVSKDSDSTQKWQRKSIRHCSQRYGKLKPQVLRELDLPSQDNVSLTSTETPPPLYVGPCQLGMQKIIDPLARGRAFRVADDTAEGLSAPHTPVTPGAASLCSFSSSRSGFHRLPRRRKRESVAKMSFRAAAALMKGRSVRDGTFRRAQRRSFTPASFLEEDTTDFPDELDTSFFAREGILHEELSTYPDEVFESPSEAALKDWEKAPEQADLTGGALDRSELERSHLMLPLERGWRKQKEGAAAPQPKVRLRQEVVSTAGPRRGQRIAVPVRKLFAREKRPYGLGMVGRLTNRTYRKRIDSFVKRQIEDMDDHRPFFTYWLTFVHSLVTILAVCIYGIAPVGFSQHETVDSVLRNRGVYENVKYVQQENFWIGPSSEALIHLGAKFSPCMRQDPQVHSFIRSAREREKHSACCVRNDRSGCVQTSEEECSSTLAVWVKWPIHPSAPELAGHKRQFGSVCHQDPRVCDEPSSEDPHEWPEDITKWPICTKNSAGNHTNHPHMDCVITGRPCCIGTKGRCEITSREYCDFMRGYFHEEATLCSQVHCMDDVCGLLPFLNPEVPDQFYRLWLSLFLHAGILHCLVSICFQMTVLRDLEKLAGWHRIAIIYLLSGVTGNLASAIFLPYRAEVGPAGSQFGILACLFVELFQSWQILARPWRAFFKLLAVVLFLFTFGLLPWIDNFAHISGFISGLFLSFAFLPYISFGKFDLYRKRCQIIIFQVVFLGLLAGLVVLFYVYPVRCEWCEFLTCIPFTDKFCEKYELDAQLH

SEQ ID NO: 61832 - protein, 190 aa, Homo sapiens
MSEARRDSTSSLQRKKPPWLKLDIPSAVPLTAEEPSFLQPLRRQAFLRSVSMPAETAHISSPHHELRRPVLQRQTSITQTIRSSRQVRFGRVHTLPLLGPRAARRAFPQRQSLSWSLLRGTADWFGVSKDSDSTQKWQRKSIRHCSQRYGKLKPQVLRELDLPSQDNVSLTSTETPPPLYVGPCQLGMQK

SEQ ID NO: 61833 - protein, 232 aa, Homo sapiens
  VARIANT 1: note = MOD_RES - Any amino acid
XRPCCIGTKGRCEITSREYCDFMRGYFHEEATLCSQVHCMDDVCGLLPFLNPEMTVLRDLEKLAGWHRIAIIYLLSGVTGNLASAIFLPYRAEVGPAGSQFGILACLFVELFQSWQILARPWRAFFKLLAVVLFLFTFGLLPWIDNFAHISGFISGLFLSFAFLPYISFGKFDLYRKRCQIIIFQVVFLGLLAGLVVLFYVYPVRCEWCEFLTCIPFTDKFCEKYELDAQLH

SEQ ID NO: 61834 - protein, 163 aa, Homo sapiens
MSEARRDSTSSLQRKKPPWLKLDIPSAVPLTAEEPSFLQPLRRQAFLRSVSMPAETAHISSPHHELRRPVLQRQTSITQTIRRGTADWFGVSKDSDSTQKWQRKSIRHCSQRYGKLKPQVLRELDLPSQDNVSLTSTETPPPLYVGPCQLGMQKIIDPLARGR

SEQ ID NO: 61835 - protein, 579 aa, Homo sapiens
MSEARRDSTSSLQRKKPPWLKLDIPSAVPLTAEEPSFLQPLRRQAFLRSVSMPAETAHISSPHHELRRPVLQRQTSITQTIRRGTADWFGVSKDSDSTQKWQRKSIRHCSQRYGKLKPQVLRELDLPSQDNVSLTSTETPPPLYVGPCQLGMQKIIDPLARGRAFRVADDTAEGLSAPHTPVTPGAASLCSFSSSRSGFHRLPRRRKRESVAKMSFRAAAALMKGRSVRDGTFRRAQRRSFTPASFLEEDTTDFPDELDTSFFAREGILHEELSTYPDEVFESPSEAALKDWEKAPEQADLTGGALDRSELERSHLMLPLERGWRKQKEGAAAPQPKVRLRQEVVSTAGPRRGQRIAVPVRKLFAREKRPYGLGMVGRLTNRTYRKRIDSFVKRQIEDMDDHRPFFTYWLTFVHSLVTILAVCIYGIAPVGFSQHETVDSVLRNRGVYENVKYVQQENFWIGPSSVRTGLGAGPAGAGPGGARRGQEAPDCGRSSPSPAGGPHPPGRQVFALHAPGPAGAQLHSLGARAREALRLLRAQRQVGLRADLGGGVLGAFPRPGLPPSSARCSLFRPQIDSAE

SEQ ID NO: 61836 - protein, 856 aa, Homo sapiens
MASADKNGGSVSSVSSSRLQSRKPPNLSITIPPPEKETQAPGEQDSMLPEGFQNRRLKKSQPRTWAAHTTACPPSFLPKRKNPAYLKSVSLQEPRSRWQESSEKRPGFRRQASLSQSIRKGAAQWFGVSGDWEGQRQQWQRRSLHHCSMRYGRLKASCQRDLELPSQEAPSFQGTESPKPCKMPKIVDPLARGRAFRHPEEMDRPHAPHPPLTPGVLSLTSFTSVRSGYSHLPRRKRMSVAHMSLQAAAALLKGRSVLDATGQRCRVVKRSFAFPSFLEEDVVDGADTFDSSFFSKEEMSSMPDDVFESPPLSASYFRGIPHSASPVSPDGVQIPLKEYGRAPVPGPRRGKRIASKVKHFAFDRKKRHYGLGVVGNWLNRSYRRSISSTVQRQLESFDSHRPYFTYWLTFVHVIITLLVICTYGIAPVGFAQHVTTQLVLRNKGVYESVKYIQQENFWVGPSSIDLIHLGAKFSPCIRKDGQIEQLVLRERDLERDSGCCVQNDHSGCIQTQRKDCSETLATFVKWQDDTGPPMDKSDLGQKRTSGAVCHQDPRTCEEPASSGAHIWPDDITKWPICTEQARSNHTGFLHMDCEIKGRPCCIGTKGSCEITTREYCEFMHGYFHEEATLCSQVHCLDKVCGLLPFLNPEVPDQFYRLWLSLFLHAGVVHCLVSVVFQMTILRDLEKLAGWHRIAIIFILSGITGNLASAIFLPYRAEVGPAGSQFGLLACLFVELFQSWPLLERPWKAFLNLSAIVLFLFICGLLPWIDNIAHIFGFLSGLLLAFAFLPYITFGTSDKYRKRALILVSLLAFAGLFAALVLWLYIYPINWPWIEHLTCFPFTSRFCEKYELDQVLH

SEQ ID NO: 61837 - protein, 827 aa, Homo sapiens
MASADKNGGSVSSVSSSRLQSRKPPNLSITIPPPEKETQAPGEQDSMLPERKNPAYLKSVSLQEPRSRWQESSEKRPGFRRQASLSQSIRKGAAQWFGVSGDWEGQRQQWQRRSLHHCSMRYGRLKASCQRDLELPSQEAPSFQGTESPKPCKMPKIVDPLARGRAFRHPEEMDRPHAPHPPLTPGVLSLTSFTSVRSGYSHLPRRKRMSVAHMSLQAAAALLKGRSVLDATGQRCRVVKRSFAFPSFLEEDVVDGADTFDSSFFSKEEMSSMPDDVFESPPLSASYFRGIPHSASPVSPDGVQIPLKEYGRAPVPGPRRGKRIASKVKHFAFDRKKRHYGLGVVGNWLNRSYRRSISSTVQRQLESFDSHRPYFTYWLTFVHVIITLLVICTYGIAPVGFAQHVTTQLVLRNKGVYESVKYIQQENFWVGPSSIDLIHLGAKFSPCIRKDGQIEQLVLRERDLERDSGCCVQNDHSGCIQTQRKDCSETLATFVKWQDDTGPPMDKSDLGQKRTSGAVCHQDPRTCEEPASSGAHIWPDDITKWPICTEQARSNHTGFLHMDCEIKGRPCCIGTKGSCEITTREYCEFMHGYFHEEATLCSQVHCLDKVCGLLPFLNPEVPDQFYRLWLSLFLHAGVVHCLVSVVFQMTILRDLEKLAGWHRIAIIFILSGITGNLASAIFLPYRAEVGPAGSQFGLLACLFVELFQSWPLLERPWKAFLNLSAIVLFLFICGLLPWIDNIAHIFGFLSGLLLAFAFLPYITFGTSDKYRKRALILVSLLAFAGLFAALVLWLYIYPINWPWIEHLTCFPFTSRFCEKYELDQVLH

SEQ ID NO: 61838 - protein, 716 aa, Homo sapiens
PGSSRSRHPLLLLIWSLGSSQGPHRQIRPPPPCRHAGTHVPSPLPHTQVHRRRQAYAHLSLVCFRRGAAQWFGVSGDWEGQRQQWQRRSLHHCSMRYGRLKASCQRDLELPSQEAPSFQGTESPKPCKMPKIVDPLARGRAFRHPEEMDRPHAPHPPLTPGVLSLTSFTSVRSGYSHLPRRKRMSVAHMSLQAAAALLKGRSVLDATGQRCRVVKRSFAFPSFLEEDVVDGADTFDSSFFSKEEMSSMPDDVFESPPLSASYFRGIPHSASPVSPDGVQIPLKEYGRAPVPGPRRGKRIASKVKHFAFDRKKRHYGLGVVGNWLNRSYRRSISSTVQRQLESFDSHRPYFTYWLTFVHVIITLLVICTYGIAPVGFAQHVTTQLVLRNKGVYESVKYIQQENFWVGPSSIDLIHLGAKFSPCIRKDGQIEQLVLRERDLERDSGCCVQNDHSGCIQTQRKDCSETLATFVKWQDDTGPPMDKSDLGQKRTSGAVCHQDPRTCEEPASSGAHIWPDDITKWPICTEQARSNHTGFLHMDCEIKGRPCCIGTKGSCEITTREYCEFMHGYFHEEATLCSQVHCLDKVCGLLPFLNPEVPDQFYRLWLSLFLHAGVVHCLVSVVFQMTILRDLEKLAGWHRIAIIFILSGITGNLASAIFLPYRAEVRMWRMGPLPHIGGQPCCSYSTHLGSARGTRCPSCTGLHSGGTANLGAYWLVS

SEQ ID NO: 61839 - protein, 212 aa, Homo sapiens
MAQTDKPTCIPPELPKMLKEFAKAAIRVQPQDLIQWAADYFEALSRGETPPVRERSERVALCNRAELTPELLKILHSQVAGRLIIRAEELAQMWKVVNLPTDLFNSVMNVGRFTEEIEWLKFLALACSALGVTITKTLKIVCEVLSCDHNGGSPRIPFSTFQFLYTYIAKVDGEISASHVSRMLNYMEQEVIGPDGIITVNDFTQNPRVQLE

SEQ ID NO: 61840 - protein, 212 aa, Homo sapiens; identical to SEQ ID NO: 61839

SEQ ID NO: 61841 - protein, 116 aa, Homo sapiens
MAQTDKPTCIPPELPKMLKEFAKAAIRVQPQDLIQWAADYFEALSRGETPPVRERSERVALCNRAELTPELLKILHSQVAGRLIIRAEELAQMWKVVNLPTDLFNSVMNVGRFTEE

SEQ ID NO: 61842 - protein, 130 aa, Homo sapiens
MAQTDKPTCIPPELPKMLKEFAKAAIRVQPQDLIQWAADYFEALSRGETPPVRERSERVALCNRAELTPELLKILHSQVAGRLIIRAEELAQMWKVVNLPTDLFNSVMNVGRFTEEIEWLKFLALACSAL

SEQ ID NO: 61843 - protein, 103 aa, Homo sapiens
MAQTDKPTCIPPELPKMLKEFAKAAIRVQPQDLIQWAADYFEALSRGETPPVRERSERVALCNRAELTPELLKILHSQVAGRLIIRAEELAQMWKVVNLPTDL

SEQ ID NO: 61844 - protein, 77 aa, Homo sapiens
MAQTDKPTCIPPELPKMLKEFAKAAIRVQPQDLIQWAADYFEALSRGETPPVRERSERVALCNRAELTPELLKILHS

SEQ ID NO: 61845 - protein, 230 aa, Homo sapiens
MPLPDTMFCAQQIHIPPELPDILKQFTKAAIRTQPADVLRWSAGYFSALSRGDPLPVKDRMEMPTATQKTDTGLTQGLLKVLHKQCHHKRYVELTDLEQKWKNLCLPKEKFKALLQLDPCENKIKWINFLALGCSMLGGSLNTALKHLCEILTDDPEGGPARIPFKTFSYVYRYLARLDSDVSPLETESYLASLKENIDARKNGMIGLSDFFFPKRKLLESIENSEDVGH

SEQ ID NO: 61846 - protein, 230 aa, Homo sapiens; identical to SEQ ID NO: 61845

SEQ ID NO: 61847 - protein, 696 aa, Homo sapiens
MDADMDYERPNVETIKCVVVGDNAVGKTRLICARACNTTLTQYQLLATHVPTVWAIDQYRVCQEVLERSRDVVDEVSVSLRLWDTFGDHHKDRRFAYGRSDVVVLCFSIANPNSLNHVKSMWYPEIKHFCPRTPVILVGCQLDLRYADLEAVNRARRPLARPIKRGDILPPEKGREVAKELGLPYYETSVFDQFGIKDVFDNAIRAALISRRHLQFWKSHLKKVQKPLLQAPFLPPKAPPPVIKIPECPSMGTNEAACLLDNPLCADVLFILQDQEHIFAHRIYLATSSSKFYDLFLMECEESPNGSEGACEKEKQSRDFQGRILSVDPEEEREEGPPRIPQADQWKSSNKSLVEALGLEAEGAVPETQTLTGWSKGFIGMHREMQVNPISKRMGPMTVVRMDASVQPGPFRTLLQFLYTGQLDEKEKDLVGLAQIAEVLEMFDLRMMVENIMNKEAFMNQEITKAFHVRKANRIKECLSKGTFSDVTFKLDDGAISAHKPLLICSCEWMAAMFGGSFVESANSEVYLPNINKISMQAVLDYLYTKQLSPNLDLDPLELIALANRFCLPHLVALAEQHAVQELTKAATSGVGIDGEVLSYLELAQFHNAHQLAAWCLHHICTNYNSVCSKFRKEIKSKSADNQEYFERHRWPPVWYLKEEDHYQRVKREREKEDIALNKHRSRRKWCFWNSSPAVA

SEQ ID NO: 61848 - protein, 696 aa, Homo sapiens; identical to SEQ ID NO: 61847

SEQ ID NO: 61849 - protein, 99 aa, Homo sapiens
MDADMDYERPNVETIKCVVVGDNAVGKTRLICARACNTTLTQYQLLATHVPTVWAIDQYRVCQEVLERSRDVVDEVSVSLRLWDTFGDHHKDRRFAYGR

SEQ ID NO: 61850 - protein, 727 aa, Homo sapiens
MDSDMDYERPNVETIKCVVVGDNAVGKTRLICARACNATLTQYQLLATHVPTVWAIDQYRVCQEVLERSRDVVDDVSVSLRLWDTFGDHHKDRRFAYGRSDVVVLCFSIANPNSLHHVKTMWYPEIKHFCPRAPVILVGCQLDLRYADLEAVNRARRPLARPIKPNEILPPEKGREVAKELGIPYYETSVVAQFGIKDVFDNAIRAALISRRHLQFWKSHLRNVQRPLLQAPFLPPKPPPPIIVVPDPPSSSEECPAHLLEDPLCADVILVLQERVRIFAHKIYLSTSSSKFYDLFLMDLSEGELGGPSEPGGTHPEDHQGHSDQHHHHHHHHHGRDFLLRAASFDVCESVDEAGGSGPAGLRASTSDGILRGNGTGYLPGRGRVLSSWSRAFVSIQEEMAEDPLTYKSRLMVVVKMDSSIQPGPFRAVLKYLYTGELDENERDLMHIAHIAELLEVFDLRMMVANILNNEAFMNQEITKAFHVRRTNRVKECLAKGTFSDVTFILDDGTISAHKPLLISSCDWMAAMFGGPFVESSTREVVFPYTSKSCMRAVLEYLYTGMFTSSPDLDDMKLIILANRLCLPHLVALTEQYTVTGLMEATQMMVDIDGDVLVFLELAQFHCAYQLADWCLHHICTNYNNVCRKFPRDMKAMSPENQEYFEKHRWPPVWYLKEEDHYQRARKEREKEDYLHLKRQPKRRWLFWNSPSSPSSSAASSSSPSSSSAVV

SEQ ID NO: 61851 - protein, 749 aa, Homo sapiens
MQAWRKGPDGPQKTSSDSMSRLMDSDMDYERPNVETIKCVVVGDNAVGKTRLICARACNATLTQYQLLATHVPTVWAIDQYRVCQEVLERSRDVVDDVSVSLRLWDTFGDHHKDRRFAYGRSDVVVLCFSIANPNSLHHVKTMWYPEIKHFCPRAPVILVGCQLDLRYADLEAVNRARRPLARPIKPNEILPPEKGREVAKELGIPYYETSVVAQFGIKDVFDNAIRAALISRRHLQFWKSHLRNVQRPLLQAPFLPPKPPPPIIVVPDPPSSSEECPAHLLEDPLCADVILVLQERVRIFAHKIYLSTSSSKFYDLFLMDLSEGELGGPSEPGGTHPEDHQGHSDQHHHHHHHHHGRDFLLRAASFDVCESVDEAGGSGPAGLRASTSDGILRGNGTGYLPGRGRVLSSWSRAFVSIQEEMAEDPLTYKSRLMVVVKMDSSIQPGPFRAVLKYLYTGELDENERDLMHIAHIAELLEVFDLRMMVANILNNEAFMNQEITKAFHVRRTNRVKECLAKGTFSDVTFILDDGTISAHKPLLISSCDWMAAMFGGPFVESSTREVVFPYTSKSCMRAVLEYLYTGMFTSSPDLDDMKLIILANRLCLPHLVALTEQYTVTGLMEATQMMVDIDGDVLVFLELAQFHCAYQLADWCLHHICTNYNNVCRKFPRDMKAMSPENQEYFEKHRWPPVWYLKEEDHYQRARKEREKEDYLHLKRQPKRRWLFWNSPSSPSSSAASSSSPSSSSAVV

SEQ ID NO: 61852 - protein, 734 aa, Homo sapiens
MKARSRLMDSDMDYERPNVETIKCVVVGDNAVGKTRLICARACNATLTQYQLLATHVPTVWAIDQYRVCQEVLERSRDVVDDVSVSLRLWDTFGDHHKDRRFAYGRSDVVVLCFSIANPNSLHHVKTMWYPEIKHFCPRAPVILVGCQLDLRYADLEAVNRARRPLARPIKPNEILPPEKGREVAKELGIPYYETSVVAQFGIKDVFDNAIRAALISRRHLQFWKSHLRNVQRPLLQAPFLPPKPPPPIIVVPDPPSSSEECPAHLLEDPLCADVILVLQERVRIFAHKIYLSTSSSKFYDLFLMDLSEGELGGPSEPGGTHPEDHQGHSDQHHHHHHHHHGRDFLLRAASFDVCESVDEAGGSGPAGLRASTSDGILRGNGTGYLPGRGRVLSSWSRAFVSIQEEMAEDPLTYKSRLMVVVKMDSSIQPGPFRAVLKYLYTGELDENERDLMHIAHIAELLEVFDLRMMVANILNNEAFMNQEITKAFHVRRTNRVKECLAKGTFSDVTFILDDGTISAHKPLLISSCDWMAAMFGGPFVESSTREVVFPYTSKSCMRAVLEYLYTGMFTSSPDLDDMKLIILANRLCLPHLVALTEQYTVTGLMEATQMMVDIDGDVLVFLELAQFHCAYQLADWCLHHICTNYNNVCRKFPRDMKAMSPENQEYFEKHRWPPVWYLKEEDHYQRARKEREKEDYLHLKRQPKRRWLFWNSPSSPSSSAASSSSPSSSSAVV

SEQ ID NO: 61853 - protein, 611 aa, Homo sapiens
MSIHIVALGNEGDTFHQDNRPSGLIRTYLGRSPLVSGDESSLLLNAASTVARPVFTEYQASAFGNVKLVVHDCPVWDIFDSDWYTSRNLIGGADIIVIKYNVNDKFSFHEVKDNYIPVIKRALNSVPVIIAAVGTRQNEELPCTCPLCTSDRGSCVSTTEGIQLAKELGATYLELHSLDDFYIGKYFGGVLEYFMIQALNQKTSEKMKKRKMSNSFHGIRPPQLEQPEKMPVLKAEASHYNSDLNNLLFCCQCVDVVFYNPNLKKVVEAHKIVLCAVSHVFMLLFNVKSPTDIQDSSIIRTTQDLFAINRDTAFPGASHESSGNPPLRVIVKDALFCSCLSDILRFIYSGAFQWEELEEDIRKKLKDSGDVSNVIEKVKCILKTPGKINCLRNCKTYQARKPLWFYNTSLKFFLNKPMLADVVFEIQGTTVPAHRAILVARCEVMAAMFNGNYMEAKSVLIPVYGVSKETFLSFLEYLYTDSCCPAGIFQAMCLLICAEMYQVSRLQHICELFIITQLQSMPSRELASMNLDIVDLLKKAKFHHSDCLSTWLLHFIATNYLIFSQKPEFQDLSVEERSFVEKHRWPSNMYLKQLAEYRKYIHSRKCRCLVM

SEQ ID NO: 61854 - protein, 117 aa, Homo sapiens
  VARIANT 1: note = MOD_RES - Any amino acid
XEMYQVSRLQHICELFIITQLQSMPSRELASMNLDIVDLLKKAKFHHSDCLSTWLLHFIATNYLIFSQKPEFQDLSVEERSFVEKHRWPSNMYLKQLAEYRKYIHSRKCRCLVIKRH

SEQ ID NO: 61855 - protein, 563 aa, Homo sapiens
MFSRNHRSRVTVARGSALEMEFKRGRFRLSLFSDLPEDTELQRKLDHEIRMREGACKLLAACSQREQALEATKSLLVCNSRILSYMGELQRRKEAQVLGKTSRRPSDSGPPAERSPCRGRVCISDLRIPLMWKDTEYFKNKGDLHRWAVFLLLQLGEHIQDTEMILVDRTLTDISFQSNVLFAEAGPDFELRLELYGACVEEEGALTGGPKRLATKLSSSLGRSSGRRVRASLDSAGGSGSSPILLPTPVVGGPRYHLLAHTTLTLAAVQDGFRTHDLTLASHEENPAWLPLYGSVCCRLAAQPLCMTQPTASGTLRVQQAGEMQNWAQVHGVLKGTNLFCYRQPEDADTGEEPLLTIAVNKETRVRAGELDQALGRPFTLSISNQYGDDEVTHTLQTESREALQSWMEALWQLFFDMSQWKQCCDEIMKIETPAPRKPPQALAKQGSLYHEMAIEPLDDIAAVTDILTQREGARLETPPPWLAMFTDQPALPNPCSPASVAPAPDWTHPLPWGRPRTFSLDAVPPDHSPRARSVAPLPPQRSPRTRGLCSKGQPRTWLQSPV

SEQ ID NO: 61856 - protein, 550 aa, Homo sapiens
MQDRLHILEDLNMLYIRQMALSLEDTELQRKLDHEIRMREGACKLLAACSQREQALEATKSLLVCNSRILSYMGELQRRKEAQVLGKTSRRPSDSGPPAERSPCRGRVCISDLRIPLMWKDTEYFKNKGDLHRWAVFLLLQLGEHIQDTEMILVDRTLTDISFQSNVLFAEAGPDFELRLELYGACVEEEGALTGGPKRLATKLSSSLGRSSGRRVRASLDSAGGSGSSPILLPTPVVGGPRYHLLAHTTLTLAAVQDGFRTHDLTLASHEENPAWLPLYGSVCCRLAAQPLCMTQPTASGTLRVQQAGEMQNWAQVHGVLKGTNLFCYRQPEDADTGEEPLLTIAVNKETRVRAGELDQALGRPFTLSISNQYGDDEVTHTLQTESREALQSWMEALWQLFFDMSQWKQCCDEIMKIETPAPRKPPQALAKQGSLYHEMAIEPLDDIAAVTDILTQREGARLETPPPWLAMFTDQPALPNPCSPASVAPAPDWTHPLPWGRPRTFSLDAVPPDHSPRARSVAPLPPQRSPRTRGLCSKGQPRTWLQSPV

SEQ ID NO: 61857 - protein, 513 aa, Homo sapiens
MREGACKLLAACSQREQALEATKSLLVCNSRILSYMGELQRRKEAQVLGKTSRRPSDSGPPAERSPCRGRVCISDLRIPLMWKDTEYFKNKGDLHRWAVFLLLQLGEHIQDTEMILVDRTLTDISFQSNVLFAEAGPDFELRLELYGACVEEEGALTGGPKRLATKLSSSLGRSSGRRVRASLDSAGGSGSSPILLPTPVVGGPRYHLLAHTTLTLAAVQDGFRTHDLTLASHEENPAWLPLYGSVCCRLAAQPLCMTQPTASGTLRVQQAGEMQNWAQVHGVLKGTNLFCYRQPEDADTGEEPLLTIAVNKETRVRAGELDQALGRPFTLSISNQYGDDEVTHTLQTESREALQSWMEALWQLFFDMSQWKQCCDEIMKIETPAPRKPPQALAKQGSLYHEMAIEPLDDIAAVTDILTQREGARLETPPPWLAMFTDQPALPNPCSPASVAPAPDWTHPLPWGRPRTFSLDAVPPDHSPRARSVAPLPPQRSPRTRGLCSKGQPRTWLQSPV

SEQ ID NO: 61858 - protein, 155 aa, Homo sapiens
MRHLPYFCRGQVVRGFGRGSKQLGIPTANFPEQVVDNLPADISTGIYYGWASVGSGDVHKMVVSIGWNPYYKNTKKSMETHIMHTFKEDFYGEILNVAIVGYLRPEKNFDSLESLISAIQGDIEEAKKRLELPEHLKIKEDNFFQVSKSKIMNGH

SEQ ID NO: 61859 - protein, 322 aa, Homo sapiens [sequence omitted]

SEQ ID NO: 61860 - protein, 286 aa, Homo sapiens
MAASGEPQRQWQEEVAAVVVVGSCMTDLVSLTSRLPKTGETIHGHKFFIGFGGKGANQCVQAARLGAMTSMVCKVGKDSFGNDYIENLKQNDISTEFTYQTKDAATGTASIIVNNEGQNIIVIVAGANLLLNTEDLRAAANVISRAKVMVCQLEITPATSLEALTMARRSGVKTLFNPAPAIADLDPQFYTLSDVFCCNESEAEILTGLTVGSAADAGEAALVLLKRGCQVVIITLGAEGCVVLSQTEPEPKHIPTEKVKAVDTTCRPGSRPKSEAASVKKQKHYK

SEQ ID NO: 61861 - protein, 286 aa, Homo sapiens
MSWLLFLAHRVALAALPCRRGSRGFGMFYAVRRGRKTGVFLTWNECRAQVDRFPAARFKKFATEDEAWAFVRKSASPEVSEGHENQHGQESEAKASKRLREPLDGDGHESAEPYAKHMKPSVEPAPPVSRDTFSYMGDFVVVYTDGCCSSNGRRRPRAGIGVYWGPGHPLNVGIRLPGRQTNQRAEIHAACKAIEQAKTQNINKLVLYTDSMFTINGITNWVQGWKKNGWKTSAGKEVINKEDFVALERLTQGMDIQWMHVPGHSGFIGNEEADRLAREGAKQSED

SEQ ID NO: 61862 - protein, 299 aa, Homo sapiens
MDLSELERDNTGRCRLSSPVPAVCRKEPCVLGVDEAGRGPVLGPMVYAICYCPLPRLADLEALKVADSKTLLESERERLFAKMEDTDFVGWALDVLSPNLISTSMLGRVKYNLNSLSHDTATGLIQYALDQGVNVTQVFVDTVGMPETYQARLQQSFPGIEVTVKAKADALYPVVSAASICAKVARDQAVKKWQFVEKLQDLDTDYGSGYPNDPKTKAWLKEHVEPVFGFPQFVRFSWRTAQTILEKEAEDVIWEDSASENQEGLRKITSYFLNEGSQARPRSSHRYFLERGLESATSL

SEQ ID NO: 61863 - protein, 312 aa, Homo sapiens
MAAGVDCGDGVGARQHVFLVSEYLKDASKKMKNGLMFVKLVNPCSGEGAIYLFNMCLQQLFEVKVFKEKHHSWFINQSVQSGGLLHFATPVDPLFLLLHYLIKADKEGKFQPLDQVVVDNVFPNCILLLKLPGLEKLLHHVTEEKGNPEIDNKKYYKYSKEKTLKWLEKKVNQTVAALKTNNVNVSSRVQSTAFFSGDQASTDKEEDYIRYAHGLISDYIPKELSDDLSKYLKLPEPSASLPNPPSKKIKLSDEPVEAKEDYTKFNTKDLKTEKKNSKMTAAQKALAKVDKSGMKSIDTFFGVKNKKKIGKV

SEQ ID NO: 61864 - protein, 257 aa, Homo sapiens
MAAGVDCGDGVGARQHVFLVSEYLKDASKKMKNGLMFVKLVNPCSGEGAIYLFNMCLQQLFEVKVFKEKHHSWFINQSVQSGGLLHFATPVDPLFLLLHYLIKADKEGKFQPLDQVVVDNVFPNCILLLKLPGLEKLLHHVTEEKGNPEIDNKKYYKYSKEKTLKWLEKKVNQTVAALKTNNVNVSSRVQSTAFFSGDQASTDKEEDYIRYAHGLISDYIPKELSDDLSKYLKLPEPSASLPNPPSKMAAQRQKRGK

SEQ ID NO: 61865 - protein, 331 aa, Homo sapiens
MAAGVDCGDGVGARQHVFLVSEYLKDASKKMKNGLMFVKLVNPCSGEGAIYLFNMCLQQLFEVKVFKEKHHSWFINQSVQSGGLLHFATPVDPLFLLLHYLIKADKEGKFQPLDQVVVDNVFPNCILLLKLPGLEKLLHHVTEEKGNPEIDNKKYYKYSKEKTLKWLEKKVNQTVAALKTNNVNVSSRVQSTAFFSGDQASTDKEEDYIRYAHGLISDYIPKELSDDLSKYLKLPEPSASLPNPPSKKIKLSDEPVEAKEDYTKFNTKDLKTEKKNSKMTAAQKALAKVDKSGMKSIDTFFGVKKKLERFETLKIKSSKNICFLHVSVCPS

SEQ ID NO: 61866 - protein, 164 aa, Homo sapiens
MESGDEAAIERHRVHLRSATLRDAVPATLHLLPCEVAVDGPAPVGRFFTPAIRQGPEGLEVSFRGRCLRGEEVAVPPGLVGYVMVTEEKKVSMGKPDPLRDSGTDDQEEEPLERDFDRFIGATANFSRFTLWGLETIPGPDAKVRGALTWPSLAAAIHAQVPED

SEQ ID NO: 61867 - protein, 741 aa, Homo sapiens
MESRDHNNPQEGPTSSSGRRAAVEDNHLLIKAVQNEDVDLVQQLLEGGANVNFQEEEGGWTPLHNAVQMSREDIVELLLRHGADPVLRKKNGATPFILAAIAGSVKLLKLFLSKGADVNECDFYGFTAFMEAAVYGKVKALKFLYKRGANVNLRRKTKEDQERLRKGGATALMDAAEKGHVEVLKILLDEMGADVNACDNMGRNALIHALLSSDDSDVEAITHLLLDHGADVNVRGERGKTPLILAVEKKHLGLVQRLLEQEHIEINDTDSDGKTALLLAVELKLKKIAELLCKRGASTDCGDLVMTARRNYDHSLVKVLLSHGAKEDFHPPAEDWKPQSSHWGAALKDLHRIYRPMIGKLKFFIDEKYKIADTSEGGIYLGFYEKQEVAVKTFCEGSPRAQREVSCLQSSRENSHLVTFYGSESHRGHLFVCVTLCEQTLEACLDVHRGEDVENEEDEFARNVLSSIFKAVQELHLSCGYTHQDLQPQNILIDSKKAAHLADFDKSIKWAGDPQEVKRDLEDLGRLVLYVVKKGSISFEDLKAQSNEEVVQLSPDEETKDLIHRLFHPGEHVRDCLSDLLGHPFFWTWESRYRTLRNVGNESDIKTRKSESEILRLLQPGPSEHSKSFDKWTTKINECVMKKMNKFYEKRGNFYQNTVGDLLKFIRNLGEHIDEEKHKKMKLKIGDPSLYFQKTFPDLVIYVYTKLQNTEYRKHFPQTHSPNKPQCDGAGGASGLASPGC

SEQ ID NO: 61868 - protein, 741 aa, Homo sapiens; identical to SEQ ID NO: 61867

SEQ ID NO: 61869 - protein, 652 aa, Homo sapiens
MESRDHNNPQEGPTSSSGRRAAVEDNHLLIKAVQNEDVDLVQQLLEGGANVNFQEEEGGWTPLHNAVQMSREDIVELLLRHGADPVLRKKNGATPFILAAIAGSVKLLKLFLSKGADVNECDFYGFTAFMEAAVYGKVKALKFLYKRGANVNLRRKTKEDQERLRKGGATALMDAAEKGHVEVLKILLDEMGADVNACDNMGRNALIHALLSSDDSDVEAITHLLLDHGADVNVRGERGKTPLILAVEKKHLGLVQRLLEQEHIEINDTDSDGKTALLLAVELKLKKIAELLCKRGASTDCGDLVMTARRNYDHSLVKVLLSHGAKEDFHPPAEDWKPQSSHWGAALKDLHRIYRPMIGKLKFFIDEKYKIADTSEGGIYLGFYEKQEVAVKTFCEGSPRAQREVSCLQSSRENSHLVTFYGSESHRGHLFVCVTLCEQTLEACLDVHRGEDVENEEDEFARNVLSSIFKAVQELHLSCGYTHQDLQPQNILIDSKKAAHLADFDKSIKWAGDPQEVKRDLEDLGRLVLYVVKKGSISFEDLKAQSNEEVVQLSPDEETKDLIHRLFHPGEHVRDCLSDLLGHPFFWTWESRYRTLRNVGNESDIKTRKSESEILRLLQPGPSEHSKSFDKWTTKMSKLRHRQIIFPTTQNQ

SEQ ID NO: 61870 - protein, 154 aa, Homo sapiens
MIGKLKFFIDEKYKIADTSEGGIYLGFYEKQEVAVKTFCEGSPRAQREVSCLQSSRENSHLVTFYGSESHRGHLFVCVTLCEQTLEACLDVHRGEDVENEEDEFARNVLSSIFKAVQELHLSCGYTHQDLQPQNILIGPWTAGPLCGKEGKHLI

SEQ ID NO: 61871 - protein, 154 aa, Homo sapiens
MAGPVKDREAFQRLNFLYQAAHCVLAQDPENQALARFYCYTERTIAKRLVLRRDPSVKRTLCRGCSSLLVPGLTCTQRQRRCRGQRWTVQTCLTCQRSQRFLNDPGHLLWGDRPEAQLGSQADSKPLQPLPNTAHSISDRLPEEKMQTQGSSNQ

SEQ ID NO: 61872 - protein, 162 aa, Homo sapiens
MAGPVKDREAFQRLNFLYQAAHCVLAQDPENQALARFYCYTERTIAKRLVLRRPLSSSAPRDPSVKRTLCRGCSSLLVPGLTCTQRQRRCRGQRWTVQTCLTCQRSQRFLNDPGHLLWGDRPEAQLGSQADSKPLQPLPNTAHSISDRLPEEKMQTKGSSNQ

SEQ ID NO: 61873 - protein, 177 aa, Homo sapiens
MAGPVKDREAFQRLNFLYQVSLRQGPHGDGARRPRVTAPLPQAAHCVLAQDPENQALARFYCYTERTIAKRLVLRRDPSVKRTLCRGCSSLLVPGLTCTQRQRRCRGQRWTVQTCLTCQRSQRFLNDPGHLLWGDRPEAQLGSQADSKPLQPLPNTAHSISDRLPEEKMQTQGSSNQ

SEQ ID NO: 61874 - protein, 162 aa, Homo sapiens
MAGPVKDREAFQRLNFLYQAAHCVLAQDPENQALARFYCYTERTIAKRLVLRRPLSSSAPRDPSVKRTLCRGCSSLLVPGLTCTHRQRRCRGQRWTVQTCLTCQRSQRFLNDPGHLLWGDRPEAQLGSQADSKPLQPLPNTAHSISDRLPEEKMQTQGSSNQ

SEQ ID NO: 61875 - protein, 177 aa, Homo sapiens
MAGPVKDREAFQRLNFLYQVSLRQGPHGDGARRPRVTAPLPQAAHCVLAQDPENQALARFYCYTERTIAKRLVLRRDPSVKRTLCRGCSSLLVPGLTCTQRQRRCRGQRWTVQTCLTCQRSQRFLNDPGHLLWGDRPEAQLGSQADSKPLQPLPNTAHSISDRLPEEKMQTKGSSNQ

SEQ ID NO: 61876 - protein, 154 aa, Homo sapiens [sequence omitted]

SEQ ID NO: 61877 - protein, 144 aa, Homo sapiens
MAGPVKDREAFQRLNFLYQAAHCVLAQDPENQALARFYCYTERTIAKRLVLRRDPSVKRTLCRGCSSLLVPGLTCTQRQRRCRGQRWTVQTCLTCQRSQRFLNDPGHLLWGDRPEAQLGSQAGERFQTTTTLAKHSPLHFRPPS

SEQ ID NO: 61878 - protein, 154 aa, Homo sapiens [sequence omitted]

SEQ ID NO: 61879 - protein, 154 aa, Homo sapiens
MAGPVKDREAFQRLNFLYQAAHCVLAQDPENQALARFYCYTERTIAKRLVLRRDPSVKRTLCRGCSSLLVPGLTCTQRQRRCRGQRWTVQTCLTCQRSQRFLNDPGHLLWGDRPEAQLGSQADSKPLQPLPNTAHSISDRLPEEKMQTKGSSNQ

SEQ ID NO: 61880 - protein, 177 aa, Homo sapiens
MAGPVKDREAFQRLNFLYQVSLRQGPHGDGARRPRVTAPLPQAAHCVLAQDPENQALARFYCYTERTIAKRLVLRRDPSVKRTLCRGCSSLLVPGLTCTHRQRRCRGQRWTVQTCLTCQRSQRFLNDPGHLLWGDRPEAQLGSQADSKPLQPLPNTAHSISDRLPEEKMQTQGSSNQ

SEQ ID NO: 61881 - protein, 144 aa, Homo sapiens
MAGPVKDREAFQRLNFLYQAAHCVLAQDPENQALARFYCYTERTIAKRLVLRRDPSVKRTLCRGCSSLLVPGLTCTHRQRRCRGQRWTVQTCLTCQRSQRFLNDPGHLLWGDRPEAQLGSQAGERFQTTTTLAKHSPLHFRPPS

SEQ ID NO: 61882 - protein, 154 aa, Homo sapiens; identical to SEQ ID NO: 61871

SEQ ID NO: 61883 - protein, 162 aa, Homo sapiens
MAGPVKDREAFQRLNFLYQAAHCVLAQDPENQALARFYCYTERTIAKRLVLRRPLSSSAPRDPSVKRTLCRGCSSLLVPGLTCTQRQRRCRGQRWTVQTCLTCQRSQRFLNDPGHLLWGDRPEAQLGSQADSKPLQPLPNTAHSISDRLPEEKMQTQGSSNQ

SEQ ID NO: 61884 - protein, 144 aa, Homo sapiens; identical to SEQ ID NO: 61881

SEQ ID NO: 61885 - protein, 177 aa, Homo sapiens; identical to SEQ ID NO: 61873

SEQ ID NO: 61886 - protein, 162 aa, Homo sapiens; identical to SEQ ID NO: 61874

SEQ ID NO: 61887 - protein, 177 aa, Homo sapiens; identical to SEQ ID NO: 61873

SEQ ID NO: 61888 - protein, 162 aa, Homo sapiens; identical to SEQ ID NO: 61883

SEQ ID NO: 61889 - protein, 154 aa, Homo sapiens [sequence omitted]

SEQ ID NO: 61890 - protein, 144 aa, Homo sapiens; identical to SEQ ID NO: 61877

SEQ ID NO: 61891 - protein, 144 aa, Homo sapiens; identical to SEQ ID NO: 61877

SEQ ID NO: 61892 - protein, 144 aa, Homo sapiens; identical to SEQ ID NO: 61877

SEQ ID NO: 61893 - protein, 177 aa, Homo sapiens; identical to SEQ ID NO: 61880

SEQ ID NO: 61894 - protein, 144 aa, Homo sapiens; identical to SEQ ID NO: 61881

SEQ ID NO: 61895 - protein, 154 aa, Homo sapiens; identical to SEQ ID NO: 61871

SEQ ID NO: 61896 - protein, 177 aa, Homo sapiens; identical to SEQ ID NO: 61880

SEQ ID NO: 61897 - protein, 162 aa, Homo sapiens; identical to SEQ ID NO: 61883

SEQ ID NO: 61898 - protein, 162 aa, Homo sapiens; identical to SEQ ID NO: 61874

SEQ ID NO: 61899 - protein, 254 aa, Homo sapiens
MAVFADLDLRAGSDLKALRGLVETAAHRELPRLRAWPTSCHPDHRATLRIGYSVVAINHIVDFKEKKQEIEKPVAVSELFTTLPIVQGKSRPIKILTRLTIIVSDPSHCNVLRATSSRARLYDVVAVFPKTEKLFHIACTHLDVDLVCITVTEKLPFYFKRPPINVAIDRGLAFELVYSPAIKDSTMRRYTISSALNLMQICKGKNVIISSAAERPLEIRGPYDVANLGLLFGLSESDAKAAVSTNCRAALLHG

SEQ ID NO: 61900 - protein, 268 aa, Homo sapiens
MAVFADLDLRAGSDLKALRGLVETAAHLGYSVVAINHIVDFKEKKQEIEKPVAVSELFTTLPIVQGKSRPIKILTRLTIIVSDPSHCNVLRATSSRARLYDVVAVFPKTEKLFHIACTHLDVDLVCITVTEKLPFYFKRPPINVAIDRGLAFELVYSPAIKDSTMRRYTISSALNLMQICKGKNVIISSAAERPLEIRGPYDVANLGLLFGLSESDAKAAVSTNCRAALLHGETRKTAFGIISTVKKPRPSEGDEDCLPASKKAKCEG

SEQ ID NO: 61901 - protein, 255 aa, Homo sapiens
MAVFADLDLRAGSDLKALRGLVETAAHLGYSVVAINHIVDFKEKKQEIEKPVAVSELFTTLPIVQGKSRPIKILTRLTIIVSDPSHCNVLRATSSRARLYDVVAVFPKTEKLFHIACTHLDVDLVCITVTEKLPFYFKRPPINVAIDRGLAFELVYSPAIKDSTMRRYTISSALNLMQICKGKPLEIRGPYDVANLGLLFGLSESDAKAAVSTNCRAALLHGETRKTAFGIISTVKKPRPSEGDEDCLPASKKAK

SEQ ID NO: 61902 - protein, 322 aa, Homo sapiens
MAVFADLDLRAGSDLKALRGLVETAAHLGYSVVAINHIVDFKEKKQEIEKPVAVSELFTTLPIVQGKSRPIKILTRLTIIVSDPSHCNVLRATSSRARLYDVVAVFPKTEKLFHIACTHLDVDLVCITVTEKLPFYFKRPPINVAIDRGLAFELVYSPAIKDSTMRRYTISSALNLMQICKGKNVIISSAAERPLEIRGPYDVANLGLLFGLSESDAKAAVSTNCRAALLHGETRKTAFGIISTVKKPRPSEGDEDCLPASKKAKWSHSVTQAGVQWHNLGSLQPLPLGLKPSSHLSLPRTRIQQRQLLISHQRDHTPKNRL

SEQ ID NO: 61903 - protein, 212 aa, Homo sapiens
EIEKPVAVSELFTTLPIVQGKSRPIKILTRLTIIVSDPSHCNVLRATSSRARLYDVVAVFPKTEKLFHIACTHLDVDLVCITVTEKLPFYFKRPPINVAIDRGLAFELVYSPAIKDSTMRRYTISSALNLMQICKGKPLEIRGPYDVANLGLLFGLSESDAKAAVSTNCRAALLHGETRKTAFGIISTVKKPRPSEGDEDCLPASKKAKCEG

SEQ ID NO: 61904 - protein, 283 aa, Homo sapiens
MAAAPQAPGRGSLRKTRPLVVKTSLNNPYIIRWSALESEDMHFILQTLEDRLKAIGLQKIEDKKKKNKTPFLKKESREKCSIAVDISENLKEKKTDAKQQVSGWTPAHVRKQLAIGVNEVTRALERRELLLVLVCKSVKPAMITSHLIQLSLSRSVPACQVPRLSERIAPVIGLKCVLALAFKKNTTDFVDEVRAIIPRVPSLSVPWLQDRIEDSGENLETEPLESQDRELLDTSFEDLSKPKRKLADGRQASVTLQPLKIKKLIPNPNKIRKPPKSKKATPK

SEQ ID NO: 61905 - protein, 167 aa, Homo sapiens
MAAAPQAPGRGSLRKTRPLVVKTSLNNPYIIRWSALESEDMHFILQTLEDRLKAIGLQKIEDKKKKNKTPFLKKESREKCSIAVDISENLKEKKTDAKQQVSGWTPAHVRKQLAIGVNEVTRALERRELLLVLVLTLLPRLECSGVIPAHCNPASWVQAILLPQPPE

SEQ ID NO: 61906 - protein, 283 aa, Homo sapiens; identical to SEQ ID NO: 61904

SEQ ID NO: 61907 - protein, 283 aa, Homo sapiens; identical to SEQ ID NO: 61904

SEQ ID NO: 61908 - protein, 169 aa, Homo sapiens
MAAAPQAPGRGSLRKTRPLVVKTSLNNPYIIRWSALESEDMHFILQTLEDRLKAIGLQKIEDKKKKNKTPFLKKESREKCSIAVDISENLKEKKTDAKQQVSGWTPAHVRKQLAIGVNEVTRALERRELLLVLVCKSVKPAMITSHLIQLSLSRSVPACQVPRLSERIA

SEQ ID NO: 61909 - protein, 363 aa, Homo sapiens
MATLRRLREAPRHLLVCEKSNFGNHKSRHRHLVQTHYYNYRVSFLIPECGILSEELKNLVMNTGPYYFVKNLPLHELITPEFISTFIKKGSCYALTYNTHIDEDNTVALLPNGKLILSLDKDTYEETGLQGHPSQFSGRKIMKFIVSIDLMELSLNLDSKKYERISWSFKEKKPLKFDFLLAWHKTGSEESTMMSYFSKYQIQEHQPKVALSTLRDLQCPVLQSSELEGTPEVSCRALELFDWLGAVFSNVDLNNEPNNFISTYCCPEPSTVVAKAYLCTITGFILPEKICLLLEHLCHYFDEPKLAPWVTLSVQGFADSPVSWEKNEHGFRKGGEHLYNFVIFNNQDYWLQMAVGANDHCPP

SEQ ID NO: 61910 - protein, 303 aa, Homo sapiens
MNTGPYYFVKNLPLHELITPEFISTFIKKGSCYALTYNTHIDEDNTVALLPNGKLILSLDKDTYEETGLQGHPSQFSGRKIMKFIVSIDLMELSLNLDSKKYERISWSFKEKKPLKFDFLLAWHKTGSEESTMMSYFSKYQIQEHQPKVALSTLRDLQCPVLQSSELEGTPEVSCRALELFDWLGAVFSNVDLNNEPNNFISTYCCPEPSTVVAKAYLCTITGFILPEKICLLLEHLCHYFDEPKLAPWVTLSVQGFADSPVSWEKNEHGFRKGGEHLYNFVIFNNQDYWLQMAVGANDHCPP

SEQ ID NO: 61911 - protein, 238 aa, Homo sapiens
MRPAALRGALLGCLCLALLCLGGADKRLRDNHEWKKLIMVQHWPETVCEKIQNDCRDPPDYWTIHGLWPDKSEGCNRSWPFNLEEIKKNWMEITDSSLPSPSMGPAPPRWMRSTPRRSTLAEAWNSTGSWTSTGGCALPPAALPSGDLCCRPSLTAGSRGVGVDLTALQQLLHVHYSATGIIPEECSEPTKPFQIILHHDHTEWVQSIGMPIWTISSSESAIGKTRTQPACAVLSHDS

SEQ ID NO: 61912 - protein, 207 aa, Homo sapiens
MRPAALRGALLGCLCLALLCLGGADKRLRDNHEWKKLIMVQHWPETVCEKIQNDCRDPPDYWTIHGLWPDKSEGCNRSWPFNLEEIKKNWMEITDSSLPSPSTDLLPEMRAYWPDVIHSFPNRSRFCGTCAAQVDALNSQKKYFGRSLELYRELDLNRWVRPSPGCTSQWGSLLSPKPDSWIQGSGCRPHCPPAASACALFGYWDHS

SEQ ID NO: 61913 - protein, 306 aa, Homo sapiens
MRPAALRGALLGCLCLALLCLGGADKRLRDNHEWKKLIMVQHWPETVCEKIQNDCRDPPDYWTIHGLWQVSHTSRRGLLFLFKNIFSLSSRNFSFYSLQTSMKKPPQPSLIFLIFSFKPDKSEGCNRSWPFNLEEIKDLLPEMRAYWPDVIHSFPNRSRFWKHEWEKHGTCAAQVDALNSQKKYFGRSLELYRELDLNSVLLKLGIKPSINYYQVADFKDALARVYGVIPKIQCLPPSQDEEVQTIGQIELCLTKQDQQLQNCTEPGEQPSPKQEVWLANGAAESRGLRVCEDGPVFYPPPKKTKH

SEQ ID NO: 61914 - protein, 256 aa, Homo sapiens
MRPAALRGALLGCLCLALLCLGGADKRLRDNHEWKKLIMVQHWPETVCEKIQNDCRDPPDYWTIHGLWPDKSEGCNRSWPFNLEEIKDLLPEMRAYWPDVIHSFPNRSRFWKHEWEKHGTCAAQVDALNSQKKYFGRSLELYRELDLNSVLLKLGIKPSINYYQVADFKDALARVYGVIPKIQCLPPSQDEEVQTIGQIELCLTKQDQQLQNCTEPGEQPSPKQEVWLANGAAESRGLRVCEDGPVFYPPPKKTKH

SEQ ID NO: 61915 - protein, 254 aa, Homo sapiens
MRPAALRGALLGCLCLALLCLGGADKRLRDNHEWKKLIMVQHWPETVCEKIQNDCRDPPDYWTIHGLWPDKSEGCNRSWPFNLEEIKDLLPEMRAYWPDVIHSFPNRSRFWKHEWEKHGTCAAQVDALNSQKKYFGRSLELYRELDLNSVLLKLGIKPSINYYQVADFKDALARVYGVIPKIQCLPPSQDEEVQTIGQIELCLTKQDQQLQNCTEPGEQPSPKQEVWLANGAAESRGLRVCEDGPVFYPPPKKT

SEQ ID NO: 61916 - protein, 256 aa, Homo sapiens; identical to SEQ ID NO: 61914

SEQ ID NO: 61917 - protein, 156 aa, Homo sapiens
MALEKSLVRLLLLVLILLVLGWVQPSLGKESRAKKFQRQHMDSDSSPSSSSTYCNQMMRRRNMTQGRCKPVNTFVHEPLVDVQNVCFQEKVTCKNGQGNCYKSNSSMHITDCRLTNGSRYPNCAYRTSPKERHIIVACEGSPYVPVHFDASVEDST

SEQ ID NO: 61918 - protein, 156 aa, Homo sapiens; identical to SEQ ID NO: 61917

SEQ ID NO: 61919 - protein, 156 aa, Homo sapiens; identical to SEQ ID NO: 61917

SEQ ID NO: 61920 - protein, 156 aa, Homo sapiens; identical to SEQ ID NO: 61917

SEQ ID NO: 61921 - protein, 161 aa, Homo sapiens
MVPKLFTSQICLLLLLGLLAVEGSLHVKPPQFTWAQWFETQHINMTSQQCTNAMQVINNYQRRCKNQNTFLLTTFANVVNVCGNPNMTCPSNKTRKNCHHSGSQVPLIHCNLTTPSPQNISNCRYAQTPANMFYIVACDNRDQRRDPPQYPVVPVHLDRII

SEQ ID NO: 61922 - protein, 160 aa, Homo sapiens
MVPKLFTSQICLLLLLGLMGVEGSLHARPPQFTRAQWFAIQHISLNPPRCTIAMRAINNYRWRCKNQNTFLRTTFANVVNVCGNQSIRCPHNRTLNNCHRSRFRVPLLHCDLINPGAQNISNCTYADRPGRRFYVVACDNRDPRDSPRYPVVPVHLDTTI

SEQ ID NO: 61923 - protein, 147 aa, Homo sapiens
MALQRTHSLLLLLLLTLLGLGLVQPSYGQDGMYQRFLRQHVHPEETGGSDRYCNLMMQRRKMTLYHCKRFNTFIHEDIWNIRSICSTTNIQCKNGKMNCHEGVVKVTDCRDTGSSRAPNCRYRAIASTRRVVIACEGNPQVPVHFDG

SEQ ID NO: 61924 - protein, 147 aa, Homo sapiens; identical to SEQ ID NO: 61923

SEQ ID NO: 61925 - protein, 147 aa, Homo sapiens; identical to SEQ ID NO: 61923

SEQ ID NO: 61926 - protein, 154 aa, Homo sapiens
MAPARAGCCPLLLLLLGLWVAEVLVRAKPKDMTSSQWFKTQHVQPSPQACNSAMSIINKYTERCKDLNTFLHEPFSSVAITCQTPNIACKNSCKNCHQSHGPMSLTMGELTSGKYPNCRYKEKHLNTPYIVACDPPQQGDPGYPLVPVHLDKVV

SEQ ID NO: 61927 - protein, 150 aa, Homo sapiens
MVLCFPLLLLLLVLWGPVCPLHAWPKRLTKAHWFEIQHIQPSPLQCNRAMSGINNYTQHCKHQNTFLHDSFQNVAAVCDLLSIVCKNRRHNCHQSSKPVNMTDCRLTSGKYPQCRYSAAAQYKFFIVACDPPQKSDPPYKLVPVHLDSIL

SEQ ID NO: 61928 - protein, 756 aa, Homo sapiens
MPLRPGSLVPEGAGFPKMAADVSVTHRPPLSPKSGAEVEAGDAAERRAPEEELPPLDPEEIRKRLEHTERQFRNRRKILIRGLPGDVTNQEVHDLLSDYELKYCFVDKYKGTAFVTLLNGEQAEAAINAFHQSRLRERELSVQLQPTDALLCVANLPPSLTQQQFEELVRPFGSLERCFLVYSERTGQSKGYGFAEYMKKDSAARAKSDLLGKPLGPRTLYVHWTDAGQLTPALLHSRCLCVDRLPPGFNDVDALCRALSAVHSPTFCQLACGQDGQLKGFAVLEYETAEMAEEAQQQADGLSLGGSHLRVSFCAPGPPGRSMLAALIAAQATALNRGKGLLPEPNILQLLNNLGPSASLQLLLNPLLHGSAGGKQGLLGAPPAMPLLNGPALSTALLQLALQTQGQKKPGILGDSPLGALQPGAQPANPLLGELPAGGGLPPELPPRRGKPPPLLPSVLGPAGGDREALGLGPPAAQLTPPPAPVGLRGSGLRGLQKDSGPLPTPPGVSLLGEPPKDYRIPLNPYLNLHSLLPASNLAGKEARGWGGAGRSRRPAEGPPTNPPAPGGGSSSSKAFQLKSRLLSPLSSARLPPEPGLSDSYSFDYPSDMGPRRLFSHPREPALGPHGPSRHKMSPPPSGFGERSSGGSGGGPLSHFYSGSPTSYFTSGLQAGLKQSHLSKAIGSSPLGSGEGLLGLSPGPNGHSHLLKTPLGGQKRSFAHLLPSPEPSPEGSYVGQHSQGLGGHYADSYLKRKRIF

SEQ ID NO: 61929 - protein, 606 aa, Homo sapiens
MAADVSVTHRPPLSPKSGAEVEAGDAAERRAPEEELPPLDPEEIRKRLEHTERQFRNRRKILIRGLPGDVTNQEVHDLLSDYELKYCFVDKYKGTAFVTLLNGEQAEAAINAFHQSRLRERELSVQLQPTDALLCVANLPPSLTQQQFEELVRPFGSLERCFLVYSERTGQSKGYGFAEYMKKDSAARAKSDLLGKPLGPRTLYVHWTDAGQLTPALLHSRCLCVDRLPPGFNDVDALCRALSAVHSPTFCQLACGQDGQLKGFAVLEYETAEMAEEAQQQADGLSLGGSHLRVSFCAPGPPGRSMLAALIAAQATALNRGKGLLPEPNILQLLNNLGPSASLQLLLNPLLHGSAGGKQGLLGAPPAMPLLNGPALSTALLQLALQTQGQKKPGILGDSPLGALQPGAQPANPLLGELPAGGGLPPELPPRRGKPPPLLPSVLGPAGGDREALGLGPPAAQLTPPPAPVGLRGSGLRGPLSHFYSGSPTSYFTSGLQAGLKQSHLSKAIGSSPLGSGEGLLGLSPGPNGHSHLLKVRAGGGDMQGWEAPAPQRPLTRPALPSVSRPHWAARNAALPTCCPRPSPAQKAAMWASTPRASAATTRTPT

SEQ ID NO: 61930 - protein, 691 aa, Homo sapiens
MAAAAGDGGGEGGAGLGSAAGLGPGPGLRGQGPSAEAHEGAPDPMPAALHPEEVAARLQRMQRELSNRRKILVKNLPQDSNCQEVHDLLKDYDLKYCYVDRNKRTAFVTLLNGEQAQNAIQMFHQYSFRGKDLIVQLQPTDALLCITNVPISFTSEEFEELVRAYGNIERCFLVYSEVTGHSKGYGFVEYMKKDFAAKARLELLGRQLGASALFAQWMDVNLLASELIHSKCLCIDKLPSDYRDSEELLQIFSSVHKPVFCQLAQDEGSYVGGFAVVEYSTAEQAEEVQQAADGMTIKGSKVQVSFCAPGAPGRSTLAALIAAQRVMHSNQKGLLPEPNPVQIMKSLNNPAMLQVLLQPQLCGRAVKPAVLGTPHSLPHLMNPSISPAFLHLNKAHQSSVMGNTSNLFLQNLSHIPLAQQQLMKFENIHTNNKPGLLGEPPAVVLQTALGIGSVLPLKKELGHHHGEAHKTSSLIPTQTTITAGMGMLPFFPNQHIAGQAGPGHSNTQEKQPATVGMAEGNFSGSQPYLQSFPNLAAGSLLVGHHKQQQSQPKGTEISSGAASKNQTSLLGEPPKEIRLSKNPYLNLASVLPSVCLSSPASKTTLHKTGIASSILDAISQGSESQHALEKCIAYSPPFGDYAQVSSLRNEKRGSSYLISAPEGGSVECVDQHSQGTGAYYMETYLKKKRVY

SEQ ID NO: 61931 - protein, 678 aa, Homo sapiens
MAAAAGDGGGEGGAGLGSAAGLGPGPGLRGQGPSAEAHEGAPDPMPAALHPEEVAARLQRMQRELSNRRKILVKNLPQDSNCQEVHDLLKDYDLKYCYVDRNKRTAFVTLLNGEQAQNAIQMFHQYSFRGKDLIVQLQPTDALLCITNVPISFTSEEFEELVRAYGNIERCFLVYSEVTGHSKGYGFVEYMKKDFAAKARLELLGRQLGASALFAQWMDVNLLASELIHSKCLCIDKLPSDYRDSEELLQIFSSVHKPVFCQLAQDEGSYVGGFAVVEYSTAEQAEEVQQAADGMTIKGSKVQVSFCAPGAPGRSTLAALIAAQRVMHSNQKGLLPEPNPVQIMKSLNNPAMLQVLLQPQLCGRAVKPAVLGTPHSLPHLMNPSISPAFLHLNKAHQNLSHIPLAQQQLMKFENIHTNNKPGLLGEPPAVVLQTALGIGSVLPLKKELGHHHGEAHKTSSLIPTQTTITAGMGMLPFFPNQHIAGQAGPGHSNTQEKQPATVGMAEGNFSGSQPYLQSFPNLAAGSLLVGHHKQQQSQPKGTEISSGAASKNQTSLLGEPPKEIRLSKNPYLNLASVLPSVCLSSPASKTTLHKTGIASSILDAISQGSESQHALEKCIAYSPPFGDYAQVSSLRNEKRGSSYLISAPEGGSVECVDQHSQGTGAYYMETYLKKKRVY

SEQ ID NO: 61932 - protein, 230 aa, Homo sapiens
MTIKGSKVQVSFCAPGAPGRSTLAALIAAQRVMHSNQKGLLPEPNPVQIMKSLNNPAMLQVLLQPQLCGRAVKPAVLGTPHSLPHLMNPSISPAFLHLNKAHQNQTSLLGEPPKEIRLSKNPYLNLASVLPSVCLSSPASKTTLHKTGIASSILDAISQGSESQHALEKCIAYSPPFGDYAQVSSLRNEKRGSSYLISAPEGGSVECVDQHSQGTGAYYMETYLKKKRVY

SEQ ID NO: 61933 - protein, 792 aa, Homo sapiens
MHVIKRDGRQERVMFDKITSRIQKLCYGLNMDFVDPAQITMKVIQGLYSGVTTVELDTLAAETAATLTTKHPDYAILAARIAVSNLHKETKKVFSDVMEDLYNYINPHNGKHSPMVAKSTLDIVLANKDRLNSAIIYDRDFSYNYFGFKTLERSYLLKINGKVAERPQHMLMRVSVGIHKEDIDAAIETYNLLSERWFTHASPTLFNAGTNRPQLSSCFLLSMKDDSIEGIYDTLKQCALISKSAGGIGVAVSCIRATGSYIAGTNGNSNGLVPMLRVYNNTARYVDQGGNKRPGAFAIYLEPWHLDIFEFLDLKKNTGKEEQRARDLFFALWIPDLFMKRVETNQDWSLMCPNECPGLDEVWGEEFEKLYASYEKQGRVRKVVKAQQLWYAIIESQTETGTPYMLYKDSCNRKSNQQNLGTIKCSNLCTEIVEYTSKDEVAVCNLASLALNMYVTSEHTYDFKKLAEVTKVVVRNLNKIIDINYYPVPEACLSNKRHRPIGIGVQGLADAFILMRYPFESAEAQLLNKQIFETIYYGALEASCDLAKEQGPYETYEGSPVSKGILQYDMWNVTPTDLWDWKVLKEKIAKYGIRNSLLIAPMPTASTAQILGNNESIEPYTSNIYTRRVLSGEFQIVNPHLLKDLTERGLWHEEMKNQIIACNGSIQSIPEIPDDLKQLYKTVWEISQKTVLKMAAERGAFIDQSQSLNIHIAEPNYGKLTSMHFYGWKQGLKTGMYYLRTRPAANPIQFTLNKEKLKDKEKVSKEEEEKERNTAAMVCSLENRDECLMCGS

SEQ ID NO: 61934 - protein, 695 aa, Homo sapiens
MEDLYNYINPHNGKHSPMVAKSTLDIVLANKDRLNSAIIYDRDFSYNYFGFKTLERSYLLKINGKVAERPQHMLMRVSVGIHKEDIDAAIETYNLLSERWFTHASPTLFNAGTNRPQLSSCFLLSMKDDSIEGIYDTLKQCALISKSAGGIGVAVSCIRATGSYIAGTNGNSNGLVPMLRVYNNTARYVDQGGNKRPGAFAIYLEPWHLDIFEFLDLKKNTGKEEQRARDLFFALWIPDLFMKRVETNQDWSLMCPNECPGLDEVWGEEFEKLYASYEKQGRVRKVVKAQQLWYAIIESQTETGTPYMLYKDSCNRKSNQQNLGTIKCSNLCTEIVEYTSKDEVAVCNLASLALNMYVTSEHTYDFKKLAEVTKVVVRNLNKIIDINYYPVPEACLSNKRHRPIGIGVQGLADAFILMRYPFESAEAQLLNKQIFETIYYGALEASCDLAKEQGPYETYEGSPVSKGILQYDMWNVTPTDLWDWKVLKEKIAKYGIRNSLLIAPMPTASTAQILGNNESIEPYTSNIYTRRVLSGEFQIVNPHLLKDLTERGLWHEEMKNQIIACNGSIQSIPEIPDDLKQLYKTVWEISQKTVLKMAAERGAFIDQSQSLNIHIAEPNYGKLTSMHFYGWKQGLKTGMYYLRTRPAANPIQFTLNKEKLKDKEKVSKEEEEKERNTAAMVCSLENRDECLMCGS

SEQ ID NO: 61935 - protein, 705 aa, Homo sapiens
DGRQERVMFDKITSRIQKLCYGLNMDFVDPAQITMKVIQGLYSGVTTVELDTLAAETAATLKTLERSYLLKINGKVAERPQHMLMRVSVGIHKEDIDAAIETYNLLSERWFTHASPTLFNAGTNRPQLSSCFLLSMKDDSIEGIYDTLKQCALISKSAGGIGVAVSCIRATGSYIAGTNGNSNGLVPMLRVYNNTARYVDQGGNKRPGAFAIYLEPWHLDIFEFLDLKKNTGKEEQRARDLFFALWIPDLFMKRVETNQDWSLMCPNECPGLDEVWGEEFEKLYASYEKQGRVRKVVKAQQLWYAIIESQTETGTPYMLYKDSCNRKSNQQNLGTIKCSNLCTEIVEYTSKDEVAVCNLASLALNMYVTSEHTYDFKKLAEVTKVVVRNLNKIIDINYYPVPEACLSNKRHRPIGIGVQGLADAFILMRYPFESAEAQLLNKQIFETIYYGALEASCDLAKEQGPYETYEGSPVSKGILQYDMWNVTPTDLWDWKVLKEKIAKYGIRNSLLIAPMPTASTAQILGNNESIEPYTSNIYTRRVLSGEFQIVNPHLLKDLTERGLWHEEMKNQIIACNGSIQSIPEIPDDLKQLYKTVWEISQKTVLKMAAERGAFIDQSQSLNIHIAEPNYGKLTSMHFYGWKQGLKTGMYYLRTRPAANPIQFTLNKEKLKDKEKVSKEEEEKERNTAAMVCSLENRDECLMCGS

SEQ ID NO: 61936 - protein, 454 aa, Homo sapiens
MKRVETNQDWSLMCPNECPGLDEVWGEEFEKLYASYEKQGRVRKVVKAQQLWYAIIESQTETGTPYMLYKDSCNRKSNQQNLGTIKCSNLCTEIVEYTSKDEVAVCNLASLALNMYVTSEHTYDFKKLAEVTKVVVRNLNKIIDINYYPVPEACLSNKRHRPIGIGVQGLADAFILMRYPFESAEAQLLNKQIFETIYYGALEASCDLAKEQGPYETYEGSPVSKGILQYDMWNVTPTDLWDWKVLKEKIAKYGIRNSLLIAPMPTASTAQILGNNESIEPYTSNIYTRRVLSGEFQIVNPHLLKDLTERGLWHEEMKNQIIACNGSIQSIPEIPDDLKQLYKTVWEISQKTVLKMAAERGAFIDQSQSLNIHIAEPNYGKLTSMHFYGWKQGLKTGMYYLRTRPAANPIQFTLNKEKLKDKEKVSKEEEEKERNTAAMVCSLENRDECLMCGS

SEQ ID NO: 61937 - protein, 389 aa, Homo sapiens
MLSLRVPLAPITDPQQLQLSPLKGLSLVDKENTPPALSGTRVLASKTARRIFQEPTEPKTKAAAPGVEDEPLLRENPRRFVIFPIEYHDIWQMYKKAEASFWTAEEVDLSKDIQHWESLKPEERYFISHVLAFFAASDGIVNENLVERFSQEVQITEARCFYGFQIAMENIHSEMYSLLIDTYIKDPKEREFLFNAIETMPCVKKKADWALRWIGDKEATYGERVVAFAAVEGIFFSGSFASIFWLKKRGLMPGLTFSNELISRDEGLHCDFACLMFKHLVHKPSEERVREIIINAVRIEQEFLTEALPVKLIGMNCTLMKQYIEFVADRLMLELGFSKVFRVENPFDFMENISLEGKTNFFEKRVGEYQRMGVMSSPTENSFTLDADF

SEQ ID NO: 61938 - protein, 449 aa, Homo sapiens
MGRVGGMAQPMGRAGAPKPMGRAGSARRGRFKGCWSEGSPVHPVPAVLSWLLALLRCASTMLSLRVPLAPITDPQQLQLSPLKGLSLVDKENTPPALSGTRVLASKTARRIFQEPTEPKTKAAAPGVEDEPLLRENPRRFVIFPIEYHDIWQMYKKAEASFWTAEEVDLSKDIQHWESLKPEERYFISHVLAFFAASDGIVNENLVERFSQEVQITEARCFYGFQIAMENIHSEMYSLLIDTYIKDPKEREFLFNAIETMPCVKKKADWALRWIGDKEATYGERVVAFAAVEGIFFSGSFASIFWLKKRGLMPGLTFSNELISRDEGLHCDFACLMFKHLVHKPSEERVREIIINAVRIEQEFLTEALPVKLIGMNCTLMKQYIEFVADRLMLELGFSKVFRVENPFDFMENISLEGKTNFFEKRVGEYQRMGVMSSPTENSFTLDADF

SEQ ID NO: 61939 - protein, 351 aa, Homo sapiens
MGDPERPEAAGLDQDERSSSDTNESEIKSNEEPLLRKSSRRFVIFPIQYPDIWKMYKQAQASFWTAEEVDLSKDLPHWNKLKADEKYFISHILAFFAASDGIVNENLVERFSQEVQVPEARCFYGFQILIENVHSEMYSLLIDTYIRDPKKREFLFNAIETMPYVKKKADWALRWIADRKSTFGERVVAFAAVEGVFFSGSFAAIFWLKKRGLMPGLTFSNELISRDEGLHCDFACLMFQYLVNKPSEERVREIIVDAVKIEQEFLTEALPVGLIGMNCILMKQYIEFVADRLLVELGFSKVFQAENPFDFMENISLEGKTNFFEKRVSEYQRFAVMAETTDNVFTLDADF

SEQ ID NO: 61940 - protein, 299 aa, Homo sapiens
MGDPERPEAAGLDQDEVDLSKDLPHWNKLKADEKYFISHILAFFAASDGIVNENLVERFSQEVQVPEARCFYGFQILIENVHSEMYSLLIDTYIRDPKKREFLFNAIETMPYVKKKADWALRWIADRKSTFGERVVAFAAVEGVFFSGSFAAIFWLKKRGLMPGLTFSNELISRDEGLHCDFACLMFQYLVNKPSEERVREIIVDAVKIEQEFLTEALPVGLIGMNCILMKQYIEFVADRLLVELGFSKVFQAENPFDFMENISLEGKTNFFEKRVSEYQRFAVMAETTDNVFTLDADF

SEQ ID NO: 61941 - protein, 139 aa, Homo sapiens
MGDPERPEAAGLDQDEGLHCDFACLMFQYLVNKPSEERVREIIVDAVKIEQEFLTEALPVGLIGMNCILMKQYIEFVADRLLVELGFSKVFQAENPFDFMENISLEGKTNFFEKRVSEYQRFAVMAETTDNVFTLDADF

SEQ ID NO: 61942 - protein, 66 aa, Homo sapiens
MGDPERPEAAGLDQDEVFQAENPFDFMENISLEGKTNFFEKRVSEYQRFAVMAETTDNVFTLDADF

SEQ ID NO: 61943 - protein, 43 aa, Homo sapiens
MGDPERPEAAGLDQDERSSSDTNESEIKSNEEPLLRKSSRRSF

SEQ ID NO: 61944 - protein, 297 aa, Homo sapiens
MYKQAQASFWTAEEVDLSKDLPHWNKLKADEKYFISHILAFFAASDGIVNENLVERFSQEVQVPEARCFYGFQILIENVHSEMYSLLIDTYIRDPKKREFLFNAIETMPYVKKKADWALRWIADRKSTFGERVVAFAAVEGVFFSGSFAAIFWLKKRGLMPGLTFSNELISRDEGLHCDFACLMFQYLVNKPSEERVREIIVDAVKIEQEFLTEALPVGLIGMNCILMKQYIEFVADRLLVELGFSKVFQAENPFDFMENISLEGKTNFFEKRVSEYQRFAVMAETTDNVFTLDADF

SEQ ID NO: 61945 - protein, 607 aa, Homo sapiens
MEAPAAGLFLLLLLGTWAPAPGSASSEAPPLINEDVKRTVDLSSHLAKVTAEVVLAHLGGGSTSRATSFLLALEPELEARLAHLGVQVKGEDEEENNLEVRETKIKGKSGRFFTVKLPVALDPGAKISVIVETVYTHVLHPYPTQITQSEKQFVVFEGNHYFYSPYPTKTQTMRVKLASRNVESYTKLGNPTRSEDLLDYGPFRDVPAYSQDTFKVHYENNSPFLTITSMTRVIEVSHWGNIAVEENVDLKHTGAVLKGPFSRYDYQRQPDSGISSIRSFKTILPAAAQDVYYRDEIGNVSTSHLLILDDSVEMEIRPRFPLFGGWKTHYIVGYNLPSYEYLYNLGDQYALKMRFVDHVFDEQVIDSLTVKIILPEGAKNIEIDSPYEISRAPDELHYTYLDTFGRPVIVAYKKNLVEQHIQDIVVHYTFNKVLMLQEPLLVVAAFYILFFTVIIYVRLDFSITKDPAAEARMKVACITEQVLTLVNKRIGLYRHFDETVNRYKQSRDISTLNSGKKSLETEHKALTSEIALLQSRLKTEGSDLCDRVSEMQKLDAQVKELVLKSAVEAERLVAGKLKKDTYIENEKLISGKRQELVTKIDHILDAL

SEQ ID NO: 61946 - protein, 435 aa, Homo sapiens
MRVKLASRNVESYTKLGNPTRSEDLLDYGPFRDVPAYSQDTFKVHYENNSPFLTITSMTRVIEVSHWGNIAVEENVDLKHTGAVLKGPFSRYDYQRQPDSGISSIRSFKTILPAAAQDVYYRDEIGNVSTSHLLILDDSVEMEIRPRFPLFGGWKTHYIVGYNLPSYEYLYNLGDQYALKMRFVDHVFDEQVIDSLTVKIILPEGAKNIEIDSPYEISRAPDELHYTYLDTFGRPVIVAYKKNLVEQHIQDIVVHYTFNKVLMLQEPLLVVAAFYILFFTVIIYVRLDFSITKDPAAEARMKVACITEQVLTLVNKRIGLYRHFDETVNRYKQSRDISTLNSGKKSLETEHKALTSEIALLQSRLKTEGSDLCDRVSEMQKLDAQVKELVLKSAVEAERLVAGKLKKDTYIENEKLISGKRQELVTKIDHILDAL

SEQ ID NO: 61947 - protein, 378 aa, Homo sapiens
MTRVIEVSHWGNIAVEENVDLKHTGAVLKGPFSRYDYQRQPDSGISSIRSFKTILPAAAQDVYYRDEIGNVSTSHLLILDDSVEMEIRPRFPLFGGWKTHYIVGYNLPSYEYLYNLGDQYALKMRFVDHVFDEQVIDSLTVKIILPEGAKNIEIDSPYEISRAPDELHYTYLDTFGRPVIVAYKKNLVEQHIQDIVVHYTFNKVLMLQEPLLVVAAFYILFFTVIIYVRLDFSITKDPAAEARMKVACITEQVLTLVNKRIGLYRHFDETVNRYKQSRDISTLNSGKKSLETEHKALTSEIALLQSRLKTEGSDLCDRVSEMQKLDAQVKELVLKSAVEAERLVAGKLKKDTYIENEKLISGKRQELVTKIDHILDAL

SEQ ID NO: 61948 - protein, 581 aa, Homo sapiens
MEAPAAGLFLLLLLGTWAPAPGSASSEAPPLINEDVKRTVDLSSHLAKVTAEVVLAHLGVQVKGEDEEENNLEVRETKIKGKSGRFFTVKLPVALDPGAKISVIVETVYTHVLHPYPTQITQSEKQFVVFEGNHYFYSPYPTKTQTMRVKLASRNVESYTKLGNPTRSEDLLDYGPFRDVPAYSQDTFKVHYENNSPFLTITSMTRVIEVSHWGNIAVEENVDLKHTGAVLKGPFSRYDYQRQPDSGISSIRSFKTILPAAAQDVYYRDEIGNVSTSHLLILDDSVEMEIRPRFPLFGGWKTHYIVGYNLPSYEYLYNLGDQYALKMRFVDHVFDEQVIDSLTVKIILPEGAKNIEIDSPYEISRAPDELHYTYLDTFGRPVIVAYKKNLVEQHIQDIVVHYTFNKVLMLQEPLLVVAAFYILFFTVIIYVRLDFSITKDPAAEARMKVACITEQVLTLVNKRIGLYRHFDETVNRYKQSRDISTLNSGKKSLETEHKALTSEIALLQSRLKTEGSDLCDRVSEMQKLDAQVKELVLKSAVEAERLVAGKLKKDTYIENEKLISGKRQELVTKIDHILDAL

SEQ ID NO: 61949 - protein, 631 aa, Homo sapiens
MAPPGSSTVFLLALTIIASTWALTPTHYLTKHDVERLKASLDRPFTNLESAFYSIVGLSSLGAQVPDAKKACTYIRSNLDPSNVDSLFYAAQASQALSGCEISISNETKDLLLAAVSEDSSVTQIYHAVAALSGFGLPLASQEALSALTARLSKEETVLATVQALQTASHLSQQADLRSIVEEIEDLVARLDELGGVYLQFEEGLETTALFVAATYKLMDHVGTEPSIKEDQVIQLMNAIFSKKNFESLSEAFSVASAAAVLSHNRYHVPVVVVPEGSASDTHEQAILRLQVTNVLSQPLTQATVKLEHAKSVASRATVLQKTSFTPVGDVFELNFMNVKFSSGYYDFLVEVEGDNRYIANTVELRVKISTEVGITNVDLSTVDKDQSIAPKTTRVTYPAKAKGTFIADSHQNFALFFQLVDVNTGAELTPHQTFVRLHNQKTGQEVVFVAEPDNKNVYKFELDTSERKIEFDSASGTYTLYLIIGDATLKNPILWNVADVVIKFPEEEAPSTVLSQNLFTPKQEIQHLFREPEKRPPTVVSNTFTALILSPLLLLFALWIRIGANVSNFTFAPSTIIFHLGHAAMLGLMYVYWTQLNMFQTLKYLAILGSVTFLAGNRMLAQQAVKRTAH

SEQ ID NO: 61950 - protein, 345 aa, Homo sapiens
VSPQGSSTVFLLALTIIASTWALTPTHYLTKHDVERLKASLDRPFTNLESAFYSIVGLSSLGAQVPDAKKACTYIRSNLDPSNVDSLFYAAQASQALSGCEISISNETKDLLLAAVSEDSSVTQIYHAVAALSGFGLPLASQEALSALTARLSKEETVLARVWSTVLESRSLFSKRTVQALQTASHLSQQADLRSIVEEIEDLVARLDELGGVYLQFEEGLETTALFVAATYKLMDHVGTEPSIKEDQVIQLMNAIFSKKNFESLSEAFSVASAAAVLSHNRYHVPVVVVPEGSASDTHEQAILRLQVTNVLSQPLTQATVKLEHAKSVASRATVLQKTSFTPVG

SEQ ID NO: 61951 - protein, 615 aa, Homo sapiens
MAPPGSSTVFLLALTIIASTWALTPTHYLTKHDVERLKASLDRPFTNLESAFYSIVGLSSLGAQVPDAKISISNETKDLLLAAVSEDSSVTQIYHAVAALSGFGLPLASQEALSALTARLSKEETVLATVQALQTASHLSQQADLRSIVEEIEDLVARLDELGGVYLQFEEGLETTALFVAATYKLMDHVGTEPSIKEDQVIQLMNAIFSKKNFESLSEAFSVASAAAVLSHNRYHVPVVVVPEGSASDTHEQAILRLQVTNVLSQPLTQATVKLEHAKSVASRATVLQKTSFTPVGDVFELNFMNVKFSSGYYDFLVEVEGDNRYIANTVELRVKISTEVGITNVDLSTVDKDQSIAPKTTRVTYPAKAKGTFIADSHQNFALFFQLVDVNTGAELTPHQTFVRLHNQKTGQEVVFVAEPDNKNVYKFELDTSERKIEFDSASGTYTLYLIIGDATLKNPILWNVADVVIKFPEEEAPSTVLSQNLFTPKQEIQHLFREPEKRPPTVVSNTFTALILSPLLLLFALWIRIGANVSNFTFAPSTIIFHLGHAAMLGLMYVYWTQLNMFQTLKYLAILGSVTFLAGNRMLAQQAVKRIAAEQSSRLAKYRTLRTAH

SEQ ID NO: 61952 - protein, 146 aa, Homo sapiens
GTYTLYLIIGDATLKNPILWNVADVVIKFPEEEAPSTVLSQNLFTPKQEIQHLFREPEKRPPTVVSNTFTALILSPLLLLFALWIRIGANVSNFTFAPSTIIFHLGHAEQHISSRRKMEILKTECQEKESRTIHSMRRKMEKKNFI

SEQ ID NO: 61953 - protein, 345 aa, Homo sapiens
MAPPGSSTVFLLALTIIASTWALTPTHYLTKHDVERLKASLDRPFTNLESAFYSIVGLSSLGAQVPDAKKACTYIRSNLDPSNVDSLFYAAQASQALSGCEISISNETKDLLLAAVSEDSSVTQIYHAVAALSGFGLPLASQEALSALTARLSKEETVLARVWSTVLESRSLFSKRTVQALQTASHLSQQADLRSIVEEIEDLVARLDELGGVYLQFEEGLETTALFVAATYKLMDHVGTEPSIKEDQVIQLMNAIFSKKNFESLSEAFSVASAAAVLSHNRYHVPVVVVPEGSASDTHEQAILRLQVTNVLSQPLTQATVKLEHAKSVASRATVLQKTSFTPVG

SEQ ID NO: 61954 - protein, 138 aa, Homo sapiens
ELDTSERKIEFDSASGTYTLYLIIGDATLKNPILWNVADVVIKFPEEEAPSTVLSQNLFTPKQEIQWIRIGANVSNFTFAPSTIIFHLGHAAMLGLMYVYWTQLNMFQTLKYLAILGSVTFLAGNRMLAQQAVKRTAE

SEQ ID NO: 61955 - protein, 138 aa, Homo sapiens
ELDTSERKIEFDSASGTYTLYLIIGDATLKNPILWNVADVVIKFPEEEAPSTVLSQNLFTPKQEIQWIRIGANVSNFTFAPSTIIFHLGHAAMLGLMYVYWTQLNMFQTLKYLAILGSVTFLAGNRMLAQQAVKRTAH

SEQ ID NO: 61956 - protein, 167 aa, Homo sapiens
MQRTVQALQTASHLSQQADLRSIVEEIEDLVARLDELGGVYLQFEEGLETTALFVAATYKLMDHVGTEPSIKEDQVIQLMNAIFSKKNFESLSEAFSVASAAAVLSHNRYHVPVVVVPEGSASDTHEQAILRLQVTNVLSQPLTQATVKLEHAKSVASRATVLQKTS

SEQ ID NO: 61957 - protein, 147 aa, Homo sapiens
  VARIANT 1: note = MOD_RES - Any amino acid
XGTYTLYLIIGDATLKNPILWNVADVVIKFPEEEAPSTVLSQNLFTPKQEIQHLFREPEKRPPTVVSNTFTALILSPLLLLFALWIRIGANVSNFTFAPSTIIFHLGHAEQHISSRRKMEILKTECQEKESRTIHSMRRKMEKKNFI

SEQ ID NO: 61958 - protein, 311 aa, Homo sapiens
MQRPGPFSTLYGRVLAPLPGRAGGAASGGGGNSWDLPGSHVRLPGRAQSGTRGGAGNTSTSCGDSNSICPAPSTMSKAEEAKKLAGRAAVENHVRNNQVLGIGSGSTIVHAVQRIAERVKQENLNLVCIPTSFQARQLILQYGLTLSDLDRHPEIDLAIDGADEVDADLNLIKGGGGCLTQEKIVAGYASRFIVIADFRKDSKNLGDQWHKGIPIEVIPMAYVPVSRAVSQKFGGVVELRMAVNKAGPVVTDNGNFILDWKFDRVHKWSEVNTAIKMIPGVVDTGLFINMAERVYFGMQDGSVNMREKPFC

SEQ ID NO: 61959 - protein, 177 aa, Homo sapiens
ARQLILQYGLTLSDLDRHPEIDLAIDGADEVDADLNLIKGGGGCLTQEKIVAGYASRFIVIADFRKDSKNLGDQWHKGIPIEVIPMAYVPVSRAVSQKFGGVVELRMAVNKAGPVVTDNGNFILDWKFDRVHKWSEVNTAIKMIPGVVDTGLFINMAERVYFGMQDGSVNMREKPFC

SEQ ID NO: 61960 - protein, 163 aa, Homo sapiens
MRIEKCYFCSGPIYPGHGMMFVRNDCKVFRFCKSKCHKNFKKKRNPRKVRWTKAFRKAAGKELTVDNSFEFEKRRNEPIKYQRELWNKTIDAMKRVEEIKQKRQAKFIMNRLKKNKELQKVQDIKEVKQNIHLIRAPLAGKGKQLEEKMVQQLQEDVDMEDAP

SEQ ID NO: 61961 - protein, 386 aa, Homo sapiens
MCSSVAAKLWFLTDRRIREDYPQKEILRALKAKCCEEELDFRAVVMDEVVLTIEQGNLGLRINGELITAYPQVVVVRVPTPWVQSDSDITVLRHLEKMGCRLMNRPQAILNCVNKFWTFQELAGHGVPLPDTFSYGGHENFAKMIDEAEVLEFPMVVKNTRGHRGKAVFLARDKHHLADLSHLIRHEAPYLFQKYVKESHGRDVRVIVVGGRVVGTMLRCSTDGRMQSNCSLGGVGMMCSLSEQGKQLAIQVSNILGMDVCGIDLLMKDDGSFCVCEANANVGFIAFDKACNLDVAGIIADYAASLLPSGRLTRRMSLLSVVSTASETSEPELGPPASTAVDNMSASSSSVDSDPESTERELLTKLPGGLFNMNQLLANEIKLLVD

SEQ ID NO: 61962 - protein, 386 aa, Homo sapiens; identical to SEQ ID NO: 61961

SEQ ID NO: 61963 - protein, 386 aa, Homo sapiens; identical to SEQ ID NO: 61961

SEQ ID NO: 61964 - protein, 95 aa, Homo sapiens
MCSSVAAKLWFLTDRRIREDYPQKEILRALKAKCCEEELDFRAVVMDEVVLTIEQGNLGLRINGELITAYPQVVVVRVPTPWVQSDSDITVLRHL

SEQ ID NO: 61965 - protein, 114 aa, Homo sapiens
MCSSVAAKLWFLTDRRIREDYPQKEILRALKAKCCEEELDFRAVVMDEVVLTIEQGNLGLRINGELITAYPQVVVVRVPTPWVQSDSDITVLRHLEKMGCRLMNRPQAILNCVN

SEQ ID NO: 61966 - protein, 214 aa, Homo sapiens
MGRRPARCYRYCKNKPYPKSRFCRGVPDAKIRIFDLGRKKAKVDEFPLCGHMVSDEYEQLSSEALEAARICANKYMVKSCGKDGFHIRVRLHPFHVIRINKMLSCAGADRLQTGMRGAFGKPQGTVARVHIGQVIMSIRTKLQNKEHVIEALRRAKFKFPGRQKIHISKKWGFTKFNADEFEDMVAEKRLIPDGCGVKYIPNRGPLDKWRALHS

SEQ ID NO: 61967 - protein, 214 aa, Homo sapiens; identical to SEQ ID NO: 61966

SEQ ID NO: 61968 - protein, 214 aa, Homo sapiens; identical to SEQ ID NO: 61966

SEQ ID NO: 61969 - protein, 201 aa, Homo sapiens
MGRRPARCYRYCKNKPYPKSRFCRGVPDAKIRIFDLGRKKAKVDEFPLCGHMVSDEYEQLSSEALEAARICANKYMVKSCGKDGFHIRVRLHPFHVIRINKMLSCAGADRLQTGMRGAFGKPQGTVARVHIGQVIMSIRTKLQNKEHVIEALRRAKFKFPGRQKIHISKKWGFTKFNADEFEDMVAEKRLIPDGCGVKYIP

SEQ ID NO: 61970 - protein, 108 aa, Homo sapiens
PKSRFCRGVPDAKIRIFDLGRKKAKVDEFPLCGHMVSDEYEQLSSEALEAARICANKYMVKSCGKDGFHIRVRLHPFHVIRINKMLSCAGADRPTLLCQCWETSRNTS

SEQ ID NO: 61971 - protein, 181 aa, Homo sapiens
MGRRPARCYRYCKNKPYPKSRFCRGVPDAKIRIFDLGRKKAKVDEFPLCGHMVSDEYEQLSSEALEAARICANKYMVKSCGKDGFHIRVRLHPFHVIRINKMLSCAGADRSTSQRSGASPSSMLMNLKTWWLKSGSSQMAVGSSTSPIVALWTSGGPCTHEGFQCAAPLLILTNKFYFLST

SEQ ID NO: 61972 - protein, 178 aa, Homo sapiens [sequence omitted]

SEQ ID NO: 61973 - protein, 131 aa, Homo sapiens
QDQGEKENPMRELRIRKLCLNICVGESGDRLTRAAKVLEQLTGQTPVFSKARYTVRSFGIRRNEKIAVHCTVRGAKAEEILEKGLKVREYELRKNNFSDTGNFGFGIQEHIDLGIKYDPSIGIYGLDFYVV

SEQ ID NO: 61974 - protein, 174 aa, Homo sapiens
QDQGEKENPMRELRIRKLCLNICVGESGDRLTRAAKVLEQLTGQTPVFSKARYTVRSFGIRRNEKIAVHCTVRGAKAEEILEKGLKVREYELRKNNFSDTGNFGFGIQEHIDLGIKYDPSIGIYGLDFYVVLGRPGFSIADKKRRTGCIGAKHRISKEEAMRWFQQKVKLIYLK

SEQ ID NO: 61975 - protein, 165 aa, Homo sapiens [sequence omitted]

SEQ ID NO: 61976 - protein, 132 aa, Homo sapiens
MPPKFDPNEIKVVYLRCTGGEVGATSALAPKIGPLGLIEVVPSASALIIKALKEPPRDRKKQKNIKHSGNITFDEIVNIARQMRHRSLARELSGTIKEILGTAQSVGCNVDGRHPHDIIDDINSGAVECPAS

SEQ ID NO: 61977 - protein, 211 aa, Homo sapiens [sequence omitted]

SEQ ID NO: 61978 - protein, 211 aa, Homo sapiens [sequence omitted]

SEQ ID NO: 61979 - protein, 164 aa, Homo sapiens
MAPSRNGMVLKPHFHKDWQRRVATWFNQPARKIRRRKARQAKARRIAPRPASGPIRPIVRCPTVRYHTKVRAGRGFSLEELRVAGIHKKGDSSAEELKLATQLTGPVMPVRNVYKKEKARVITEEEKNFKAFASLRMARANARLFGIRAKRAKEAAEQDVEKKK

SEQ ID NO: 61980 - protein, 204 aa, Homo sapiens [sequence omitted]

SEQ ID NO: 61981 - protein, 204 aa, Homo sapiens [sequence omitted]

SEQ ID NO: 61982 - protein, 175 aa, Homo sapiens
MGAYKYIQELWRKKQSDVMRFLLRVRCWQYRQLSALHRAPRPTRPDKARRLGYKAKQGYVIYRIRVRRGGRKRPVPKGATYGKPVHHGVNQLKFARSLQSVAEVNAGRHCGALRVLNSYWVGEDSTYKFFEVILIDPFHKAIRRNPDTQWITKPVHKHREMRGLTSAGRKSRGLG

SEQ ID NO: 61983 - protein, 204 aa, Homo sapiens [sequence omitted]

SEQ ID NO: 61984 - protein, 204 aa, Homo sapiens [sequence omitted]

SEQ ID NO: 61985 - protein, 133 aa, Homo sapiens
MGAYKYIQELWRKKQSDVMRFLLRVRCWQYRQLSALHRAPRPTRPDKARRLGYKAKQGYVIYRIRVRRGGRKRPVPKGATYGKPVHHGVNQLKFARSLQSVAEERAGRHCGALRVLNSYWVGEDSTYKFFEVI

SEQ ID NO: 61986 - protein, 174 aa, Homo sapiens
MGAYKYIQELWRKKQSDVMRFLLRVRCWQYRQLSALHRAPRPTRPDKARRLGYKAKQGYVIYRIRVRRGGRKRPVPKGATYGKPVHHGVNQLKFARSLQSVAEERAGRHCGALRVLNSYWVGEDSTYKFFEVILIDPFHKAIRRNPDTQWITKPVHKHREMRGLTSAGRKSRGL

SEQ ID NO: 61987 - protein, 204 aa, Homo sapiens [sequence omitted]

SEQ ID NO: 61988 - protein, 59 aa, Homo sapiens
MGAYKYIQELWRKKQSDVMRFLLRVRCWQYRQLSALHRAPRPTRPDKARRLGYKAKQGT

SEQ ID NO: 61989 - protein, 145 aa, Homo sapiens
MGAYKYIQELWRKKQSDVMRFLLRVRCWQYRQLSALHRAPRPTRPDKARRLGYKAKQGYVIYRIRVRRGGRKRPVPKGATYGKPVHHGVNQLKFARSLQSVAEERAGRHCGALRVLNSYWMESHSHSGGSAVGQSRLTATSVSRV

SEQ ID NO: 61990 - protein, 164 aa, Homo sapiens
MGAYKYIQELWRKKQSDVMRFLLRVRCWQYRQLSALHRAPRPTRPDKARRLGYKAKQGYVIYRIRVRRGGRKRPVPKGATYGKPVHHGVNQLKFARSLQSVAEERAGRHCGALRVHKHREMRGLTSAGRKSRGLGKGHKFHHTIGGSRRAAWRRRNTLQLHRYR

SEQ ID NO: 61991 - protein, 146 aa, Homo sapiens
MHIRKATKYLKDVTLQKQCVPFRRYNGGVGRCAQAKQWGWTQGRWPKKSAEFLLHMLKNAESNAELKGLDVDSLVIEHIQVNKAPKMRRRTYRAHGRINPYMSSPCHIEMILTEKEQIVPKPEEEVAQKKKISQKKLKKQKLMARE

SEQ ID NO: 61992 - protein, 184 aa, Homo sapiens [sequence omitted]

SEQ ID NO: 61993 - protein, 184 aa, Homo sapiens [sequence omitted]

SEQ ID NO: 61994 - protein, 190 aa, Homo sapiens
  VARIANT 1: note = MOD_RES - Any amino acid
XPQGVDIRHNKDRKVRRKEPKSQDIYLRLLVKLYRFLARRTNSTFNQVVLKRLFMSRTNRPPLSLSRMIRKMKLPGRENKTAVVVGTITDDVRVQEVPKLKVCALRVTSRARSRILRAGGKILTFDQLALDSPKGCGTVLLSGPRKGREVYRHFGKAPGTPHSHTKPYVRSKGRKFERARGRRASRGYKN

SEQ ID NO: 61995 - protein, 135 aa, Homo sapiens
MGVDIRHNKDRKVRRKEPKSQDIYLRLLVKLYRFLARRTNSTFNQVVLKRLFMSRTNRPPLSLSRMIRKMKLPGRENKTAVVVGTITDDVRVQEVPKLKVSWRGLGRPIRPLLYCAVLCCAVLCCLVHPQSCHRW

SEQ ID NO: 61996 - protein, 188 aa, Homo sapiens [sequence omitted]

SEQ ID NO: 61997 - protein, 159 aa, Homo sapiens
MLYRFLARRTNSTFNQVVLKRLFMSRTNRPPLSLSRMIRKMKLPGRENKTAVVVGTITDDVRVQEVPKLKVCALRVTSRARSRILRAGGKILTFDQLALDSPKGCGTVLLSGPRKGREVYRHFGKAPGTPHSHTKPYVRSKGRKFERARGRRASRGYKN

SEQ ID NO: 61998 - protein, 176 aa, Homo sapiens [sequence omitted]

SEQ ID NO: 61999 - protein, 154 aa, Homo sapiens [sequence omitted]

SEQ ID NO: 62000 - protein, 196 aa, Homo sapiens [sequence omitted]

SEQ ID NO: 62001 - protein, 160 aa, Homo sapiens [sequence omitted]

SEQ ID NO: 62002 - protein, 160 aa, Homo sapiens [sequence omitted]

SEQ ID NO: 62003 - protein, 160 aa, Homo sapiens [sequence omitted]

SEQ ID NO: 62004 - protein, 160 aa, Homo sapiens [sequence omitted]

SEQ ID NO: 62005 - protein, 128 aa, Homo sapiens [sequence omitted]

SEQ ID NO: 62006 - protein, 91 aa, Homo sapiens
MAGSRRECRRGGSSGAKFRISLGLPVGAVINCADNTGAKNLYIISVKGIKGRLNRLPAAGVGDMVMATVKKGKPELRKKVHPAVVIRQRKS

SEQ ID NO: 62007 - protein, 140 aa, Homo sapiens [sequence omitted]

SEQ ID NO: 62008 - protein, 114 aa, Homo sapiens
MSKRGRGGSSGAKFRISLGLPVGAVINCADNTGAKNLYIISVKGIKGRLNRLPAAGVGDMVMATVKKGKPELRKKVLLCHTGWSAVTPLKLTVTLNCWTWNPPAVAFKGLQLQV

SEQ ID NO: 62009 - protein, 140 aa, Homo sapiens [sequence omitted]

SEQ ID NO: 62010 - protein, 158 aa, Homo sapiens
  VARIANT 1: note = MOD_RES - Any amino acid
XLVGAPCPRASPAPPKAEAKAKALKAKKAVLKGVHSHKKKKIRTSPTFRRPKTLRLRRQPKYPRKSAPRRNKLDHYAIIKFPLTTESAMKKIEDNNTLVFIVDVKANKHQIKQAVKKLYDIDVAKVNTLIRPDGEKKAYVRLAPDYDALDVANKIGII

SEQ ID NO: 62011 - protein, 158 aa, Homo sapiens
MSPGLVVLRWAPAPPKAEAKAKALKAKKAVLKGVHSHKKKKIRTSPTFRRPKTLRLRRQPKYPRKSAPRRNKLDHYAIIKFPLTTESAMKKIEDNNTLVFIVDVKANKHQIKQAVKKLYDIDVAKVNTLIRPDGEKKAYVRLAPDYDALDVANKIGII

SEQ ID NO: 62012 - protein, 194 aa, Homo sapiens
MHPLVGAPCPRACKELVPSALTIFLLVHVQPGYITRPSLRSVVLRWAPAPPKAEAKAKALKAKKAVLKGVHSHKKKKIRTSPTFRRPKTLRLRRQPKYPRKSAPRRNKLDHYAIIKFPLTTESAMKKIEDNNTLVFIVDVKANKHQIKQAVKKLYDIDVAKVNTLIRPDGEKKAYVRLAPDYDALDVANKIGII

SEQ ID NO: 62013 - protein, 156 aa, Homo sapiens [sequence omitted]

SEQ ID NO: 62014 - protein, 157 aa, Homo sapiens [sequence omitted]

SEQ ID NO: 62015 - protein, 150 aa, Homo sapiens
MKVELCSFSGYKIYPGHGRRYARTDGKVFQFLNAKCESAFLSKRNPRQINWTVLYRRKHKKGQSEEIQKKRTRRAVKFQRAITGASLADIMAKRNQKPEVRKAQREQAIRAAKEAKKAKQASKKTAMAAAKVIMGFLYFLEQYNRKIFFF

SEQ ID NO: 62016 - protein, 145 aa, Homo sapiens [sequence omitted]

SEQ ID NO: 62017 - protein, 136 aa, Homo sapiens [sequence omitted]

SEQ ID NO: 62018 - protein, 148 aa, Homo sapiens [sequence omitted]

SEQ ID NO: 62019 - protein, 108 aa, Homo sapiens
MPSRLRKTRKLRGHVSHGHGRIGKHRKHPGGRGNAGGLHHHRINFDKYHPGYFGKVGMKHYHLKRNQSFCPTVNLDKLWTLVSEQTRVNAAKNKTGAAPIIDVVRSVS

SEQ ID NO: 62020 - protein, 137 aa, Homo sapiens [sequence omitted]

SEQ ID NO: 62021 - protein, 69 aa, Homo sapiens
MSAHLQWMVVRNCSSFLIKRNKQTYSTEPNNLKARNSFRYNGLIHRKTVGVEPAADGKGVVVVIKRRSE

SEQ ID NO: 62022 - protein, 87 aa, Homo sapiens
MSAHLQWMVVRNCSSFLIKRNKQTYSTEPNNLKARNSFRYNGLIHRKTVGVEPAADGKGVVVVIKRRSGEFCLVWARERPLSRVWEL

SEQ ID NO: 62023 - protein, 169 aa, Homo sapiens
MSAHLQWMVVRNCSSFLIKRNKQTYSTEPNNLKARNSFRYNGLIHRKTVGVEPAADGKGVVVVIKRRSGQRKPATSYVRTTINKNARATLSSIRHMIRKNKYRPDLRMDMLASTGSGLCCSVAVQPWASSSTSLCLRTLICNMRVDRPYYSGLMRRLNVQNLLDCAHKS

SEQ ID NO: 62024 - protein, 169 aa, Homo sapiens; identical to SEQ ID NO: 62023

SEQ ID NO: 62025 - protein, 137 aa, Homo sapiens [sequence omitted]

SEQ ID NO: 62026 - protein, 163 aa, Homo sapiens
MSAHLQWMVVRNCSSFLIKRNKQTYSTEPNNLKARNSFRYNGLIHRKTVGVEPAADGKGVVVVIKRRSGQRKPATSYVRTTINKNARATLSSIRHMIRKNKYRPDLRMVSWGLGIRLGETGQCCGEGPPTTGCNMGWRGMDSCFQPTPHTQHWPRGRLVECMG

SEQ ID NO: 62027 - protein, 159 aa, Homo sapiens [sequence omitted]

SEQ ID NO: 62028 - protein, 159 aa, Homo sapiens [sequence omitted]

SEQ ID NO: 62029 - protein, 159 aa, Homo sapiens [sequence omitted]

SEQ ID NO: 62030 - protein, 159 aa, Homo sapiens [sequence omitted]

SEQ ID NO: 62031 - protein, 159 aa, Homo sapiens [sequence omitted]

SEQ ID NO: 62032 - protein, 159 aa, Homo sapiens [sequence omitted]

SEQ ID NO: 62033 - protein, 403 aa, Homo sapiens
MSHRKFSAPRHGSLGFLPRKRSSRHRGKVKSFPKDDPSKPVHLTAFLGYKAGMTHIVREVDRPGSKVNKKEVVEAVTIVETPPMVVVGIVGYVETPRGLRTFKTVFAEHISDECKRRFYKNWHKSKKKAFTKYCKKWQDEDGKKQLEKDFSSMKKYCQVIRVIAHTQMRLLPLRQKKAHLMEIQVNGGTVAEKLDWARERLEQQVPVNQVFGQDEMIDVIGVTKGKGYKGVTSRWHTKKLPRKTHRGLRKVACIGAWHPARVAFSVARAGQKGYHHRTEINKKIYKIGQGYLIKDGKLIKNNASTDYDLSDKSINPLGGFVHYGEVTNDFVMLKGCVVGTKKRVLTLRKSLLVQTKRRALEKIDLKFIDTTSKFGHGRFQTMEEKKAFMGPLKKDRIAKEEGA

SEQ ID NO: 62034 - protein, 351 aa, Homo sapiens
MTHIVREVDRPGSKVNKKEVVEAVTIVETPPMVVVGIVGYVETPRGLRTFKTVFAEHISDECKRRFYKNWHKSKKKAFTKYCKKWQDEDGKKQLEKDFSSMKKYCQVIRVIAHTQMRLLPLRQKKAHLMEIQVNGGTVAEKLDWARERLEQQVPVNQVFGQDEMIDVIGVTKGKGYKGVTSRWHTKKLPRKTHRGLRKVACIGAWHPARVAFSVARAGQKGYHHRTEINKKIYKIGQGYLIKDGKLIKNNASTDYDLSDKSINPLGGFVHYGEVTNDFVMLKGCVVGTKKRVLTLRKSLLVQTKRRALEKIDLKFIDTTSKFGHGRFQTMEEKKAFMGPLKKDRIAKEEGA

SEQ ID NO: 62035 - protein, 115 aa, Homo sapiens [sequence omitted]

SEQ ID NO: 62036 - protein, 115 aa, Homo sapiens [sequence omitted]

SEQ ID NO: 62037 - protein, 114 aa, Homo sapiens
MVAAKKTKKSLESINSRLQLVMKSGKYVLGYKQTLKMIRQGKAKLVILANNCPALRKSEIEYYAMLAKTGVHHYSGNNIELGTACGKYYRVCTLAIIDPGDSDIIRSMPEQTGE

SEQ ID NO: 62038 - protein, 94 aa, Homo sapiens
MSGRLWSKAIFAGYKRGLRNQREHTALLKIEGVYARDETEFYLGKRCAYVYKAKNNTVTPGGKPNKTRVIWGKVTRAHGNSGMVRAKFRSNLPA

SEQ ID NO: 62039 - protein, 110 aa, Homo sapiens [sequence omitted]

SEQ ID NO: 62040 - protein, 110 aa, Homo sapiens [sequence omitted]

SEQ ID NO: 62041 - protein, 131 aa, Homo sapiens
  VARIANT 1: note = MOD_RES - Any amino acid
XLPFASRFLSFRADSAHASMVNVPKTRRTFCKKCGKHQPHKVTQYKKGKDSLYAQGKRRYDRKQSGYGGQTKPIFRKKAKTTKKIVLRLECVEPNCRSKRMLAIKRCKHFELGGDKKRKVYNYGWKVQSFS

SEQ ID NO: 62042 - protein, 142 aa, Homo sapiens
MIAPTDSHEEVRSGTSYILPFASRFLSFRADSAHASMVNVPKTRRTFCKKCGKHQPHKVTQYKKGKDSLYAQGKRRYDRKQSGYGGQTKPIFRKKAKTTKKIVLRLECVEPNCRSKRMLAIKRCKHFELGGDKKRKGQVIQF

SEQ ID NO: 62043 - protein, 106 aa, Homo sapiens [sequence omitted]

SEQ ID NO: 62044 - protein, 106 aa, Homo sapiens
MVNVPKTRRTFCKKCGKHQPHKVTQYKKGKDSLYAQGRRRYDRKQSGYGGQTKPIFRKKAKTTKKIVLRLECVEPNCRSKRMLAIKRCKHFELGGDKKRKGQVIQF

SEQ ID NO: 62045 - protein, 97 aa, Homo sapiens [sequence omitted]

SEQ ID NO: 62046 - protein, 68 aa, Homo sapiens
MVKKIEISQHAKYTCSFCGKTKMKRRAVGIWHCGSCMKTVAGGAWTYNTTSAVTVKSAIRRLKELKDQ

SEQ ID NO: 62047 - protein, 92 aa, Homo sapiens [sequence omitted]

SEQ ID NO: 62048 - protein, 70 aa, Homo sapiens [sequence omitted]

SEQ ID NO: 62049 - protein, 70 aa, Homo sapiens [sequence omitted]

SEQ ID NO: 62050 - protein, 70 aa, Homo sapiens [sequence omitted]

SEQ ID NO: 62051 - protein, 51 aa, Homo sapiens
MSSHKTFTIKRFLAKKQKQNRPIPQWIQMKPGSKIRYNSKRRHWRRTKLGL

SEQ ID NO: 62052 - protein, 51 aa, Homo sapiens; identical to SEQ ID NO: 62051

SEQ ID NO: 62053 - protein, 51 aa, Homo sapiens; identical to SEQ ID NO: 62051

SEQ ID NO: 62054 - protein, 427 aa, Homo sapiens [sequence omitted]

SEQ ID NO: 62055 - protein, 406 aa, Homo sapiens
MACARPLISVYSEKGESSGKNVTLPAVFKAPIRPDIVNFVHTNLRKNNRQPYAVSELAGHQTSAESWGTGRAVARIPRVRGGGTHRSGQGAFGNMCRGGRMFAPTKTWRRWHRRVNTTQKRYAICSALAASALPALVMSKGHRIEEVPELPLVVEDKVEGYKKTKEAVLLLKKLKAWNDIKKVYASQRMRAGKGKMRNRRRIQRRGPCIIYNEDNGIIKAFRNIPGITLLNVSKLNILKLAPGGHVGRFCIWTESAFRKLDELYGTWRKAASLKSNYNLPMHKMINTDLSRILKSPEIQRALRAPRKKIHRRVLKKNPLKNLRIMLKLNPYAKTMRRNTILRQARNHKLRVDKAAAAAAALQAKSDEKAAVAGKKPVVGKKGKKAAVGEKKPAEKKPTTEEKKPAA

SEQ ID NO: 62056 - protein, 151 aa, Homo sapiens
MACARPLISVYSEKGESSGKNVTLPAVFKAPIRPDIVNFVHTNLRKNNRQPYAVSELAGHQTSAESWGTGRAVARIPRVRGGGTHRSGQGAFGNMCRGGRMFAPTKTWRRWHRRVNTTQKLENHVEAKPICKDHAPEHHSSPGQESQAPGG

SEQ ID NO: 62057 - protein, 25 aa, Homo sapiens [sequence omitted]

SEQ ID NO: 62058 - protein, 25 aa, Homo sapiens [sequence omitted]

SEQ ID NO: 62059 - protein, 126 aa, Homo sapiens
MIVRVTNRDIICQIAYARIEGDMIVCAAYAHELPKYGVKVGLTNYAAAYCTGLLLARRLLNRFGMDKIYEGQVEVTGDEYNVESIDGQPGAFTCYLDAGLARTTTGNKVFGALKGAVDGGLSIPHR

SEQ ID NO: 62060 - protein, 297 aa, Homo sapiens [sequence omitted]

SEQ ID NO: 62061 - protein, 247 aa, Homo sapiens
MIVRVTNRDIICQIAYARIEGDMIVCAAYAHELPKYGVKVGLTNYAAAYCTGLLLARRLLNRFGMDKIYEGQVEVTGDEYNVESIDGQPGAFTCYLDAGLARTTTGNKVFGALKGAVDGGLSIPHSTKRFPGYDSESKEFNAEVHRKHIMGQNVADYMRYLMEEDEDAYKKQFSQYIKNSVTPDMMEEMYKKAHAAIRENPVYEKKPKKEVKKKRWNRPKMSLAQKKDRVAQKKASFLRAQERAAES

SEQ ID NO: 62062 - protein, 288 aa, Homo sapiens [sequence omitted]

SEQ ID NO: 62063 - protein, 288 aa, Homo sapiens [sequence omitted]

SEQ ID NO: 62064 - protein, 105 aa, Homo sapiens
MAGEKVEKPDTKEKKPEAKKVDAGGKVKKGNLKAKKPKKGKPHCSRNPVLVRGIGRYSRSAMYSRKAMYKRKYSAAKSKVEKKKKEKVLATVTKPVGGDKNGGTR

SEQ ID NO: 62065 - protein, 72 aa, Homo sapiens
MAGEKVEKPDTKEKKPEAKKVDAGGKVKKGNLKAKKPKKGKPHCSRNPVLVRGIGRYSRSAMYSRKAMYKRK

SEQ ID NO: 62066 - protein, 159 aa, Homo sapiens
MAGEKVEKPDTKEKKPEAKKVDAGGKVKKGNLKAKKPKKGKPHCSRNPVLVRGIGRYSRSAMYSRKAMYKRKYSAAKSKVEKKKKEKVLATVTKPVGGDKNGGTRVVKLRKMPRYYPTEDVPRKLLSHGKKPFSQHVRKLRASITPGTILIILTGRHRG

SEQ ID NO: 62067 - protein, 114 aa, Homo sapiens
MAGEKVEKPDTKEKKPEAKKVDAGGKVKKGNLKAKKPKKGKPHCSRNPVLVRGIGRYSRSAMYSRKAMYKRKYSAAKSKVEKKKKEKVLATVTKPVGGDKNGGTRVVKLRKMVR

SEQ ID NO: 62068 - protein, 114 aa, Homo sapiens; identical to SEQ ID NO: 62067

SEQ ID NO: 62069 - protein, 248 aa, Homo sapiens
MEGVEEKKKEVPAVPETLKKKRRNFAELKIKRLRKKFAQKMLRKARRKLIYEKAKHYHKEYRQMYRTEIRMARMARKAGNFYVPAEPKLAFVIRIRGINGVSPKVRKVLQLLRLRQIFNGTFVKLNKASINMLRIVEPYIAWGYPNLKSVNELIYKRGYGKINKKRIALTDNALIARSLGKYGIICMEDLIHEIYTVGKRFKEANNFLWPFKLSSPRGGMKKKTTHFVEGGDAGNREDQINRLIRRMN

SEQ ID NO: 62070 - protein, 151 aa, Homo sapiens
MAPLYQAAGKGDVPTKRPPVLRAGVNTVTTLVENKKAQLVVIAHDVDPIELVVFLPALCRKMGVPYCIIKGKARLGRLVHRKTCTTVAFTQVNSEDKGALAKLVEAIRTNYNDRYDEIRRHWGGNVLGPKSVARIAKLEKAKAKELATKLG

SEQ ID NO: 62071 - protein, 266 aa, Homo sapiens [sequence omitted]

SEQ ID NO: 62072 - protein, 191 aa, Homo sapiens
MLVRLNVRCSCRGVVLGGCRKLLASLVQPKGKKAKGKKVAPAPAVVKKQEAKKVVNPLFEKRPKNFGIGQDIQPKRDLTRFVKWPRYIRLQRQRAILYKRLKVPPAINQFTQALDRQTATQLLKLAHKYRPETKQEKKQRLLARAEKKAAGKGDVPTKRPPVLRAGVNTVTTLVENKKAQLVVIAHDVDPI

SEQ ID NO: 62073 - protein, 257 aa, Homo sapiens [sequence omitted]

SEQ ID NO: 62074 - protein, 257 aa, Homo sapiens [sequence omitted]

SEQ ID NO: 62075 - protein, 192 aa, Homo sapiens [sequence omitted]

SEQ ID NO: 62076 - protein, 147 aa, Homo sapiens
MKTILSNQTVDIPENVDITLKGRTVIVKGPRGTLRRDFNHINVELSLLGKKKKRLRVDKWWGNRKELATVRTICSHVQNMIKGVTLGFRYKMRSVYAHFPINVVIQENGSLVEIRNFLGEKYIRRVRMRPGVACFKFSGFDSASHNS

SEQ ID NO: 62077 - protein, 192 aa, Homo sapiens [sequence omitted]

SEQ ID NO: 62078 - protein, 166 aa, Homo sapiens
MKTILSNQTVDIPENVDITLKGRTVIVKGPRGTLRRDFNHINVELSLLGKKKKRLRVDKWWGNRKELATVRTICSHVQNMIKGVTLGFRYKMRSVYAHFPINVVIQENGSLVEIRNFLGEKYIRRVRMRPGVACSVSQAQKDELILEGNDIELVSNSAALIQQATT

SEQ ID NO: 62079 - protein, 165 aa, Homo sapiens
MLMPKKNRIAIYELLFKEGVMVAKKDVHMPKHPELADKNVPNLHVMKAMQSLKSRGYVKEQFAWRHFYWYLTNEGIQYLRDYLHLPPEIVPATLRRSRPETGRPRPKGLEGERPARLTRGEADRDTYRRSAVPPGADKKAEAGAGSATEFQFRGGFGRGRGQPPQ

SEQ ID NO: 62080 - protein, 158 aa, Homo sapiens [sequence omitted]

SEQ ID NO: 62081 - protein, 132 aa, Homo sapiens [sequence omitted]

SEQ ID NO: 62082 - protein, 151 aa, Homo sapiens [sequence omitted]

SEQ ID NO: 62083 - protein, 151 aa, Homo sapiens [sequence omitted]

SEQ ID NO: 62084 - protein, 151 aa, Homo sapiens [sequence omitted]

SEQ ID NO: 62085 - protein, 151 aa, Homo sapiens [sequence omitted]

SEQ ID NO: 62086 - protein, 151 aa, Homo sapiens [sequence omitted]

SEQ ID NO: 62087 - protein, 145 aa, Homo sapiens [sequence omitted]

SEQ ID NO: 62088 - protein, 145 aa, Homo sapiens [sequence omitted]

SEQ ID NO: 62089 - protein, 130 aa, Homo sapiens [sequence omitted]

SEQ ID NO: 62090 - protein, 130 aa, Homo sapiens [sequence omitted]

SEQ ID NO: 62091 - protein, 146 aa, Homo sapiens [sequence omitted]

SEQ ID NO: 62092 - protein, 152 aa, Homo sapiens
MPSKGPLQSVQVFGRKKTATAVAHCKRGNGLIKVNGRPLEMIEPRTLQYKLLEPVLLLGKERFAGVDIRVRVKGGGHVAQIYGESQELGAWRRWLWEGGLHSAPVPFNCVSFSQLSVSPSPKPWWPITRNMWMRLPRRRSKTSSSSMTGPCW

SEQ ID NO: 62093 - protein, 135 aa, Homo sapiens [sequence omitted]

SEQ ID NO: 62094 - protein, 152 aa, Homo sapiens [sequence omitted]

SEQ ID NO: 62095 - protein, 152 aa, Homo sapiens [sequence omitted]

SEQ ID NO: 62096 - protein, 152 aa, Homo sapiens [sequence omitted]

SEQ ID NO: 62097 - protein, 34 aa, Homo sapiens
MSLVIPEKFQHILRVLNTNIDGRRKIAFAITAIK

SEQ ID NO: 62098 - protein, 152 aa, Homo sapiens [sequence omitted]

SEQ ID NO: 62099 - protein, 152 aa, Homo sapiens [sequence omitted]

SEQ ID NO: 62100 - protein, 82 aa, Homo sapiens
MQNPRQYKIPDWFLNRQKDVKDGKYSQVLANGLDNKLREDLERLKKIRAHRGLRHFWGLRVRGQHTKTTGRRGRTVGVSKKK

SEQ ID NO: 62101 - protein, 82 aa, Homo sapiens; identical to SEQ ID NO: 62100

SEQ ID NO: 62102 - protein, 82 aa, Homo sapiens; identical to SEQ ID NO: 62100

SEQ ID NO: 62103 - protein, 82 aa, Homo sapiens; identical to SEQ ID NO: 62100

SEQ ID NO: 62104 - protein, 82 aa, Homo sapiens; identical to SEQ ID NO: 62100

SEQ ID NO: 62105 - protein, 145 aa, Homo sapiens [sequence omitted]

SEQ ID NO: 62106 - protein, 145 aa, Homo sapiens [sequence omitted]

SEQ ID NO: 62107 - protein, 136 aa, Homo sapiens
MSAALLRRGLELLAASEAPRDPPGQAKPRGAPVKRPRKTKAIQAQKLRNSAKGKVPKSALDEYRKRECRDHLRVNLKFLTRTRSTVAESVSQQILRQNRGRKACDRPVAKTKKKKAEGTVFTEEDFQKFQQEYFGS

SEQ ID NO: 62108 - protein, 293 aa, Homo sapiens [sequence omitted]

SEQ ID NO: 62109 - protein, 235 aa, Homo sapiens
MADDAGAAGGPGGPGGPGMGNRGGFRGGFGSGIRGRGRGRGRGRGRGRGARGGKAEDKEWMPVTKLGRLVKDMKIKSLEEIYLFSLPIKESEIIDFFLGASLKDEVLKIMPVQKQTRAGQRTRFKVTGRCGSVLVRLIPAPRGTGIVSAPVPKKLLMMAGIDDCYTSARGCTATLGNFAKATFDAISKTYSYLTPDLWKETVFTKSPYQEFTDHLVKTHTRVSVQRTQAPAVATT

SEQ ID NO: 62110 - protein, 178 aa, Homo sapiens [sequence omitted]

SEQ ID NO: 62111 - protein, 195 aa, Homo sapiens
VTKLGRLVKDMKIKSLEEIYLFSLPIKAFVAIGDYNGHVGLGVKCSKEVATAIRGAIILAKLSIVPVRRGYWGNKIGKPHTVPCKVTGRCGSVLVRLIPAPRGTGIVSAPVPKKLLMMAGIDDCYTSARGCTATLGNFAKATFDAISKTYSYLTPDLWKETVFTKSPYQEFTDHLVKTHTRVSVQRTQAPAVATT

SEQ ID NO: 62112 - protein, 119 aa, Homo sapiens [sequence omitted]

SEQ ID NO: 62113 - protein, 142 aa, Homo sapiens
MAFKDTGKTPVEPEVAIHRIRITLTSRNVKSLEKVCADLIRGAKEKNLKVKGPVRMPTKTLRITTRKTPCGEGSKTWDRFQMRIHKRLIDLHSPSEIVKQITSISIEPGVELIESTDAEPMDTEGQQYTLRSVFESPGTCPF

SEQ ID NO: 62114 - protein, 119 aa, Homo sapiens [sequence omitted]

SEQ ID NO: 62115 - protein, 83 aa, Homo sapiens
MQNDAGEFVDLYVPRKCSASNRIIGAKDHASIQMNVAEVDKVTGRFNGQFKTYAICGAIRRMGESDDSILRLAKADGIVSKNF

SEQ ID NO: 62116 - protein, 97 aa, Homo sapiens
MQNDAGEFVDLYVPRKCSASNRIIGAKDHASIQMNVARLTRSQAGLMASLKLMLSAGPFVGWVSQMIPFSDWPRRWHRLKELLTGENHRCGIFVINK

SEQ ID NO: 62117 - protein, 83 aa, Homo sapiens; identical to SEQ ID NO: 62115

SEQ ID NO: 62118 - protein, 66 aa, Homo sapiens
MQNDAGEFVDLYVPRKCSASNRIIGAKDHASIQMNVAEVSWEPGRREGCDICAGKAGCPIVEEPLG

SEQ ID NO: 62119 - protein, 90 aa, Homo sapiens
MQNDAGEFVDLYVPRKCSASNRIIGAKDHASIQMNVAEVDKVTGRFNGQFKTYAICGAIRRMVSVSLGFAHHFGTSWTLPCALECVMVPE

SEQ ID NO: 62120 - protein, 81 aa, Homo sapiens
MQNDAGEFVDLYVPRKCSASNRIIGAKDHASIQMNVAEVDKVTGRFNGQFKTYAICGAIRRMGESDDSILRLAKADGIVSK

SEQ ID NO: 62121 - protein, 143 aa, Homo sapiens [sequence omitted]

SEQ ID NO: 62122 - protein, 130 aa, Homo sapiens
MNDTVTIRTRKFMTNRLLQRKQMVIDVLHPGKATVPKTEIREKLAKMYKTTPDVIFVFGFRTHFGGGKTTGFGMIYDSLDYAKKNEPKHRLARHGLYEKKKTSRKQRKERKNRMKKVRGTAKANVGAGKK

SEQ ID NO: 62123 - protein, 133 aa, Homo sapiens [sequence omitted]

SEQ ID NO: 62124 - protein, 132 aa, Homo sapiens
MNDTVTIRTRKFMTNRLLQRKQMVIDVLHPGKATVPKTEIREKLAKMYKTTPDVIFVFGFRTHFGGGKTTGFGMIYDSLDYAKKNEPKHRLARHGLYEKKKTSRKQRKERKNRMKKVRGTAKANVGAGKKQK

SEQ ID NO: 62125 - protein, 131 aa, Homo sapiens
MNDTVTIRTRKFMTNRLLQRKQMVIDVLHPGKATVPKTEIREKLAKMYKTTPDVIFVFGFRTHFGGGKTTGFGMIYDSLDYAKKNEPKHRLARHGLYEKKKTSRKQRKERKNRMKKVRGTAKANVGAGKKQ

SEQ ID NO: 62126 - protein, 289 aa, Homo sapiens
MNDTVTIRTRKFMTNRLLQRKQMVIDVLHPGKATVPKTEIREKLAKMYKTTPDVIFVFGFRTHFGGGKTTGFGMIYDSLDYAKKNEPKHRLARHGLYEKKKTSRKQRKERKNRMKKVRGTAKANVGAGKKMRELGLGVQALGRISQEERCTDVKNSKARESRGVVWQVEVPGPWSVWTCGRLRRGCGKYLQVAVTWRKTENREQCCQACLLERALVRNGAFMSPASPAPAGSPHPVDGDLVLHLPEALSATLTLSPHIQAINKSFGPFFEIHQESSCFSPPSCLSGLGH

SEQ ID NO: 62127 - protein, 125 aa, Homo sapiens [sequence omitted]

SEQ ID NO: 62128 - protein, 115 aa, Homo sapiens [sequence omitted]

SEQ ID NO: 62129 - protein, 115 aa, Homo sapiens [sequence omitted]

SEQ ID NO: 62130 - protein, 84 aa, Homo sapiens
MPLAKDLLHPSPEEEKRKHKKKRLVQSPNSYFMDVKCPGCYKITTVFSHAQTVVLCVGCSTVLCQPTGGKARLTEGCSFRRKQH

SEQ ID NO: 62131 - protein, 66 aa, Homo sapiens
MPLAKDLLHPSPEEEKRKHKKKRLVQSPNSYFMDVKCPGEETACCSGESTGPQQLENVVVLAVSYP

SEQ ID NO: 62132 - protein, 84 aa, Homo sapiens
MPLARDLLHPSLEEEKKKHKKKRLVQSPNSYFMDVKCPGCYKITTVFSHAQTVVLCVGCSTVLCQPTGGKARLTEGCSFRRKQH

SEQ ID NO: 62133 - protein, 52 aa, Homo sapiens
MDVKCPGCYKITTVFSHAQTVVLCVGCSTVLCQPTGGKARLTEGCSFRRKQH

SEQ ID NO: 62134 - protein, 52 aa, Homo sapiens; identical to SEQ ID NO: 62133

SEQ ID NO: 62135 - protein, 100 aa, Homo sapiens
MCQRCGLKLIVIICFFVQLARDLLHPSLEEEKKKHKKKRLVQSPNSYFMDVKCPGCYKITTVFSHAQTVVLCVGCSTVLCQPTGGKARLTEGCSFRRKQH

SEQ ID NO: 62136 - protein, 69 aa, Homo sapiens [sequence omitted]

SEQ ID NO: 62137 - protein, 121 aa, Homo sapiens
MVPFNDLYSGPDTFSEFISASHSAVPFRGPPLLLPPLRWGPVGARGIHGRHEPIHHPQCKRPRARGRRAHPFGVRARSPEVALSLAARWVLDVGFDHLADGNGLSQSAPFFCPPHVTEMLL

SEQ ID NO: 62138 - protein, 69 aa, Homo sapiens [sequence omitted]

SEQ ID NO: 62139 - protein, 56 aa, Homo sapiens [sequence omitted]

SEQ ID NO: 62140 - protein, 67 aa, Homo sapiens
MGHQQLYWSHPRKFGQGSRSCRVCSNRHGLIRKYGLNMCRQCFRQYAKDIGFIKKDLSCLPWHCLWR

SEQ ID NO: 62141 - protein, 259 aa, Homo sapiens
MAVQISKKRKFVADGIFKAELNEFLTRELAEDGYSGVEVRVTPTRTEIIILATRTQNVLGEKGRRIRELTAVVQKRFGFPEGSVELKIMVMVTGYPLLPLKLYAEKVATRGLCAIAQAESLRYKLLGGLAVRRACYGVLRFIMESGAKGCEVVVSGKLRGQRAKSMKFVDGLMIHSGDPVNYYVDTAVRHVLLRQGVLGIKVKIMLPWDPTGKIGPKKPLPDHVSIVEPKDEILPTTPISEQKGGKPEPPAMPQPVPTA

SEQ ID NO: 62142 - protein, 243 aa, Homo sapiens
MAVQISKKRKFVADGIFKAELNEFLTRELAEDGYSGVEVRVTPTRTEIIILATRTQNVLGEKGRRIRELTAVVQKRFGFPEGSVELYAEKVATRGLCAIAQAESLRYKLLGGLAVRRACYGVLRFIMESGAKGCEVVVSGKLRGQRAKSMKFVDGLMIHSGDPVNYYVDTAVRHVLLRQGVLGIKVKIMLPWDPTGKIGPKKPLPDHVSIVEPKDEILPTTPISEQKGGKPEPPAMPQPVPTA

SEQ ID NO: 62143 - protein, 243 aa, Homo sapiens; identical to SEQ ID NO: 62142

SEQ ID NO: 62144 - protein, 243 aa, Homo sapiens; identical to SEQ ID NO: 62142

SEQ ID NO: 62145 - protein, 264 aa, Homo sapiens [sequence omitted]

SEQ ID NO: 62146 - protein, 175 aa, Homo sapiens
MAVAKKKVVDPFSKKDWYDVKAPAMFNIRNIGKTLVTRTQGTKIASDGLKGRVFEVSLADLQNDEVAFRKFKLITEDVQGKNCLTNFHGMDLTRDKMCSMVKKWQTMIEAHVDVKTTDGYLLRLFCVGFTKKRNNQIRKTSYAQHQQVRQIRKKMMEIMTREVQTNDLKEVVNKL

SEQ ID NO: 62147 - protein, 227 aa, Homo sapiens
MFNIRNIGKTLVTRTQGTKIASDGLKGRVFEVSLADLQNDEVAFRKFKLITEDVQGKNCLTNFHGMDLTRDKMCSMVKKWQTMIEAHVDVKTTDGYLLRLFCVGFTKKRNNQIRKTSYAQHQQVRQIRKKMMEIMTREVQTNDLKEVVNKLIPDSIGKDIEKACQSIYPLHDVFVRKVKMLKKPKFELGKLMELHGEGSSSGKATGDETGAKVERADGYEPPVQESV

SEQ ID NO: 62148 - protein, 145 aa, Homo sapiens
MIEAHVDVKTTDGYLLRLFCVGFTKKRNNQIRKTSYAQHQQVRQIRKKMMEIMTREVQTNDLKEVVNKLIPDSIGKDIEKACQSIYPLHDVFVRKVKMLKKPKFELGKLMELHGEGSSSGKATGDETGAKVERADGYEPPVQESV

SEQ ID NO: 62149 - protein, 227 aa, Homo sapiens; identical to SEQ ID NO: 62147

SEQ ID NO: 62150 - protein, 208 aa, Homo sapiens
KRLTKGGKKGAKKKVVDPFSKKDWYDVKAPAMFNIRNIGKTLVTRTQGTKIASDGLKGRVFETMIEAHVDVKTTDGYLLRLFCVGFTKKRNNQIRKTSYAQHQQVRQIRKKMMEIMTREVQTNDLKEVVNKLIPDSIGKDIEKACQSIYPLHDVFVRKVKMLKKPKFELGKLMELHGEGSSSGKATGDETGAKVERADGYEPPVQESV

SEQ ID NO: 62151 - protein, 263 aa, Homo sapiens [sequence omitted]

SEQ ID NO: 62152 - protein, 122 aa, Homo sapiens
MARGPKKHLKRVAAPKHWMLDKLTGVFAPRPSTGPHKLRECLPLIIFLRNRLKYALTGDEVKKICMQRFIKIDGKVRTDITYPAGFMDVISIDKTGENFRLIYDTKGRFAVHRITPEEAKPC

SEQ ID NO: 62153 - protein, 263 aa, Homo sapiens
MARGPKKHLKRVAAPKHWMLDKLTGVFAPRPSTGPHKLRECLPLIVFLRNRLKYALTGDEVKKICMQRFIKIDGKVRVDVTYPAGFMDVISIEKTGEHFRLVYDTKGRFAVHRITVEEAKYKLCKVRKITVGVKGIPHLVTHDARTIRYPDPVIKVNDTVQIDLGTGKIINFIKFDTGNLCMVIGGANLGRVGVITNRERHPGSFDVVHVKDANGNSFATRLSNIFVIGNGNKPWISLPRGKGIRLTVAEERDKRLATKQSSG

SEQ ID NO: 62154 - protein, 262 aa, Homo sapiens
MLGRPAKFSKARGPKKHLKRVAAPKHWMLDKLTGVFAPRPSTGPHKLRECLPLIVFLRNRLKYALTGDEVKKICMQRFIKIDGKVRVDVTYPAGFMDVISIEKTGEHFRLVYDTKGRFAVHRITVEEAKYKLCKVRKITVGVKGIPHLVTHDARTIRYPDPVIKVNDTVQIDLGTGKIINFIKFDTGNLCMVIGGANLGRVGVITNRERHPGSFDVVHVKDANGNSFATRLSNIFVIGNGNKPWISLPRGKGIRLTVAEERD

SEQ ID NO: 62155 - protein, 263 aa, Homo sapiens
MARGPKKHLKRVAAPKHWMLDKLTGVFAPRPSTGPHKLRECLPLIVFLRNRLKYALTGDEVKKICMQHFLKIDGKVRVDITYPAGFIDVISIEKTGEHFRLVYNTKGCFAVHRITVEEAKYKLCKVRKITVGTKGIPHLVTHDARTIRYPDPLIKVNDTVQIDLGTGKITSFIKFDTGNVCMVIAGANLGRVGVITNRERHPGSCDVVHVKDANGNSFATRISNIFVIGNGNKPWISLPRGKGIRLTIAEERDKRLAAKQSSG

SEQ ID NO: 62156 - protein, 204 aa, Homo sapiens [sequence omitted]

SEQ ID NO: 62157 - protein, 204 aa, Homo sapiens [sequence omitted]

SEQ ID NO: 62158 - protein, 218 aa, Homo sapiens
MATEVAADALGEEWKGYVVRISGGNDKQGFPMKQGVLTHGRVRLLLSKGHSCYRPRRTGERKRKSVRGCIVDANLSVLNLVIVKKGEKDIPGLTDTTVPRRLGPKRASRIRKLFNLSKEDDVRQYVVRKPLNKEGKKPRTKAPKIQRLVTPRVLQHKRRRIALKKQRTKKNKEEAAEYAKLLAKRMKEAKEKRQEQIAKRRRLSSLRASTSKSESSQK

SEQ ID NO: 62159 - protein, 91 aa, Homo sapiens
MKLNISFPATGCQKLIEVDDERKLRTFYEKRMATEVAADALGEEWKVKVDKLLQVFKSETVNAIGNWYLEWGSDSGFWLLTFGKLLPNATL

SEQ ID NO: 62160 - protein, 218 aa, Homo sapiens; identical to SEQ ID NO: 62158

SEQ ID NO: 62161 - protein, 249 aa, Homo sapiens
MKLNISFPATGCQKLIEVDDERKLRTFYEKRMATEVAADALGEEWKGYVVRISGGNDKQGFPMKQGVLTHGRVRLLLSKGHSCYRPRRTGERKRKSVRGCIVDANLSVLNLVIVKKGEKDIPGLTDTTVPRRLGPKRASRIRKLFNLSKEDDVRQYVVRKPLNKEGKKPRTKAPKIQRLVTPRVLQHKRRRIALKKQRTKKNKEEAAEYAKLLAKRMKEAKEKRQEQIAKRRRLSSLRASTSKSESSQK

SEQ ID NO: 62162 - protein, 194 aa, Homo sapiens [sequence omitted]

SEQ ID NO: 62163 - protein, 194 aa, Homo sapiens [sequence omitted]

SEQ ID NO: 62164 - protein, 194 aa, Homo sapiens [sequence omitted]

SEQ ID NO: 62165 - protein, 188 aa, Homo sapiens
MGISRDNWHKRRKTGGKRKPYHKKRKYELGRPAANTKIGPRRIHTVRVRGGCTRKTRIIDVVYNASNNELVRTKTLVKNCIVLIDSTPYRQWYESHYALPLGRKKGAKLTPEEEEILNKKRSKKIQKKYDERKKNAKISSLLEEQFQQGKLLACIASRPGQCGRADGYVLEGKELEFYLRKIKARKGK

SEQ ID NO: 62166 - protein, 208 aa, Homo sapiens [sequence omitted]

SEQ ID NO: 62167 - protein, 194 aa, Homo sapiens [sequence omitted]

SEQ ID NO: 62168 - protein, 194 aa, Homo sapiens [sequence omitted]

SEQ ID NO: 62169 - protein, 194 aa, Homo sapiens [sequence omitted]

SEQ ID NO: 62170 - protein, 139 aa, Homo sapiens
MPVARSWVCRKTYVTPRRPFEKSRLDQELKLIGEYGLRNKREVWRVKFTLAKIRKAARELLTLDEKDPRRLFEGNALLRRLVRIGVLDEGKMKLDYILGLKIEDFLERRLQTQVFKLGLAKSIHHARVLIRQRHISPRR

SEQ ID NO: 62171 - protein, 139 aa, Homo sapiens; identical to SEQ ID NO: 62170

SEQ ID NO: 62172 - protein, 156 aa, Homo sapiens
MPVARSWVCRKTYVTPRRPFEKSRLDQELKLIGEYGLRNKREVWRVKFTLAKIRKAARELLTLDEKDPRRLFEGNALLRRLVRIGVLDEGKMKLDYILGLKIEDFLERRLQTQVFKLGLAKSIHHARVLIRQRHIRYHLGWAPESSSTCPSDGCPH

SEQ ID NO: 62173 - protein, 139 aa, Homo sapiens; identical to SEQ ID NO: 62170

SEQ ID NO: 62174 - protein, 317 aa, Homo sapiens
MPREDRATWKSNYFLKIIQLLDDYPKCFIVGADNVGSKQMQQIRMSLRGKAVVLMGKNTMMRKAIRGHLENNPALEKLLPHIRGNVGFVFTKEDLTEIRDMLLANKVPAAARAGAIAPCEVTVPAQNTGLGPEKTSFFQALGITTKISRGTIEILSDVQLIKTGDKVGASEATLLNMLNISPFSFGLVIQQVFDNGSIYNPEVLDITEETLHSRFLEGVRNVASVCLQIGYPTVASVPHSIINGYKRVLALSVETDYTFPLAEKVKAFLADPSAFVAAAPVAAATTAAPAAAAAPAKVEAKEESEESDEDMGFGLFD

SEQ ID NO: 62175 - protein, 255 aa, Homo sapiens
MPREDRATWKSNYFLKIIQLLDDYPKCFIVGADNVGSKQMQQIRMSLRGKAVVLMGKNTMMRKAIRGHLENNPALEKLLPHIRGNVGFVFTKEDLTEIRDMLLANKVPAAARAGAIAPCEVTVPAQNTGLGPEKTSFFQALGITTKISRGTIEILGVRNVASVCLQIGYPTVASVPHSIINGYKRVLALSVETDYTFPLAEKVKAFLADPSAFVAAAPVAAATTAAPAAAAAPAKVEAKEESEESDEDMGFGLFD

SEQ ID NO: 62176 - protein, 317 aa, Homo sapiens; identical to SEQ ID NO: 62174

SEQ ID NO: 62177 - protein, 317 aa, Homo sapiens; identical to SEQ ID NO: 62174

SEQ ID NO: 62178 - protein, 114 aa, Homo sapiens
MASVSELACIYSALILHDDEVTVTEDKINALIKAAGVNVEPFWPGLFAKALANVNIGSLICNVGAGGPAPAAGAAPAGGPAPSTAAAPAEEKKVEAKKEESEESDDDMGFGLFD

SEQ ID NO: 62179 - protein, 89 aa, Homo sapiens
MASVSELACIYSALILHDDEVTVTALANVNIGSLICNVGAGGPAPAAGAAPAGGPAPSTAAAPAEEKKVEAKKEESEESDDDMGFGLFD

SEQ ID NO: 62180 - protein, 758 aa, Homo sapiens
MAPAMQPAEIQFAQRLASSEKGIRDRAVKKLRQYISVKTQRETGGFSQEELLKIWKGLFYCMWVQDEPLLQEELANTIAQLVHAVNNSAAQHLFIQTFWQTMNREWKGIDRLRLDKYYMLIRLVLRQSFEVLKRNGWEESRIKVFLDVLMKEVLCPESQSPNGVRFHFIDIYLDELSKVGGKELLADQNLKFIDPFCKIAAKTKDHTLVQTIARGVFEAIVDQSPFVPEETMEEQKTKVGDGDLSAEEIPENEVSLRRAVSKKKTALGKNHSRKDGLSDERGRDDCGTFEDTGPLLQFDYKAVADRLLEMTSRKNTPHFNRKRLSKLIKKFQDLSEGSSISQLSFAEDISADEDDQILSQGKHKKKGNKLLEKTNLEKEKGSRVFCVEEEDSESSLQKRRRKKKKKHHLQPENPGPGGAAPSLEQNRGREPEASGLKALKARVAEPGAEATSSTGEESGSEHPPAVPMHNKRKRPRKKSPRAHREMLESAVLPPEDMSQSGPSGSHPQGPRGSPTGGAQLLKRKRKLGVVPVNGSGLSTPAWPPLQQEGPPTGPAEGANSHTTLPQRRRLQKKKAGPGSLELCGLPSQKTASLKKRKKMRVMSNLVEHNGVLESEAGQPQALGSSGTCSSLKKQKLRAESDFVKFDTPFLPKPLFFRRAKSSTATHPPGPAVQLNKTPSSSKKVTFGLNRNMTAEFKKTDKSILVSPTGPSRVAFDPEQKPLHGVLKTPTSSPASSPLVAKKPLTTTPRRRPRAMDFF

SEQ ID NO: 62181 - protein, 259 aa, Homo sapiens
MPGANYRAGAGAGAGARRPRGARDREEDGGGLEPAAVARDLLRGTSNMSFEELLELQSQVGTKTYKQLVAGNSPKKQASRPPIQNACVADKHRPLEMSAKIRVPFLRQVVPISKKVARDPRFDDLSGEYNPEVFDKTYQFLNDIRAKEKELVKKQLKKHLSGEEHEKLQQLLQRMEQQEMAQQERKQQQELHLALKQERRAQAQQGHRPYFLKKSEQRQLALAEKFKELKRSKKLENFLSRKRRRNAGKDRRHLPLSKE

SEQ ID NO: 62182 - protein, 1410 aa, Homo sapiens
MDIYDTQTLGVVVFGGFMVVSAIGIFLVSTFSMKETSYEEALANQRKEMAKTHHQKVEKKKKEKTVEKKGKTKKKEEKPNGKIPDHDPAPNVTVLLREPVRAPAVAVAPTPVQPPIIVAPVATVPAMPQEKLASSPKDKKKKEKKVAKVEPAVSSVVNSIQVLTSKAAILETAPKEVPMVVVPPVGAKGNTPATGTTQGKKAEGTQNQSKKAEGAPNQGRKAEGTPNQGKKTEGTPNQGKKAEGTPNQGKKAEGTPNQGKKAEGAQNQGKKVDTTPNQGKKVEGAPTQGRKAEGAQNQAKKVEGAQNQGKKAEGAQNQGKKGEGAQNQGKKAEGAQNQGKKAEGAQNQGKKAEGAQNQGKKAEGAQNQGKKAEGAQNQGKKSEGAQNQGKKVEGAQNQGKKAEGAQNQGKKAEGAQNQGKKAEGAQNQGKKAEGAQNQGKKAEGAQNQGKKAEGAQNQGKKAEGAQNQGKKVEGAQNQGKKAEGAQNQGKKAEGAQNQGKKAEGAQNQGQKGEGAQNQGKKTEGAQGKKAERSPNQGKKGEGAPIQGKKADSVANQGTKVEGITNQGKKAEGSPSEGKKAEGSPNQGKKADAAANQGKKTESASVQGRNTDVAQSPEAPKQEAPAKKKSGSKKKGEPGPPDADGPLYLPYKTLVSTVGSMVFNEGEAQRLIEILSEKAGIIQDTWHKATQKGDPVAILKRQLEEKEKLLATEQEDAAVAKSKLRELNKEMAAEKAKAAAGEAKVKKQLVAREQEITAVQARMQASYREHVKEVQQLQGKIRTLQEQLENGPNTQLARLQQENSILRDALNQATSQVESKQNAELAKLRQELSKVSKELVEKSEAVRQDEQQRKALEAKAAAFEKQVLQLQASHRESEEALQKRLDEVSRELCHTQSSHASLRADAEKAQEQQQQMAELHSKLQSSEAEVRSKCEELSGLHGQLQEARAENSQLTERIRSIEALLEAGQARDAQDVQASQAEADQQQTRLKELESQVSGLEKEAIELREAVEQQKVKNNDLREKNWKAMEALATAEQACKEKLLSLTQAKEESEKQLCLIEAQTMEALLALLPELSVLAQQNYTEWLQDLKEKGPTLLKHPPAPAEPSSDLASKLREAEETQSTLQAECDQYRSILAETEGMLRDLQKSVEEEEQVWRAKVGAAEEELQKSRVTVKHLEEIVEKLKGELESSDQVREHTSHLEAELEKHMAAASAECQNYAKEVAGLRQLLLESQSQLDAAKSEAQKQSDELALVRQQLSEMKSHVEDGDIAGAPASSPEAPPAEQDPVQLKTQLEWTEAILEDEQTQRQKLTAEFEEAQTSACRLQEELEKLRTAGPLESSETEEASQLKERLEKEKKLTSDLGRAATRLQELLKTTQEQLAREKDTVKKLQEQLEKAEDGSSSKEGTSV

SEQ ID NO: 62183 - protein, 977 aa, Homo sapiens
MDIYDTQTLGVVVFGGFMVVSAIGIFLVSTFSMKETSYEEALANQRKEMAKTHHQKVEKKKKEKTVEKKGKTKKKEEKPNGKIPDHDPAPNVTVLLREPVRAPAVAVAPTPVQPPIIVAPVATVPAMPQEKLASSPKDKKKKEKKVAKVEPAVSSVVNSIQVLTSKAAILETAPKEGRNTDVAQSPEAPKQEAPAKKKSGSKKKGPPDADGPLYLPYKTLVSTVGSMVFNEGEAQRLIEILSEKAGIIQDTWHKATQKGDPVAILKRQLEEKEKLLATEQEDAAVAKSKLRELNKEMAAEKAKAAAGEAKVKKQLVAREQEITAVQARMQASYREHVKEVQQLQGKIRTLQEQLENGPNTQLARLQQENSILRDALNQATSQVESKQNAELAKLRQELSKVSKELVEKSEAVRQDEQQRKALEAKAAAFEKQVLQLQASHRESEEALQKRLDEVSRELCHTQSSHASLRADAEKAQEQQQQMAELHSKLQSSEAEVRSKCEELSGLHGQLQEARAENSQLTERIRSIEALLEAGQARDAQDVQASQAEADQQQTRLKELESQVSGLEKEAIELREAVEQQKVKNNDLREKNWKAMEALATAEQACKEKLLSLTQAKEESEKQLCLIEAQTMEALLALLPELSVLAQQNYTEWLQDLKEKGPTLLKHPPAPAEPSSDLASKLREAEETQSTLQAECDQYRSILAETEGMLRDLQKSVEEEEQVWRAKVGAAEEELQKSRVTVKHLEEIVEKLKGELESSDQVREHTSHLEAELEKHMAAASAECQNYAKEVAGLRQLLLESQSQLDAAKSEAQKQSDELALVRQQLSEMKSHVEDGDIAGAPASSPEAPPAEQDPVQLKTQLEWTEAILEDEQTQRQKLTAEFEEAQTSACRLQEELEKLRTAGPLESSETEEASQLKERLEKEKKLTSDLGRAATRLQELLKTTQEQLAREKDTVKKLQEQLEKAEDGSSSKEGTSV

SEQ ID NO: 62184 - protein, 977 aa, Homo sapiens; identical to SEQ ID NO: 62183

SEQ ID NO: 62185 - protein, 1410 aa, Homo sapiens; identical to SEQ ID NO: 62182

SEQ ID NO: 62186 - protein, 300 aa, Homo sapiens
MDIYDTQTLGVVVFGGFMVVSAIGIFLVSTFSMKETSYEEALANQRKEMAKTHHQKVEKKKKEKTVEKKGKTKKKEEKPNGKIPDHDPAPNVTVLLREPVRAPAVAVAPTPVQPPIIVAPVATVPAMPQEKLASSPKDKKKKEKKVAKVEPAVSSVVNSIQVLTSKAAILETAPKEVPMVVVPPVGAKGNTPATGTTQGKKAEGTQNQSKKAEGAPNQGRKAEGTPNQGKKTEGTPNQGKKAEGTPNQGKKAEGTPNQGKKAEGAQNQGKKVDTTPNQGKKVEGAPTQGRKAEGAQNQAK

SEQ ID NO: 62187 - protein, 751 aa, Homo sapiens
MVFNEGEAQRLIEILSEKAGIIQDTWHKATQKGDPVAILKRQLEEKEKLLATEQEDAAVAKSKLRELNKEMAAEKAKAAAGEAKVKKQLVAREQEITAVQARMQASYREHVKEVQQLQGKIRTLQEQLENGPNTQLARLQQENSILRDALNQATSQVESKQNAELAKLRQELSKVSKELVEKSEAVRQDEQQRKALEAKAAAFEKQVLQLQASHRESEEALQKRLDEVSRELCHTQSSHASLRADAEKAQEQQQQMAELHSKLQSSEAEVRSKCEELSGLHGQLQEARAENSQLTERIRSIEALLEAGQARDAQDVQASQAEADQQQTRLKELESQVSGLEKEAIELREAVEQQKVKNNDLREKNWKAMEALATAEQACKEKLLSLTQAKEESEKQLCLIEAQTMEALLALLPELSVLAQQNYTEWLQDLKEKGPTLLKHPPAPAEPSSDLASKLREAEETQSTLQAECDQYRSILAETEGMLRDLQKSVEEEEQVWRAKVGAAEEELQKSRVTVKHLEEIVEKLKGELESSDQVREHTSHLEAELEKHMAAASAECQNYAKEVAGLRQLLLESQSQLDAAKSEAQKQSDELALVRQQLSEMKSHVEDGDIAGAPASSPEAPPAEQDPVQLKTQLEWTEAILEDEQTQRQKLTAEFEEAQTSACRLQEELEKLRTAGPLESSETEEASQLKERLEKEKKLTSDLGRAATRLQELLKTTQEQLAREKDTVKKLQEQLEKAEDGSSSKEGTSV

SEQ ID NO: 62188 - protein, 220 aa, Homo sapiens
MASGCKIGPSILNSDLANLGAECLRMLDSGADYLHLDVMDGYMHMMVSKPEQWVKPMAVAGANQYTFHLEATENPGALIKDIRENGMKSCSVTQAEVQWHSQGPLQVGLAIKPGTSVEYLAPWANQIDMALVMTVEPGFGGQKFMEDMMPKVHWLRTQFPSLDIEVDGGVGPDTVHKCAEAGANMIVSGSAIMRSEDPRSVINLLRNVCSEAAQKRSLDR

SEQ ID NO: 62189 - protein, 228 aa, Homo sapiens
MASGCKIGPSILNSDLANLGAECLRMLDSGADYLHLDVMDGHFVPNITFGHPVVESLRKQLGQDPFFDMHMMVSKPEQWVKPMAVAGANQYTFHLEATENPGALIKDIRENGMKVGLAIKPGTSVEYLAPWANQIDMALVMTVEPGFGGQKFMEDMMPKVHWLRTQFPSLDIEVDGGVGPDTVHKCAEAGANMIVSGSAIMRSEDPRSVINLLRNVCSEAAQKRSLDR

SEQ ID NO: 62190 - protein, 178 aa, Homo sapiens
MHMMVSKPEQWVKPMAVAGANQYTFHLEATENPGALIKDIRENGMKSCSVTQAEVQWHSQGPLQVGLAIKPGTSVEYLAPWANQIDMALVMTVEPGFGGQKFMEDMMPKVHWLRTQFPSLDIEVDGGVGPDTVHKCAEAGANMIVSGSAIMRSEDPRSVINLLRNVCSEAAQKRSLDR

SEQ ID NO: 62191 - protein, 178 aa, Homo sapiens; identical to SEQ ID NO: 62190

SEQ ID NO: 62192 - protein, 94 aa, Homo sapiens
MHMMVSKPEQWVKPMAVAGANQYTFHLEATENPGALIKDIRENGMKSCSVTQAEVQWHSQGPLQVGLAIKPGTSVEYLAPWANQIDMALVMTVE

SEQ ID NO: 62193 - protein, 178 aa, Homo sapiens; identical to SEQ ID NO: 62190

SEQ ID NO: 62194 - protein, 199 aa, Homo sapiens
MASGCKIGPSILNSDLANLGAECLRMLDSGADYLHLDVMDGHFVPNITFGHPVVESLRKQLGQDPFFDMHMMVSKPEQWVKPMAVAGANQYTFHLEATENPGALIKDIRENGMKVGLAIKPGTSVEYLAPWANQIDMALVMTVEPGFGGQKFMEDMMPKAGANMIVSGSAIMRSEDPRSVINLLRNVCSEAAQKRSLDR

SEQ ID NO: 62195 - protein, 1052 aa, Homo sapiens
MREAAERRQQLQLEHDQALAVLSAKQQEIDLLQKSKVRELEEKCRTQSEQFNLLSRDLEKFRQHAGKIDLLGGSAVAPLDISTAPSKPFPQFMNGLATSLGKGQESAIGGSSAIGEYIRPLPQPGDRPEPLSAKPTFLSRSGSARCRSESDMENERNSNTSKQRYSGKVHLCVARYSYNPFDGPNENPEAELPLTAGKYLYVYGDMDEDGFYEGELLDGQRGLVPSNFVDFVQDNESRLASTLGNEQDQNFINHSGIGLEGEHILDLHSPTHIDAGITDNSAGTLDVNIDDIGEDIVPYPRKITLIKQLAKSVIVGWEPPAVPPGWGTVSSYNVLVDKETRMNLTLGSRTKALIEKLNMAACTYRISVQCVTSRGSSDELQCTLLVGKDVVVAPSHLRVDNITQISAQLSWLPTNSNYSHVIFLNEEEFDIVKAARYKYQFFNLRPNMAYKVKVLAKPHQMPWQLPLEQREKKEAFVEFSTLPAGPPAPPQDVTVQAGVTPATIRVSWRPPVLTPTGLSNGANVTGYGVYAKGQRVAEVIFPTADSTAVELVRLRSLEAKGVTVRTLSAQGESVDSAVAAVPPELLVPPTPHPRPAPQSKPLASSGVPETKDEHLGPHARMDEAWEQSRAPGPVHGHMLEPPVGPGRRSPSPSRILPQPQGTPVSTTVAKAMAREAAQRVAESSRLEKRSVFLERSSAGQYAASDEEDAYDSPDFKRRGASVDDFLKGSELGKQPHCCHGDEYHTESSRGSDLSDIMEEDEEELYSEMQLEDGGRRRPSGTSHNALKILGNPASAGRVDHMGRRFPRGSAGPQRSRPVTVPSIDDYGRDRLSPDFYEESETDPGAEELPARIFVALFDYDPLTMSPNPDAAEEELPFKEGQIIKVYGDKDADGFYRGETCARLGLIPCNMVSEIQADDEEMMDQLLRQGFLPLNTPVEKIERSRRSGRRHSVSTRRMVALYDYDPRESSPNVDVEAELTFCTGDIITVFGEIDEDGFYYGELNGQKGLVPSNFLEEVPDDVEVYLSDAPSHYSQDTPMRSKAKRKKSVHFTP

SEQ ID NO: 62196 - protein, 645 aa, Homo sapiens
MNGLATSLGKGQESAIGGSSAIGEYIRPLPQPGDRPEPLSAKPTFLSRSGSARCRSESDMENERNSNTSKQRYSGKVHLCVARYSYNPFDGPNENPEAELPLTAGKYLYVYGDMDEDGFYEGELLDGQRGLVPSNFVDFVQDNESRLASTLGNEQDQNFINHSGIGLEGEHILDLHSPTHIDAGITDNSAGTLDVNIDDIGEDIVPYPRKITLIKQLAKSVIVGWEPPAVPPGWGTVSSYNVLVDKETRMNLTLGSRTKALIEKLNMAACTYRISVQCVTSRGSSDELQCTLLVGKDVVVAPSHLRVDNITQISAQLSWLPTNSNYSHVIFLNEEEFDIVKAARYKYQFFNLRPNMAYKVKVLAKPHQMPWQLPLEQREKKEAFVEFSTLPAGPPAPPQDVTVQAGVTPATIRVSWRPPVLTPTGLSNGANVTGYGVYAKGQRVAEVIFPTADSTAVELVRLRSLEAKGVTVRTLSAQGESVDSAVAAVPPELLVPPTPHPRPAPQSKPLASSGVPETKDEHLGPHARMDEAWEQSRAPGPVHGHMLEPPVGPGRRSPSPSRILPQPQGTPVSTTVAKAMAREAAQRVAESSRLEKRSVFLERSSAGQYAASDEEDAYDSPDFKRRGASVDDFLKGSELGKQMAS

SEQ ID NO: 62197 - protein, 645 aa, Homo sapiens
MNGLATSLGKGQESAIGGSSAIGEYIRPLPQPGDRPEPLSAKPTFLSRSGSARCRSESDMENERNSNTSKQRYSGKVHLCVARYSYNPFDGPNENPEAELPLTAGKYLYVYGDMDEDGFYEGELLDGQRGLVPSNFVDFVQDNESRLASTLGNEQDQNFINHSGIGLEGEHILDLHSPTHIDAGITDNSAGTLDVNIDDIGEDIVPYPRKITLIKQLAKSVIVGWEPPAVPPGWGTVSSYNVLVDKETRMNLTLGSRTKALIEKLNMAACTYRISVQCVTSRGSSDELQCTLLVGKDVVVAPSHLRVDNITQISAQLSWLPTNSNYSHVIFLNEEEFDIVKAARYKYQFFNLRPNMAYKVKVLAKPHQMPWQLPLEQREKKEAFVEFSTLPAGPPAPPQDVTVQAGVTPATIRVSWRPPVLTPTGLSNGANVTGYGVYAKGQRVAEVIFPTADSTAVELVRLRSLEAKGVTVRTLSAQGESVDSAVAAVPPELLVPPTPHPRPAPQSKPLASSGVPETKDEHLGPHARMDEAWEQSRAPGPVHGHMLEPPVGPGRRSPSPSRILPQPQGTPVSTTVAKAMAREAAQRVAESSRLEKRSVFLERSSAGQYAASDEEDAYDSPDFKRRGASVDDFLKGSELGKQMVS

SEQ ID NO: 62198 - protein, 1545 aa, Homo sapiens
MQREREAEIRQLLRWKEAEQRQLQQLLHRERDGVVRQARELQRQLAEELVNRGHCSRPGASEVSAAQCRCRLQEVLAQLRWQTDGEQAARIRYLQAALEVERQLFLKYILAHFRGHPALSGSPDPQAVHSLEEPLPQTSSGSCHAPKPACQLGSLDSLSAEVGVRSRSLGLVSSACSSSPDGLLSTHASSLDCFAPACSRSLDSTRSLPKASKSEERPSSPDTSTPGSRRLSPPPSPLPPPPPPSAHRKLSNPRGGEGSESQPCEVLTPSPPGLGHHELIKLNWLLAKALWVLARRCYTLQAENKQLRRAGCPYQADEKVKRLKVKRAELTGLARRLADRARKLQETNLRAVSAPIPGESCAGLELCQVFARQRARDLSEQASAPLAKDKQIEELRQECHLLQARVASGPCSDLHTGRGGPCTQWLNVRDLDRLQRESQREVLRLQRQLMLQQGNGGAWPEAGGQSATCEEVRRQMLALERELDQRRRECQELGAQAAPARRRGEEAETQLQAALLKNAWLAEENGRLQAKTDWVRKVEAENSEVRGHLGRACQERDASGLIAEQLLQQAARGQDRQQQLQRDPQKALCDLHPSWKEIQALQCRPGHPPEQPWETSQMPESQVKGSRRPKFHARPEDYAVSQPNRDIQEKREASLEESPVALGESASVPQVSETVPASQPLSKKTSSQSNSSSEGSMWATVPSSPTLDRDTASEVDDLEPDSVSLALEMGGSAAPAAPKLKIFMAQYNYNPFEGPNDHPEGELPLTAGDYIYIFGDMDEDGFYEGELEDGRRGLVPSNFVEQIPDSYIPGCLPAKSPDLGPSQLPAGQDEALEEDSLLSGKAQGVVDRGLCQMVRVGSKTEVATEILDTKTEACQLGLLQSMGKQGLSRPLLGTKGVLRMAPMQLHLQNVTATSANITWVYSSHRHPHVVYLDDREHALTPAGVSCYTFQGLCPGTHYRARVEVRLPRDLLQVYWGTMSSTVTFDTLLAGPPYPPLDVLVERHASPGVLVVSWLPVTIDSAGSSNGVQVTGYAVYADGLKVCEVADATAGSTLLEFSQLQVPLTWQKVSVRTMSLCGESLDSVPAQIPEDFFMCHRWPETPPFSYTCGDPSTYRVTFPVCPQKLSLAPPSAKASPHNPGSCGEPQAKFLEAFFEEPPRRQSPVSNLGSEGECPSSGAGSQAQELAEAWEGCRKDLLFQKSPQNHRPPSVSDQPGEKENCSQHMGTSKSPAPGFIHLRTECGPRKEPCQEKAALERVLRQKQDAQGFTPPQLGASQQYASDFHNVLKEEQEALCLDLWGTERREERREPEPHSRQGQALGVKRGCQLHEPSSALCPAPSAKVIKMPRGGPQQLGTGANTPARVFVALSDYNPLVMSANLKAAEEELVFQKRQLLRVWGSQDTHDFYLSECNRQVGNIPGRLVAEMEVGTEQTDRRWRSPAQGNLPSVAHLEDFQGLTIPQGSSLVLQGNSKRLPLWTPKIMIAALDYDPGDGQMGGQGKGRLALRAGDVVMVYGPMDDQGFYYGELGGHRGLVPAHLLDHMSLHGH

SEQ ID NO: 62199 - protein, 1639 aa, Homo sapiens
MAKDSPSPLGASPKKPGCSSPAAAVLENQRRELEKLRAELEAERAGWRAERRRFAARERQLREEAERERRQLADRLRSKWEAQRSRELRQLQEEMQREREAEIRQLLRWKEAEQRQLQQLLHRERDGVVRQARELQRQLAEELVNRGHCSRPGASEVSAAQCRCRLQEVLAQLRWQTDGEQAARIRYLQAALEVERQLFLKYILAHFRGHPALSGSPDPQAVHSLEEPLPQTSSGSCHAPKPACQLGSLDSLSAEVGVRSRSLGLVSSACSSSPDGLLSTHASSLDCFAPACSRSLDSTRSLPKASKSEERPSSPDTSTPGSRRLSPPPSPLPPPPPPSAHRKLSNPRGGEGSESQPCEVLTPSPPGLGHHELIKLNWLLAKALWVLARRCYTLQAENKQLRRAGCPYQADEKVKRLKVKRAELTGLARRLADRARKLQETNLRAVSAPIPGESCAGLELCQVFARQRARDLSEQASAPLAKDKQIEELRQECHLLQARVASGPCSDLHTGRGGPCTQWLNVRDLDRLQRESQREVLRLQRQLMLQQGNGGAWPEAGGQSATCEEVRRQMLALERELDQRRRECQELGAQAAPARRRGEEAETQLQAALLKNAWLAEENGRLQAKTDWVRKVEAENSEVRGHLGRACQERDASGLIAEQLLQQAARGQDRQQQLQRDPQKALCDLHPSWKEIQALQCRPGHPPEQPWETSQMPESQVKGSRRPKFHARPEDYAVSQPNRDIQEKREASLEESPVALGESASVPQVSETVPASQPLSKKTSSQSNSSSEGSMWATVPSSPTLDRDTASEVDDLEPDSVSLALEMGGSAAPAAPKLKIFMAQYNYNPFEGPNDHPEGELPLTAGDYIYIFGDMDEDGFYEGELEDGRRGLVPSNFVEQIPDSYIPGCLPAKSPDLGPSQLPAGQDEALEEDSLLSGKAQGVVDRGLCQMVRVGSKTEVATEILDTKTEACQLGLLQSMGKQGLSRPLLGTKGVLRMAPMQLHLQNVTATSANITWVYSSHRHPHVVYLDDREHALTPAGVSCYTFQGLCPGTHYRARVEVRLPRDLLQVYWGTMSSTVTFDTLLAGPPYPPLDVLVERHASPGVLVVSWLPVTIDSAGSSNGVQVTGYAVYADGLKVCEVADATAGSTLLEFSQLQVPLTWQKVSVRTMSLCGESLDSVPAQIPEDFFMCHRWPETPPFSYTCGDPSTYRVTFPVCPQKLSLAPPSAKASPHNPGSCGEPQAKFLEAFFEEPPRRQSPVSNLGSEGECPSSGAGSQAQELAEAWEGCRKDLLFQKSPQNHRPPSVSDQPGEKENCSQHMGTSKSPAPGFIHLRTECGPRKEPCQEKAALERVLRQKQDAQGFTPPQLGASQQYASDFHNVLKEEQEALCLDLWGTERREERREPEPHSRQGQALGVKRGCQLHEPSSALCPAPSAKVIKMPRGGPQQLGTGANTPARVFVALSDYNPLVMSANLKAAEEELVFQKRQLLRVWGSQDTHDFYLSECNRQVGNIPGRLVAEMEVGTEQTDRRWRSPAQGNLPSVAHLEDFQGLTIPQGSSLVLQGNSKRLPLWTPKIMIAALDYDPGDGQMGGQGKGRLALRAGDVVMVYGPMDDQGFYYGELGGHRGLVPAHLLDHMSLHGH

SEQ ID NO: 62200 - protein, 1545 aa, Homo sapiens
MQREREAEIRQLLRWKEAEQRQLQQLLHRERDGVVRQARELQRQLAEELVNRGHCSRPGASEVSAAQCRCRLQEVLAQLRWQTDGEQAARIRYLQAALEVERQLFLKYILAHFRGHPALSGSPDPQAVHSLEEPLPQTSSGSCHAPKPACQLGSLDSLSAEVGVRSRSLGLVSSACSSSPDGLLSTHASSLDCFAPACSRSLDSTRSLPKASKSEERPSSPDTSTPGSRRLSPPPSPLPPPPPPSAHRKLSNPRGGEGSESQPCEVLTPSPPGLGHHELIKLNWLLAKALWVLARRCYTLQEENKQLRRAGCPYQADEKVKRLKVKRAELTGLARRLADRARELQETNLRAVSAPIPGESCAGLELCQVFARQRARDLSEQASAPLAKDKQIEELRQECHLLQARVASGPCSDLHTGRGGPCTQWLNVRDLDRLQRESQREVLRLQRQLMLQQGNGGAWPEAGGQSATCEEVRRQMLALERELDQRRRECQELGTQAAPARRRGEEAETQLQAALLKNAWLAEENGRLQAKTDWVRKVEAENSEVRGHLGRACQERDASGLIAEQLLQQAARGQDRQQQLQRDPQKALCDLHPSWKEIQALQCRPGHPPEQPWETSQMPESQVKGSRRPKFHARPEDYAVSQPNRDIQEKREASLEESPVALGESASVPQVSETVPASQPLSKKTSSQSNSSSEGSMWATVPSSPTLDRDTASEVDDLEPDSVSLALEMGGSAAPAAPKLKIFMAQYNYNPFEGPNDHPEGELPLTAGDYIYIFGDMDEDGFYEGELDDGRRGLVPSNFVEQIPDSYIPGCLPAKSPDLGPSQLPAGQDEALEEDSLLSGKAQGMVDRGLCQMVRVGSKTEVATEILDTKTEACQLGLLQSMGKQGLSRPLLGTKGVLRMAPMQLHLQNVTATSANITWVYSSHRHPHVVYLDDREHALTPAGVSCYTFQGLCPGTHYRVRVEVRLPWDLLQVYWGTMSSTVTFDTLLAGPPYPPLEVLVERHASPGVLVVSWLPVTIDSAGSSNGVQVTGYAVYADGLKVCEVADATAGSTVLEFSQLQVPLTWQKVSVRTMSLCGESLDSVPAQIPEDFFMCHRWPETPPFSYTCGDPSTYRVTFPVCPQKLSLAPPSAKASPHNPGSCGEPQAKFLEAFFEEPPRRQSPVSNLGSEGECPSSGAGSQAQELAEAWEGCRKDLLFQKSPQNHRPPSVSDQPGEKENCYQHMGTSKSPAPGFIHLRTECGPRKEPCQEKAALERVLRQKQDAQGFTPPQLGASQQYASDFHNVLKEEQEALCLDLRGTERREERREPEPHSRQGQALGVKRGCQLHEPSSALCPAPSAKVIKMPRGGPQQLGTGANTPARVFVALSDYNPLVMSANLKAAEEELVFQKRQLLRVWGSQDTHDFYLSECNRQVGNIPGRLVAEMEVGTEQTDRRWRSPAQGHLPSVAHLEDFQGLTIPQGSSLVLQGNSKRLPLWTPKIMIAALDYDPGDGQMGGQGKGRLALRAGDVVMVYGPMDDQGFYYGELGGHRGLVPAHLLDHMSLHGH

SEQ ID NO: 62201 - protein, 1639 aa, Homo sapiens
MAKDSPSPLGASPKKPGCSSPAAAVLENQRRELEKLRAELEAERAGWRAERRRFAARERQLREEAERERRQLADRLRSKWEAQRSRELRQLQEEMQREREAEIRQLLRWKEAEQRQLQQLLHRERDGVVRQARELQRQLAEELVNRGHCSRPGASEVSAAQCRCRLQEVLAQLRWQTDGEQAARIRYLQAALEVERQLFLKYILAHFRGHPALSGSPDPQAVHSLEEPLPQTSSGSCHAPKPACQLGSLDSLSAEVGVRSRSLGLVSSACSSSPDGLLSTHASSLDCFAPACSRSLDSTRSLPKASKSEERPSSPDTSTPGSRRLSPPPSPLPPPPPPSAHRKLSNPRGGEGSESQPCEVLTPSPPGLGHHELIKLNWLLAKALWVLARRCYTLQEENKQLRRAGCPYQADEKVKRLKVKRAELTGLARRLADRARELQETNLRAVSAPIPGESCAGLELCQVFARQRARDLSEQASAPLAKDKQIEELRQECHLLQARVASGPCSDLHTGRGGPCTQWLNVRDLDRLQRESQREVLRLQRQLMLQQGNGGAWPEAGGQSATCEEVRRQMLALERELDQRRRECQELGTQAAPARRRGEEAETQLQAALLKNAWLAEENGRLQAKTDWVRKVEAENSEVRGHLGRACQERDASGLIAEQLLQQAARGQDRQQQLQRDPQKALCDLHPSWKEIQALQCRPGHPPEQPWETSQMPESQVKGSRRPKFHARPEDYAVSQPNRDIQEKREASLEESPVALGESASVPQVSETVPASQPLSKKTSSQSNSSSEGSMWATVPSSPTLDRDTASEVDDLEPDSVSLALEMGGSAAPAAPKLKIFMAQYNYNPFEGPNDHPEGELPLTAGDYIYIFGDMDEDGFYEGELDDGRRGLVPSNFVEQIPDSYIPGCLPAKSPDLGPSQLPAGQDEALEEDSLLSGKAQGMVDRGLCQMVRVGSKTEVATEILDTKTEACQLGLLQSMGKQGLSRPLLGTKGVLRMAPMQLHLQNVTATSANITWVYSSHRHPHVVYLDDREHALTPAGVSCYTFQGLCPGTHYRVRVEVRLPWDLLQVYWGTMSSTVTFDTLLAGPPYPPLEVLVERHASPGVLVVSWLPVTIDSAGSSNGVQVTGYAVYADGLKVCEVADATAGSTVLEFSQLQVPLTWQKVSVRTMSLCGESLDSVPAQIPEDFFMCHRWPETPPFSYTCGDPSTYRVTFPVCPQKLSLAPPSAKASPHNPGSCGEPQAKFLEAFFEEPPRRQSPVSNLGSEGECPSSGAGSQAQELAEAWEGCRKDLLFQKSPQNHRPPSVSDQPGEKENCYQHMGTSKSPAPGFIHLRTECGPRKEPCQEKAALERVLRQKQDAQGFTPPQLGASQQYASDFHNVLKEEQEALCLDLRGTERREERREPEPHSRQGQALGVKRGCQLHEPSSALCPAPSAKVIKMPRGGPQQLGTGANTPARVFVALSDYNPLVMSANLKAAEEELVFQKRQLLRVWGSQDTHDFYLSECNRQVGNIPGRLVAEMEVGTEQTDRRWRSPAQGHLPSVAHLEDFQGLTIPQGSSLVLQGNSKRLPLWTPKIMIAALDYDPGDGQMGGQGKGRLALRAGDVVMVYGPMDDQGFYYGELGGHRGLVPAHLLDHMSLHGH

SEQ ID NO: 62202 - protein, 1545 aa, Homo sapiens
MQREREAEIRQLLRWKEAEQRQLQQLLHRERDGVVRQARELQRQLAEELVNRGHCSRPGASEVSAAQCRCRLQEVLAQLRWQTDGEQAARIRYLQAALEVERQLFLKYILAHFRGHPALSGSPDPQAVHSLEEPLPQTSSGSCHAPKPACQLGSLDSLSAEVGVRSRSLGLVSSACSSSPDGLLSTHASSLDCFAPACSRSLDSTRSLPKASKSEERPSSPDTSTPGSRRLSPPPSPLPPPPPPSAHRKLSNPRGGEGSESQPCEVLTPSPPGLGHHELIKLNWLLAKALWVLARRCYTLQEENKQLRRAGCPYQADEKVKRLKVKRAELTGLARRLADRARELQETNLRAVSAPIPGESCAGLELCQVFARQRARDLSEQASAPLAKDKQIEELRQECHLLQARVASGPCSDLHTGRGGPCTQWLNVRDLDRLQRESQREVLRLQRQLMLQQGNGGAWPEAGGQSATCEEVRRQMLALERELDQRRRECQELGTQAAPARRRGEEAETQLQAALLKNAWLAEENGRLQAKTDWVRKVEAENSEVRGHLGRACQERDASGLIAEQLLQQAARGQDRQQQLQRDPQKALCDLHPSWKEIQALQCRPGHPPEQPWETSQMPESQVKGSRRPKFHARPEDYAVSQPNRDIQEKREASLEESPVALGESASVPQVSETVPASQPLSKKTSSQSNSSSEGSMWATVPSSPTLDRDTASEVDDLEPDSVSLALEMGGSAAPAAPKLKIFMAQYNYNPFEGPNDHPEGELPLTAGDYIYIFGDMDEDGFYEGELDDGRRGLVPSNFVEQIPDSYIPGCLPAKSPDLGPSQLPAGQDEALEEDSLLSGKAQGMVDRGLCQMVRVGSKTEVATEILDTKTEACQLGLLQSMGKQGLSRPLLGTKGVLRMAPMQLHLQNVTATSANITWVYSSHRHPHVVYLDDREHALTPAGVSCYTFQGLCPGTHYRVRVEVRLPWDLLQVYWGTMSSTVTFDTLLAGPPYPPLDVLVERHASPGVLVVSWLPVTIDSAGSSNGVQVTGYAVYADGLKVCEVADATAGSTVLEFSQLQVPLTWQKVSVRTMSLCGESLDSVPAQIPEDFFMCHRWPETPPFSYTCGDPSTYRVTFPVCPQKLSLAPPSAKASPHNPGSCGEPQAKFLEAFFEEPPRRQSPVSNLGSEGECPSSGAGSQAQELAEAWEGCRKDLLFQKSPQNHRPPSVSDQPGEKENCYQHMGTSKSPAPGFIHLRTECGPRKEPCQEKAALERVLRQKQDAQGFTPPQLGASQQYASDFHNVLKEEQEALCLDLRGTERREERREPEPHSRQGQALGVKRGCQLHEPSSALCPAPSAKVIKMPRGGPQQLGTGANTPARVFVALSDYNPLVMSANLKAAEEELVFQKRQLLRVWGSQDTHDFYLSECNRQVGNIPGRLVAEMEVGTEQTDRRWRSPAQGHLPSVAHLEDFQGLIIPQGSSLVLQGNSKRLPLWTPKIMIAALDYDPGDGQMGGQGKGRLALRAGDVVMVYGPMDDQGFYYGELGGHRGLVPAHLLDHMSLHGH

SEQ ID NO: 62203 - protein, 1639 aa, Homo sapiens
MAKDSPSPLGASPKKPGCSSPAAAVLENQRRELEKLRAELEAERAGWRAERRRFAARERQLREEAERERRQLADRLRSKWEAQRSRELRQLQEEMQREREAEIRQLLRWKEAEQRQLQQLLHRERDGVVRQARELQRQLAEELVNRGHCSRPGASEVSAAQCRCRLQEVLAQLRWQTDGEQAARIRYLQAALEVERQLFLKYILAHFRGHPALSGSPDPQAVHSLEEPLPQTSSGSCHAPKPACQLGSLDSLSAEVGVRSRSLGLVSSACSSSPDGLLSTHASSLDCFAPACSRSLDSTRSLPKASKSEERPSSPDTSTPGSRRLSPPPSPLPPPPPPSAHRKLSNPRGGEGSESQPCEVLTPSPPGLGHHELIKLNWLLAKALWVLARRCYTLQEENKQLRRAGCPYQADEKVKRLKVKRAELTGLARRLADRARELQETNLRAVSAPIPGESCAGLELCQVFARQRARDLSEQASAPLAKDKQIEELRQECHLLQARVASGPCSDLHTGRGGPCTQWLNVRDLDRLQRESQREVLRLQRQLMLQQGNGGAWPEAGGQSATCEEVRRQMLALERELDQRRRECQELGTQAAPARRRGEEAETQLQAALLKNAWLAEENGRLQAKTDWVRKVEAENSEVRGHLGRACQERDASGLIAEQLLQQAARGQDRQQQLQRDPQKALCDLHPSWKEIQALQCRPGHPPEQPWETSQMPESQVKGSRRPKFHARPEDYAVSQPNRDIQEKREASLEESPVALGESASVPQVSETVPASQPLSKKTSSQSNSSSEGSMWATVPSSPTLDRDTASEVDDLEPDSVSLALEMGGSAAPAAPKLKIFMAQYNYNPFEGPNDHPEGELPLTAGDYIYIFGDMDEDGFYEGELDDGRRGLVPSNFVEQIPDSYIPGCLPAKSPDLGPSQLPAGQDEALEEDSLLSGKAQGMVDRGLCQMVRVGSKTEVATEILDTKTEACQLGLLQSMGKQGLSRPLLGTKGVLRMAPMQLHLQNVTATSANITWVYSSHRHPHVVYLDDREHALTPAGVSCYTFQGLCPGTHYRVRVEVRLPWDLLQVYWGTMSSTVTFDTLLAGPPYPPLDVLVERHASPGVLVVSWLPVTIDSAGSSNGVQVTGYAVYADGLKVCEVADATAGSTVLEFSQLQVPLTWQKVSVRTMSLCGESLDSVPAQIPEDFFMCHRWPETPPFSYTCGDPSTYRVTFPVCPQKLSLAPPSAKASPHNPGSCGEPQAKFLEAFFEEPPRRQSPVSNLGSEGECPSSGAGSQAQELAEAWEGCRKDLLFQKSPQNHRPPSVSDQPGEKENCYQHMGTSKSPAPGFIHLRTECGPRKEPCQEKAALERVLRQKQDAQGFTPPQLGASQQYASDFHNVLKEEQEALCLDLRGTERREERREPEPHSRQGQALGVKRGCQLHEPSSALCPAPSAKVIKMPRGGPQQLGTGANTPARVFVALSDYNPLVMSANLKAAEEELVFQKRQLLRVWGSQDTHDFYLSECNRQVGNIPGRLVAEMEVGTEQTDRRWRSPAQGHLPSVAHLEDFQGLIIPQGSSLVLQGNSKRLPLWTPKIMIAALDYDPGDGQMGGQGKGRLALRAGDVVMVYGPMDDQGFYYGELGGHRGLVPAHLLDHMSLHGH

SEQ ID NO: 62204 - protein, 1133 aa, Homo sapiens
MPVQAPQWTDFLSCPICTQTFDETIRKPISLGCGHTVCKMCLNKLHRKACPFDQTTINTDIELLPVNSALLQLVGAQVPEQQPITLCSGVEDTKHYEEAKKCVEELALYLKPLSSARGVGLNSTTQSVLSRPMQRKLVTLVHCQLVEEEGRIRAMRAARSLGERTVTELILQHQNPQQLSSNLWAAVRARGCQFLGPAMQEEALKLVLLALEDGSALSRKVLVLFVVQRLEPRFPQASKTSIGHVVQLLYRASCFKVTKRDEDSSLMQLKEEFRTYEALRREHDSQIVQIAMEAGLRIAPDQWSSLLYGDQSHKSHMQSIIDKLQTPASFAQSVQELTIALQRTGDPANLNRLRPHLELLANIDPSPDAPPPTWEQLENGLVAVRTVVHGLVDYIQNHSKKGADQQQPPQHSKYKTYMCRDMKQRGGCPRGASCTFAHSQEELEKFRKMNKRLVPRRPLSASLGQLNEVGLPSAAILPDEGAVDLPSRKPPALPNGIVSTGNTVTQLIPRGTDPSYDSSLKPGKIDHLSSSAPGSPPDLLESVPKSISALPVNPHSIPPRGPADLPPMPVTKPLQMVPRGSQLYPAQQTDVYYQDPRGAAPPFEPAPYQQGMYYTPPPQCVSRFVRPPPSAPEPAPPYLDHYPPYLQERVVNSQYGTQPQQYPPIYPSHYDGRRVYPAPSYTREEIFRESPIPIEIPPAAVPSYVPESRERYQQIESYYPVAPHPTQIRPSYLREPPYSRLPPPPQPHPSLDELHRRRKEIMAQLEERKVISPPPFAPSPTLPPTFHPEEFLDEDLKVAGKYKGNDYSQYSPWSCDTIGSYIGTKDAKPKDVVAAGSVEMMNVESKGMRDQRLDLQRRAAETSDDDLIPFGDRPTVSRFGAISRTSKTIYQGAGPMQAMAPQGAPTKSINISDYSPYGTHGGWGASPYSPHQNIPSQGHFSERERISMSEVASHGKPLPSAEREQLRLELQQLNHQISQQTQLRGLEAVSNRLVLQREANTLAGQSQPPPPPPPKWPGMISSEQLSLELHQVEREIGKRTRELSMENQCSLDMKSKLNTSKQAENGQPEPQNKVPAEDLTLTFSDVPNGSALTQENISLLSNKTSSLNLSEDPEGGGDNNDSQRSGVTPSSAP

SEQ ID NO: 62205 - protein, 1125 aa, Homo sapiens
MPVQAPQWTDFLSCPICTQTFDETIRKPISLGCGHTVCKMCLNKLHRKACPFDQTTINTDIELLPVNSALLQLVGAQVPEQQPITLCSGVEDTKHYEEAKKCVEELALYLKPLSSARGVGLNSTTQSVLSRPMQRKLVTLVHCQLVEEEGRIRAMRAARSLGERTVTELILQHQNPQQLSSNLWAAVRARGCQFLGPAMQEEALKLVLLALEDGSALSRKVLVLFVVQRLEPRFPQASKTSIGHVVQLLYRASCFKVTKRDEDSSLMQLKEEFRTYEALRREHDSQIVQIAMEAGLRIAPDQWSSLLYGDQSHKSHMQSIIDKLQTPASFAQSVQELTIALQRTGDPANLNRLRPHLELLANIDPSPDAPPPTWEQLENGLVAVRTVVHGLVDYIQNHSKKGADQQQPPQHSKYKTYMCRDMKQRGGCPRGASCTFAHSQEELEKFRKMNKRLVPRRPLSASLGQLNEVGLPSAAILPDEGAVDLPSRKPPALPNGIVSTGNTVTQLIPRGTDPSYDSSLKPGKIDHLSSSAPGSPPDLLESVPKSISALPVNPHSIPPRGPADLPPMPVTKPLQMVPRGSQLYPAQQTDVYYQDPRGAAPPFEPAPYQQGMYYTPPPQCVSRFVRPPPSAPEPAPPYLDHYPPYLQERVVNSQYGTQPQQYPPIYPSHYDGRRVYPAPSYTREEIFRESPIPIEIPPAAVPSYVPESRERYQQIESYYPVAPHPTQIRPSYLREPPYSRLPPPPQPHPSLDELHRRRKEIMAQLEERKVISPPPFAPSPTLPPTFHPEEFLDEDLKVAGKYKGNDYSQYSPWSCDTIGSYIGTKDAKPKDVVAAGSVEMMNVESKGMRDQRLDLQRRAAETSDDDLIPFGDRPTVSRFGAISRTSKTIYQGAGPMQAMAPQGAPTKSINISDYSPYGTHGGWGASPYSPHQNIPSQGHFSERERISMSEVASHGKPLPSAEREQLRLELQQLNHQISQQTQLRGLEREANTLAGQSQPPPPPPPKWPGMISSEQLSLELHQVEREIGKRTRELSMENQCSLDMKSKLNTSKQAENGQPEPQNKVPAEDLTLTFSSDVPNGSALTQENISLLSNKTSSLNLSEDPEGGGDNNDSQRSGVTPSSAP

SEQ ID NO: 62206 - protein, 1133 aa, Homo sapiens; identical to SEQ ID NO: 62204

SEQ ID NO: 62207 - protein, 327 aa, Homo sapiens
MWATCCNWFCLDGQPEEVPPPQGARMQAYSNPGYSSFPSPTGLEPSCKSCGAHFANTARKQTCLDCKKNFCMTCSSQVGNGPRLCLLCQRFRATAFQREELMKMKVKDLRDYLSLHDISTEMCREKEELVLLVLGQQPVISQEDRTRASTLSPDFPEQQAFLTQPHSSMVPPTSPNLPSSSAQATSVPPAQVQENQQSIDSEDSFVPGRRASLSDLTDLEDIEGLTVRQLKEILARNFVNYKGCCEKWELMERVTRLYKDQKGLQHLGGAVPSGLEENLCKICMDSPIDCVLLECGHMVTCTKCGKRMNECPICRQYVIRAVHVFRS

SEQ ID NO: 62208 - protein, 363 aa, Homo sapiens
MWATCCNWFCLDGQPEEVPPPQGARMQAYSNPGYSSFPSPTGLEPSCKSCGAHFANTARKQTCLDCKKNFCMTCSSQVGNGPRLCLLCQRFRATAFQREELMKMKVKDLRDYLSLHDISTEMCREKEELVLLVLGQQPVISQEDRTRASTLSPDFPEQQAFLTQPHSSMVPPTSPNLPSSSAQATSVPPAQVQENQQANGHVSQDQEEPVYLESVARVPAEDETQSIDSEDSFVPGRRASLSDLTDLEDIEGLTVRQLKEILARNFVNYKGCCEKWELMERVTRLYKDQKGLQHLVSGAEDQNGGAVPSGLEENLCKICMDSPIDCVLLECGHMVTCTKCGKRMNECPICRQYVIRAVHVFRS

SEQ ID NO: 62209 - protein, 355 aa, Homo sapiens
MWATCCNWFCLDGQPEEVPPPQGARMQAYSNPGYSSFPSPTGLEPSCKSCGAHFANTARKQTCLDCKKNFCMTCSSQVGNGPRLCLLCQRFRATAFQREELMKMKVKDLRDYLSLHDISTEMCREKEELVLLVLGQQPVISQEDRTRASTLSPDFPEQQAFLTQPHSSMVPPTSPNLPSSSAQATSVPPAQVQENQQANGHVSQDQEEPVYLESVARVPAEDETQSIDSEDSFVPGRRASLSDLTDLEDIEGLTVRQLKEILARNFVNYKGCCEKWELMERVTRLYKDQKGLQHLGGAVPSGLEENLCKICMDSPIDCVLLECGHMVTCTKCGKRMNECPICRQYVIRAVHVFRS

SEQ ID NO: 62210 - protein, 363 aa, Homo sapiens; identical to SEQ ID NO: 62208

SEQ ID NO: 62211 - protein, 271 aa, Homo sapiens
MWATCCNWFCLDGQPEEVPPPQGARMQAYSNPGYSSFPSPTGLEPSCKSCGAHFANTARKQTCLDCKKNFCMTCSSQVGNGPRLCLLCQRFRATAFQREELMKMKVKDLRDYLSLHDISTEMCREKEELVLLVLGQQPVISQEDRTRASTLSPDFPEQQAFLTQPHSSMVPPTSPNLPSSSAQATSVPPAQVQENQQANGHVSQDQEEPVYLESVARVPAEDETQSIDSEDSFVPGRRASLSDLTDLEDIEGLTVRQLKEILARNFVNYKG

SEQ ID NO: 62212 - protein, 133 aa, Homo sapiens
MWATCCNWFCLDGQPEEVPPPQGARMQAYSNPGYSSFPSPTGLEPSCKSCGAHFANTARKQTCLDCKKNFCMTCSSQVGNGPRLCLLCQRFRATAFQREELMKMKVKDLRDYLSLHDISTEMCREKEELVLLV

SEQ ID NO: 62213 - protein, 189 aa, Homo sapiens
MWATCCNWFCLDGQPEEVPPPQGARMQAYSNPGYSSFPSPTGLEPSCKSCGAHFANTARKQTCLDCKKNFCMTCSSQVGNGPRLCLLCQRFRATAFQREELMKMKVKDLRDYLSLHDISTEMCREKEELVLLVLGQQPVISQEDRTRASTLSPDFPEQQAFLTQPHSSMVPPTSPNLPSSSAQATSVPP

SEQ ID NO: 62214 - protein, 45 aa, Homo sapiens
MWATCCNWFCLDGQPEEVPPPQGARMQAYSNPGYSSFPSPTGLEP

SEQ ID NO: 62215 - protein, 707 aa, Homo sapiens
MSGSRQAGSGSAGTSPGSSAASSVTSASSSLSSSPSPPSVAVSAAALVSGGVAQAAGSGGLGGPVRPVLVAPAVSGSGGGAVSTGLSRHSCAARPSAGVGGSSSSLGSGSRKRPLLAPLCNGLINSYEDKSNDFVCPICFDMIEEAYMTKCGHSFCYKCIHQSLEDNNRCPKCNYVVDNIDHLYPNFLVNELILKQKQRFEEKRFKLDHSNGHRWQIFQDWLGTDQDNLDLANVNLMLELLVQKKKQLEAESHAAQLQILMEFLKVARRNKREEMSGLYSPVSEDSTVPQFEAPSPSHSSIIDSTEYSQPPGFSGSSQTKKQPWYNSTLASRRKRLTAHFEDLEQCYFSTRMSRISDDSRTASQLDEFQECLSKFTRYNSVRPLATLSYASDLYNGSSIVSSIEFDRDCDYFAIAGVTKKIKVYEYDTVIQDAVDIHYPENEMTCNSKISCISWSSYHKNLLASSDYEGTVILWDGFTGQRSKVYQEHEKRCWSVDFNLMDPKLLASGSDDAKVKLWSTNLDNSVASIEAKANVCCVKFSPSSRYHLAFGCADHCVHYYDLRNTKQPIMVFKGHRKAVSYAKFVSGEEIVSASTDSQLKLWNVGKPYCLRSFKGHINEKNFVGLASNGDYIACGSENNSLYLYYKGLSKTLLTFKFDTVKSVLDKDRKEDDTNEFVSAVCWRALPDGESNVLIAANSQGTIKVLELV

SEQ ID NO: 62216 - protein, 506 aa, Homo sapiens
MEFLKVARRNKREQLEQIQKELSVLEEDIKRVEEMSGLYSPVSEDSTVPQFEAPSPSHSSIIDSTEYSQPPGFSGSSQAGVQWRYLGSLQPPPPRYKRFSCLTLPSSWDYRRLPPHLTKKQPWYNSTLASRRKRLTAHFEDLEQCYFSTRMSRISDDSRTASQLDEFQECLSKFTRYNSVRPLATLSYASDLYNGSSIVSSIEFDRDCDYFAIAGVTKKIKVYEYDTVIQDAVDIHYPENEMTCNSKISCISWSSYHKNLLASSDYEGTVILWDGFTGQRSKVYQEHEKRCWSVDFNLMDPKLLASGSDDAKVKLWSTNLDNSVASIEAKANVCCVKFSPSSRYHLAFGCADHCVHYYDLRNTKQPIMVFKGHRKAVSYAKFVSGEEIVSASTDSQLKLWNVGKPYCLRSFKGHINEKNFVGLASNGDYIACGSENNSLYLYYKGLSKTLLTFKFDTVKSVLDKDRKEDDTNEFVSAVCWRALPDGESNVLIAANSQGTIKVLALL

SEQ ID NO: 62217 - protein, 731 aa, Homo sapiens
MSGSRQAGSGSAGTSPGSSAASSVTSASSSLSSSPSPPSVAVSAAALVSGGVAQAAGSGGLGGPVRPVLVAPAVSGSGGGAVSTGLSRHSCAARPSAGVGGSSSSLGSGSRKRPLLAPLCNGLINSYEDKSNDFVCPICFDMIEEAYMTKCGHSFCYKCIHQSLEDNNRCPKCNYVVDNIDHLYPNFLVNELILKQKQRFEEKRFKLDHSVSSTNGHRWQIFQDWLGTDQDNLDLANVNLMLELLVQKKKQLEAESHAAQLQILMEFLKVARRNKREQLEQIQKELSVLEEDIKRVEEMSGLYSPVSEDSTVPQFEAPSPSHSSIIDSTEYSQPPGFSGSSQTKKQPWYNSTLASRRKRLTAHFEDLEQCYFSTRMSRISDDSRTASQLDEFQECLSKFTRYNSVRPLATLSYASDLYNGSSIVSSIEFDRDCDYFAIAGVTKKIKVYEYDTVIQDAVDIHYPENEMTCNSKISCISWSSYHKNLLASSDYEGTVILWDGFTGQRSKVYQEHEKRCWSVDFNLMDPKLLASGSDDAKVKLWSTNLDNSVASIEAKANVCCVKFSPSSRYHLAFGCADHCVHYYDLRNTKQPIMVFKGHRKAVSYAKFVSGEEIVSASTDSQLKLWNVGKPYCLRSFKGHINEKNFVGLASNGDYIACGSENNSLYLYYKGLSKTLLTFKFDTVKSVLDKDRKEDDTNEFVSAVCWRALPDGESNVLIAANSQGTIKVLELV

SEQ ID NO: 62218 - protein, 257 aa, Homo sapiens
MSGSRQAGSGSAGTSPGSSAASSVTSASSSLSSSPSPPSVAVSAAALVSGGVAQAAGSGGLGGPVRPVLVAPAVSGSGGGAVSTGLSRHSCAARPSAGVGGSSSSLGSGSRKRPLLAPLCNGLINSYEDKSNDFVCPICFDMIEEAYMTKCGHSFCYKCIHQSLEDNNRCPKCNYVVDNIDHLYPNFLVNELILKQKQRFEEKRFKLDHSVSSTNGHRWQIFQDWLGTDQDNLDLANVNLMLELLVQKNKKKKKKKK

SEQ ID NO: 62219 - protein, 774 aa, Homo sapiens
MAHEAMEYDVQVQLNHAEQQPAPAGMASSQGGPALLQPVPADVVSSQGVPSILQPAPAEVISSQATPPLLQPAPQLSVDLTEVEVLGEDTVENINPRTSEQHRQGSDGNHTIPASSLHSMTNFISGLQRLHGMLEFLRPSSSNHSVGPMRTRRRVSASRRARAGGSQRTDSARLRAPLDAYFQVSRTQPDLPATTYDSETRNPVSEELQVSSSSDSDSDSSAEYGGVVDQAEESGAVILEEQLAGVSAEQEVTCIDGGKTLPKQPSPQKSEPLLPSASMDEEEGDTCTICLEQWTNAGDHRLSALRCGHLFGYRCISTWLKGQVRKCPQCNKKARHSDIVVLYARTLRALDTSEQERMKSSLLKEQMLRKQAELESAQCRLQLQVLTDKCTRLQRRVQDLQKLTSHQSQNLQQPRGSQAWVLSCSPSSQGQHKHKYHFQKTFTVSQAGNCRIMAYCDALSCLVISQPSPQASFLPGFGVKMLSTANMKSSQYIPMHGKQIRGLAFSSYLRGLLLSASLDNTIKLTSLETNTVVQTYNAGRPVWSCCWCLDEANYIYAGLANGSILVYDVRNTSSHVQELVAQKARCPLVSLSYMPRAASAAFPYGGVLAGTLEDASFWEQKMDFSHWPHVLPLEPGGCIDFQTENSSRHCLVTYRPDKNHTTIRSVLMEMSYRLDDTGNPICSCQPVHTFFGGPTCKLLTKNAIFQSPENDGNILVCTGDEAANSALLWDAASGSLLQDLQTDQPVLDICPFEVNRNSYLATLTEKMVHIYKWE

SEQ ID NO: 62220 - protein, 263 aa, Homo sapiens
MAHEAMEYDVQVQLNHAEQQPAPAGMASSQGGPALLQPVPADVVSSQGVPSILQPAPAEVISSQATPPLLQPAPQLSVDLTEVEVLGEDTVENINPRTSEQHRQGSDGNHTIPASSLHSMPLEPGGCIDFQTENSSRHCLVTYRPDKNHTTIRSVLMEMSYRLDDTGNPICSCQPVHTFFGGPTCKLLTKNAIFQSPENDGNILVCTGDEAANSALLWDAASGSLLQDLQTDQPVLDICPFEVNRNSYLATLTEKMVHIYKWE

SEQ ID NO: 62221 - protein, 685 aa, Homo sapiens [sequence omitted]

SEQ ID NO: 62222 - protein, 685 aa, Homo sapiens [sequence omitted]

SEQ ID NO: 62223 - protein, 685 aa, Homo sapiens [sequence omitted]

SEQ ID NO: 62224 - protein, 329 aa, Homo sapiens
MQLEVDKMGTKLGELLVSRITVEEGEESSRSSTAVRRHPTITLDLQVRRIRPGENRDRDSIANRTRSRVGLAENTVTIESNSGGFRRTISRLERSGIRTYVSTITVPLRRISENELVEPSSVALRSILRQIMTGFGELSSLMEADSESELQRNGQHLPDMHSELSNLGTDNNRSQHREGSSQDRQAQGDSTEMHGENETTQPHTRNSDSRGGRQLRNPNNLVETGTLPILRLAHFFLLNESDDDDRIRGLTKEQIDNLSTRHYEHNSIDSELGKICSVCISDYVTGNKLRQLPCMHEFHIHCIDRWLSENCTCPICRQPVLGSNIANNG

SEQ ID NO: 62225 - protein, 406 aa, Homo sapiens
MTTPANAQNASKTWELSLYELHRTPQEAIMDGTEIAVSPRSLHSELMCPICLDMLKNTMTTKECLHRFCSDCIVTALRSGNKECPTCRKKLVSKRSLRPDPNFDALISKIYPSREEYEAHQDRVLIRLSRLHNQQALSSSIEEGLRMQAMHRAQRVRRPIPGSDQTTTMSGGEGEPGEGEGDGEDVSSDSAPDSAPGPAPKRPRGGGAGGSSVGTGGGGTGGVGGGAGSEDSGDRGGTLGGGTLGPPSPPGAPSPPEPGGEIELVFRPHPLLVEKGEYCQTRYVKTTGNATVDHLSKYLALRIALERRQQQEAGEPGGPGGGASDTGGPDGCGGEGGGAGGGDGPEEPALPSLEGVSEKQYTIYIAPGGGAFTTLNGSLTLELVNEKFWKVSRPLELCYAPTKDPK

SEQ ID NO: 62226 - protein, 406 aa, Homo sapiens; identical to SEQ ID NO: 62225

SEQ ID NO: 62227 - protein, 406 aa, Homo sapiens; identical to SEQ ID NO: 62225

SEQ ID NO: 62228 - protein, 406 aa, Homo sapiens; identical to SEQ ID NO: 62225

SEQ ID NO: 62229 - protein, 406 aa, Homo sapiens; identical to SEQ ID NO: 62225

SEQ ID NO: 62230 - protein, 406 aa, Homo sapiens; identical to SEQ ID NO: 62225

SEQ ID NO: 62231 - protein, 154 aa, Homo sapiens
MGNCLKSPTSDDISLLHESQSDRASFGEGTEPDQEPPPPYQEQVPVPVYHPTPSQTRLATQLTEEEQIRIAQRIGLIQHLPKGVYDPGRDGSEKKIRECVICMMDFVYGDPIRFLPCMHIYHLDCIDDWLMRSFTCPSCMEPVDAALLSSYETN

SEQ ID NO: 62232 - protein, 631 aa, Homo sapiens
MPRPALSVTSFCHRLGKRERKQSFMGNSGNSWSHTPFPKLELGLGPQPMAPRELPTCSICLERLRDPISLDCGHDFCIRCFSTHRLPGCEPPCCPECRKICKQKRGLRSLGEKMKLLPQRPLPPALQETCPVRAEPLLLVRINASGGLILRMGAINRCLKHPLARDTPVCLLAVLGEQHSGKSFLLNHLLQGLPGLESGEGGRPRGGEASLQGCRWGANGLARGIWMWSHPFLLGKEGKKVAVFLVDTGDAMSPELSRETRIKLCALTTMLSSYQILSTSQELKDTDLDYLEMFVHVAEVMGKHYGMVPIQHLDLLVRDSSHPNKAGQGHVGNIFQRLSGRYPKVQELLQGKRARCCLLPAPGRRRMNQGHASPGDTDDDFRHLLGAYVSDVLSAAPQHAKSRCQGYWNEGRAVARGDRRLLTGQQLAQEIKNLSGWMGRTGPGFTSPDEMAAQLHDLRKVEAAKREFEEYVRQQDVATKRIFSALRVLPDTMRNLLSTQKDAILARHGVALLCKGRDQTLEALEAELQATAKAFMDSYTMRFCGHLAAVGGAVGAGLMGLAGGVVGAGMAAAALAAEAGMVAAGAAVGATGAAVVGGGVGAGLAATVGCMEKEEDERLLEGDREPLLQEE

SEQ ID NO: 62233 - protein, 228 aa, Homo sapiens
MAAQQRDCGGAAQLAGPAAEADPLGRFTCPVCLEVYEKPVQVPCGHVFCSACLQECLKPKKPVCGVCRSALAPGVRAVELERQIESTETSCHGCRKNFFLSKIRSHVATCSKYQNYIMEGVKATIKDASLQPRNVPNRYTFPCPYCPEKNFDQEGLVEHCKLFHSTDTKSVVCPICASMPWGDPNYRSANFREHIQRRHRFSYDTFVDYDVDEEDMMNQVLQRSIIDQ

SEQ ID NO: 62234 - protein, 191 aa, Homo sapiens
MAAQQRDCGGAAQLAGPAAEADPLGRFTCPVCLEVYEKPVQVPCGHVFCSACLQECLKPKKPVCGVCRSALAPGVRAVELERQIESTETSCHGCRKNFFLSKIRSHVATCSKYQNYIMEGVKATIKDASLQPRNVPNRYTFPCPYCPEKNFDQEGLVEHCKLFHSTDTKSVTSEQSPCLLSVSCYRASITY

SEQ ID NO: 62235 - protein, 428 aa, Homo sapiens
MGPPPGAGVSCRGGCGFSRLLAWCFLLALSPQAPGSRGAEAVWTAYLNVSWRVPHTGVNRTVWELSEEGVYGQDSPLEPVAGVLVPPDGPGALNACNPHTNFTVPTVWGSTVQVSWLALIQRGGGCTFADKIHLAYERGASGAVIFNFPGTRNEVIPMSHPGAVDIVAIMIGNLKGTKILQSIQRGIQVTMVIEVGKKHGPWVNHYSIFFVSVSFFIITAATVGYFIFYSARRLRNARAQSRKQRQLKADAKKAIGRLQLRTLKQGDKEIGPDGDSCAVCIELYKPNDLVRILTCNHIFHKTCVDPWLLEHRTCPMCKCDILKALGIEVDVEDGSVSLQVPVSNEISNSASSHEEDNRSETASSGYASVQGTDEPPLEEHVQSTNESLQLVNHEANSVAVDVIPHVDNPTFEEDETPNQETAVREIKS

SEQ ID NO: 62236 - protein, 402 aa, Homo sapiens
MNQENRSSFFWLLVIFTFLLKITASFSMSAYVTVTYYNETSNYTAIETCECGVYGLASPVANAMGVVGIPKNNNYQACDHNTEFSNTKKPWIALIERGNCTFSEKIQTAGRRNADAVVIYNAPETGNQTIQMANFGAVDIVAIMIGNLKGTKILQSIQRGIQVTMVIEVGKKHGPWVNHYSIFFVSVSFFIITAATVGYFIFYSARRLRNARAQSRKQRQLKADAKKAIGRLQLRTLKQGDKEIGPDGDSCAVCIELYKPNDLVRILTCNHIFHKTCVDPWLLEHRTCPMCKCDILKALGIEVDVEDGSVSLQVPVSNEISNSASSHEEDNRSETASSGYASVQGTDEPPLEEHVQSTNESLQLVNHEANSVAVDVIPHVDNPTFEEDETPNQETAVREIKS

SEQ ID NO: 62237 - protein, 249 aa, Homo sapiens
MSAYVTVTYYNETSNYTAIETCECGVYGLASPVANAMGVVGIPKNNNYQACDHNTEFSNTKKPWIALIERGNCTFSEKIQTAGRRNADAVVIYNAPETGNQTIQMANFGAVDIVAIMIGNLKGTKILQSIQRGIQVTMVIEVGKKHGPWVNHYSIFFVSVSFFIITAATVGYFIFYSARRLRNARAQSRKQRQLKADAKKAIGRLQLRTLKQGDKEIGPDGDSCAVCIELYKPNDLVRILTCNHIFHKT

SEQ ID NO: 62238 - protein, 210 aa, Homo sapiens
MAGLGLGSAVPVWLAEDDLGCIICQGLLDWPATLPCGHSFCRHCLEALWGARDARRWACPTCRQGAAQQPHLRKNTLLQDLADKYRRAAREIQAGSDPAHCPCPGSSSLSSAAARPRRRPELQRVAVEKSITEVAQELTELVEHLVDIVRSLQNQRPLSESGPDNELSILGKENSWKPRLPPHAHCLTRATLHSGELLGLLSGPSIQPLT

SEQ ID NO: 62239 - protein, 432 aa, Homo sapiens
MAGLGLGSAVPVWLAEDDLGCIICQGLLDWPATLPCGHSFCRHCLEALWGARDARRWACPTCRQGAAQQPHLRKNTLLQDLADKYRRAAREIQAGSDPAHCPCPGSSSLSSAAARPRRRPELQRVAVEKSITEVAQELTELVEHLVDIVRSLQNQRPLSESGPDNELSILGKAFSSGVDLSMASPKLVTSDTAAGKIRDILHDLEEIQEKLQESVTWKEAPEAQMQGELLEAPSSSSCPLPDQSHPALRRASRFAQWAIHPTFNLKSLSCSLEVSKDSRTVTVSHRPQPYRWSCERFSTSQVLCSQALSSGKHYWEVDTRNCSHWAVGVASWEMSRDQVLGRTMDSCCVEWKGTSQLSAWHMVKETVLGSDRPGVVGIWLNLEEGKLAFYSVDNQEKLLYECTISASSPLYPAFWLYGLHPGNYLIIKQVKV

SEQ ID NO: 62240 - protein, 84 aa, Homo sapiens
  VARIANT 1: note = MOD_RES - Any amino acid
XKEAPEAQMQGSLLPRLECSGTITAASISQAQENSWKPRLPPHAHCLTRATLHSGELLGLLSVPPRGELIAKAKQVETLDPRAL

SEQ ID NO: 62241 - protein, 96 aa, Homo sapiens
AQQPHLRKNTLLQDLADKYRRAAREIQAGSDPAHCPCPGSSSLSSAAARPRRRPELQRENSWKPRLPPHAHCLTRATLHSGELLGLLSGPSIQPLT

SEQ ID NO: 62242 - protein, 286 aa, Homo sapiens
MAGLGLGSAVPVWLAEDDLGCIICQGLLDWPATLPCGHSFCRHCLEALWGARDARRWACPTCRQGAAQQPHLRKNTLLQDLADKYRRAAREIQAGSDPAHCPCPGSSSLSSAAARPRRRPELQRVAVEKSITEVAQELTELVEHLVDIVRSLQNQRPLSESGPDNELSILGKAFSSGVDLSMASPKLVTSDTAAGKIRDILHDLEEIQEKLQESVTWKEAPEAQMQGSLLPRLECSGTITAASISQAQENSWKPRLPPHAHCLTRATLHSGELLGLLSGPSIQPLT

SEQ ID NO: 62243 - protein, 251 aa, Homo sapiens
MASPKLVTSDTAAGKIRDILHDLEEIQEKLQESVTWKEAPEAQMQGELLEAPSSSSCPLPDQSHPALRRASRFAQWAIHPTFNLKSLSCSLEVSKDSRTVTVSHRPQPYRWSCERFSTSQVLCSQALSSGKHYWEVDTRNCSHWAVGVASWEMSRDQVLGRTMDSCCVEWKGTSQLSAWHMVKETVLGSDRPGVVGIWLNLEEGKLAFYSVDNQEKLLYECTISASSPLYPAFWLYGLHPGNYLIIKQVKV

SEQ ID NO: 62244 - protein, 664 aa, Homo sapiens
MAAVGPPQQQVRMAHQQVWAALEVALRVPCLYIIDAIFNSYPDSSQSRFCIVLQIFLRLFGVFASSIVLILSQRSLFKFYTYSSAFLLAATSVLVNYYASLHIDFYGAYNTSAFGIELLPRKGPSLWMALIVLQLTFGIGYVTLLQIHSIYSQLIILDLLVPVIGLITELPLHIRETLLFTSSLILTLNTVFVLAVKLKWFYYSTRYVYLLVRHMYRIYGLQLLMEDTWKRIRFPDILRVFWLTRVTAQATVLMYILRMANETDSFFISWDDFWDLICNLIISGCDSTLTVLGMSAVISSVAHYLGLGILAFIGSTEEDDRRLGFVAPVLFFILALQTGLSGLRPEERLIRLSRNMCLLLTAVLHFIHGMTDPVLMSLSASHVSSFRRHFPVLFVSACLFILPVLLSYVLWHHYALNTWLFAVTAFCVELCLKVIVSLTVYTLFMIDGYYNVLWEKLDDYVYYVRSTGSIIEFIFGVVMFGNGAYTMMFESGSKIRAFMMCLHAYFNIYLQAKNGWKTFMNRRTAVKKINSLPEIKGSRLQEINDVCAICYHEFTTSARITPCNHYFHALCLRKWLYIQDTCPMCHQKVYIEDDIKDNSNVSNNNGFIPPNETPEEAVREAAAESDRELNEDDSTDCDDDVQRERNGVIQHTGAAAEEFNDDTD

SEQ ID NO: 62245 - protein, 474 aa, Homo sapiens
MSSEDREAQEDELLALASIYDGDEFRKAESVQGGETRIYLDLPQNFKIFVSGNSNECLQNSGFEYTICFLPPLVLNFELPPDYPSSSPPSFTLSGKWLSPTQLSALCKHLDNLWEEHRGSVVLFAWMQFLKEETLAYLNIVSPFELKIGSQKKVQRRTAQASPNTELDFGGAAGSDVDQEEIVDERAVQDVESLSNLIQEILDFDQAQQIKCFNSKLFLCSICFCEKLGSECMYFLECRHVYCKACLKDYFEIQIRDGQVQCLNCPEPKCPSVATPGQVKELVEAELFARYDRLLLQSSLDLMADVVYCPRPCCQLPVMQEPGCTMGICSSCNFAFCTLCRLTYHGVSPCKVTAEKLMDLRNEYLQADEANKRLLDQRYGKRVIQKALEEMESKEWLEKNSKSCPCCGTPIEKLDGCNKMTCTGCMQYFCWICMGSLSRANPYKHFNDPGSPCFNRLFYAVDVDDDIWEDEVED

SEQ ID NO: 62246 - protein, 474 aa, Homo sapiens; identical to SEQ ID NO: 62245

SEQ ID NO: 62247 - protein, 348 aa, Homo sapiens
MQFLKEETLAYLNIVSPFELKIGSQKKVQRRTAQASPNTELDFGGAAGSDVDQEEIVDERAVQDVESLSNLIQEILDFDQAQQIKCFNSKLFLCSICFCEKLGSECMYFLECRHVYCKACLKDYFEIQIRDGQVQCLNCPEPKCPSVATPGQVKELVEAELFARYDRLLLQSSLDLMADVVYCPRPCCQLPVMQEPGCTMGICSSCNFAFCTLCRLTYHGVSPCKVTAEKLMDLRNEYLQADEANKRLLDQRYGKRVIQKALEEMESKEWLEKNSKSCPCCGTPIEKLDGCNKMTCTGCMQYFCWICMGSLSRANPYKHFNDPGSPCFNRLFYAVDVDDDIWEDEVED

SEQ ID NO: 62248 - protein, 298 aa, Homo sapiens
MSSEDREAQEDELLALASIYDGDEFRKAESVQGGETRIYLDLPQNFKIFVSGNSNECLQNSGFEYTICFLPPLVLNFELPPDYPSSSPPSFTLSGKWLSPTQVKELVEAELFARYDRLLLQSSLDLMADVVYCPRPCCQLPVMQEPGCTMGICSSCNFAFCTLCRLTYHGVSPCKVTAEKLMDLRNEYLQADEANKRLLDQRYGKRVIQKALEEMESKEWLEKNSKSCPCCGTPIEKLDGCNKMTCTGCMQYFCWICMGSLSRANPYKHFNDPGSPCFNRLFYAVDVDDDIWEDEVED

SEQ ID NO: 62249 - protein, 474 aa, Homo sapiens; identical to SEQ ID NO: 62245

SEQ ID NO: 62250 - protein, 474 aa, Homo sapiens; identical to SEQ ID NO: 62245

SEQ ID NO: 62251 - protein, 15 aa, Homo sapiens
MSSEDREAQEDELLA

SEQ ID NO: 62252 - protein, 132 aa, Homo sapiens
MSSEDREAQEDELLALASIYDGDEFRKAESVQGGETRIYLDLPQNFKIFVSGNSNECLQNSGFEYTICFLPPLVLNFELPPDYPSSSPPSFTLSGKWLSPTQLSALCKHLDNLWEEHRGSVVLFAWMQFLKE

SEQ ID NO: 62253 - protein, 171 aa, Homo sapiens
MSSEDREAQEDELLALASIYDGDEFRKAESVQGGETRIYLDLPQNFKIFVSGNSNECLQNSGFEYTICFLPPLVLNFELPPDYPSSSPPSFTLSGKWLSPTQLSALCKHLDNLWEEHRGSVVLFAWMQFLKEETLAYLNIVSPFELKIGSQKKVQRRTAQASPNTELDFGG

SEQ ID NO: 62254 - protein, 185 aa, Homo sapiens
MSSEDREAQEDELLALASIYDGDEFRKAESVQGGETRIYLDLPQNFKIFVSGNSNECLQNSGFEYTICFLPPLVLNFELPPDYPSSSPPSFTLSGKWLSPTQLSALCKHLDNLWEEHRGSVVLFAWMQFLKEETLAYLNIVSPFELKIGSQKKVQRRTAQASPNTELDFGGAAGSDVDQEEIVDE

SEQ ID NO: 62255 - protein, 61 aa, Homo sapiens
MSSEDREAQEDELLALASIYDGDEFRKAESVQGGETRIYLDLPQNFKIFVSGNSNECLQNS

SEQ ID NO: 62256 - protein, 278 aa, Homo sapiens
MSSEDREAQEDELLALASIYDGDEFRKAESVQGGETRIYLDLPQNFKIFVSGNSNECLQNSGFEYTICFLPPLVLNFELPPDYPSSSPPSFTLSGKWLSPTQLSALCKHLDNLWEEHRGSVVLFAWMQFLKEETLAYLNIVSPFELKIGSQKKVQRRTAQASPNTELDFGGAAGSDVDQEEIVDERAVQDVESLSNLIQEILDFDQAQQIKCFNSKLFLCSICFCEKLGSECMYFLECRHVYCKACLKDYFEIQIRDGQVQCLNCPEPKCPSVATPGQ

SEQ ID NO: 62257 - protein, 99 aa, Homo sapiens
MSSEDREAQEDELLALASIYDGDEFRKAESVQGGETRIYLDLPQNFKIFVSGNSNECLQNSGFEYTICFLPPLVLNFELPPDYPSSSPPSFTLSGKWLS

SEQ ID NO: 62258 - protein, 171 aa, Homo sapiens
MSSEDREAQEDELLALASIYDGDEFRKAESVQGGETRIYLDLPQNFKIFVSEKLMDLRNEYLQADEANKRLLDQRYGKRVIQKALEEMESKEWLEKNSKSCPCCGTPIEKLDGCNKMTCTGCMQYFCWICMGSLSRANPYKHFNDPGSPCFNRLFYAVDVDDDIWEDEVED

SEQ ID NO: 62259 - protein, 358 aa, Homo sapiens
MAGCGEIDHSINMLPTNRKANESCSNTAPSLTVPECAICLQTCVHPVSLPCKHVFCYLCVKGASWLGKRCALCRQEIPEDFLDKPTLLSPEELKAASRGNGEYAWYYEGRNGWWQYDERTSRELEDAFSKGKKNTEMLIAGFLYVADLENMVQYRRNEHGRRRKIKRDIIDIPKKGVAGLRLDCDANTVNLARESSADGADSVSAQSGASVQPLVSSVRPLTSVDGQLTSPATPSPDASTSLEDSFAHLQLSGDNTAERSHRGEGEEDHESPSSGRVPAPDTSIEETESDASSDSEDVSAVVAQHSLTQQRLLVSNANQTVPDRSDRSGTDRSVAGGGTVSVSVRSRRPDGQCTVTEV

SEQ ID NO: 62260 - protein, 358 aa, Homo sapiens; identical to SEQ ID NO: 62259

SEQ ID NO: 62261 - protein, 359 aa, Homo sapiens
MMAGCGEIDHSINMLPTNRKANESCSNTAPSLTVPECAICLQTCVHPVSLPCKHVFCYLCVKGASWLGKRCALCRQEIPEDFLDKPTLLSPEELKAASRGNGEYAWYYEGRNGWWQYDERTSRELEDAFSKGKKNTEMLIAGFLYVADLENMVQYRRNEHGRRRKIKRDIIDIPKKGVAGLRLDCDANTVNLARESSADGADSVSAQSGASVQPLVSSVRPLTSVDGQLTSPATPSPDASTSLEDSFAHLQLSGDNTAERSHRGEGEEDHESPSSGRVPAPDTSIEETESDASSDSEDVSAVVAQHSLTQQRLLVSNANQTVPDRSDRSGTDRSVAGGGTVSVSVRSRRPDGQCTVTEV

SEQ ID NO: 62262 - protein, 571 aa, Homo sapiens
MALPKDAIPSLSECQCGICMEILVEPVTLPCNHTLCKPCFQSTVEKASLCCPFCRRRVSSWTRYHTRRNSLVNVELWTIIQKHYPRECKLRASGQESEEVADDYQPVRLLSKPGELRREYEEEISKVAAERRASEEEENKASEEYIQRLLAEEEEEEKRQAEKRRRAMEEQLKSDEELARKLSIDINNFCEGSISASPLNSRKSDPVTPKSEKKSKNKQRNTGDIQKYLTPKSQFGSASHSEAVQEVRKDSVSKDIDSSDRKSPTGQDTEIEDMPTLSPQISLGVGEQGADSSIESPMPWLCACGAEWYHEGNVKTRPSNHGKELCVLSHERPKTRVPYSKETAVMPCGRTESGCAPTSGVTQTNGNNTGETENEESCLLISKEISKRKNQESSFEAVKDPCFSAKRRKVSPESSPDQEETEINFTQKLIDLEHLLFERHKQEEQDRLLALQLQKEVDKEQMVPNRQKGSPDEYHLRATSSPPDKVLNGQRKNPKDGNFKRQTHTKHPTPERGSRDKNRQVSLKMQLKQSVNRRKMPNSTRDHCKVSKSAHSLQPSISQKSVFQMFQRCTK

SEQ ID NO: 62263 - protein, 571 aa, Homo sapiens; identical to SEQ ID NO: 62262

SEQ ID NO: 62264 - protein, 1623 aa, Homo sapiens
MAAEASKTGPSRSSYQRMGRKSQPWGAAEIQCTRCGRRVSRSSGHHCELQCGHAFCELCLLMTEECTTIICPDCEVATAVNTRQRYYPMAGYIKEDSIMEKLQPKTIKNCSQDFKKTADQLTTGLERSASTDKTLLNSSAVMLDTNTAEEIDEALNTAHHSFEQLSIAGKALEHMQKQTIEERERVIEVVEKQFDQLLAFFDSRKKNLCEEFARTTDDYLSNLIKAKSYIEEKKNNLNAAMNIARALQLSPSLRTYCDLNQIIRTLQLTSDSELAQVSSPQLRNPPRLSVNCSEIICMFNNMGKIEFRDSTKCYPQENEIRQNVQKKYNNKKELSCYDTYPPLEKKKVDMSVLTSEAPPPPLQPETNDVHLEAKNFQPQKDVATASPKTIAVLPQMGSSPDVIIEEIIEDNVESSAELVFVSHVIDPCHFYIRKYSQIKDAKVLEKKVNEFCNRSSHLDPSDILELGARIFVSSIKNGMWCRGTITELIPIEGRNTRKPCSPTRLFVHEVALIQIFMVDFGNSEVLIVTGVVDTHVRPEHSAKQHIALNDLCLVLRKSEPYTEGLLKDIQPLAQPCSLKDIVPQNSNEGWEEEAKVEFLKMVNNKAVSMKVFREEDGVLIVDLQKPPPNKISSDMPVSLRDALVFMELAKFKSQSLRSHFEKNTTLHYHPPILPKEMTDVSVTVCHINSPGDFYLQLIEGLDILFLLKTIEEFYKSEDGENLEILCPVQDQACVAKFEDGIWYRAKVIGLPGHQEVEVKYVDFGNTAKITIKDVRKIKDEFLNAPEKAIKCKLAYIEPYKRTMQWSKEAKEKFEEKAQDKFMTCSVIKILEDNVLLVELFDSLGAPEMTTTSINDQLVKEGLASYEIGYILKDNSQKHIEVWDPSPEEIISNEVHNLNPVSAKSLPNENFQSLYNKELPVHICNVISPEKIYVQWLLTENLLNSLEEKMIAAYENSKWEPVKWENDMHCAVKIQDKNQWRRGQIIRMVTDTLVEVLLYDVGVELVVNVDCLRKLEENLKTMGRLSLECSLVDIRPAGGSDKWTATACDCLSLYLTGAVATIILQVDSEENNTTWPLPVKIFCRDEKGERVDVSKYLIKKGLALRERRINNLDNSHSLSEKSLEVPLEQEDSVVTNCIKTNFDPDKKTADIISEQKVSEFQEKILEPRTTRGYKPPAIPNMNVFEATVSCVGDDGTIFVVPKLSEFELIKMTNEIQSNLKCLGLLEPYFWKKGEACAVRGSDTLWYRGKVMEVVGGAVRVQYLDHGFTEKIPQCHLYPILLYPDIPQFCIPCQLHNTTPVGNVWQPDAIEVLQQLLSKRQVDIHIMELPKNPWEKLSIHLYFDGMSLSYFMAYYKYCTSEHTEEMLKEKPRSDHDKKYEEEQWEIRFEELLSAETDTPLLPPYLSSSLPSPGELYAVQVKHVVSPNEVYICLDSIETSNQSNQHSDTDDSGVSGESESESLDEALQRVNKKVEALPPLTDFRTEMPCLAEYDDGLWYRAKIVAIKEFNPLSILVQFVDYGSTAKLTLNRLCQIPSHLMRYPARAIKVLLAGFKPPLRDLGETRIPYCPKWSMEALWAMIDCLQGKQLYAVSMAPAPEQIVTLYDDEQHPVHMPLVEMGLADKDE

SEQ ID NO: 62265 - protein, 449 aa, Homo sapiens
MAAEASKTGPSRSSYQRMGRKSQPWGAAEIQCTRCGRRVSRSSGHHCELQCGHAFCELCLLMTEECTTIICPDCEVATAVNTRQRYYPMAGYIKEDSIMEKLQPKTIKNCSQDFKKTADQLTTGLERSASTDKTLLNSSAVMLDTNTAEEIDEALNTAHHSFEQLSIAGKALEHMQKQTIEERERVIEVVEKQFDQLLAFFDSRKKNLCEEFARTTDDYLSNLIKAKSYIEEKKNNLNAAMNIARALQLSPSLRTYCDLNQIIRTLQLTSDSELAQVSSPQLRNPPRLSVNCSEIICMFNNMGKIEFRDSTKCYPQENEIRQNVQKKYNNKKELSCYDTYPPLEKKKVDMSVLTSEAPPPPLQPETNDVHLEAKNFQPQKDVATASPKTIAVLPQMGSSPDVIIEEIIEDNVETCGTDDLGETPRYPKKPLQKNSSVPFGSKADTVTTV

SEQ ID NO: 62266 - protein, 1581 aa, Homo sapiens
MAAEASKTGPSRSSYQRMGRKSQPWGAAEIQCTRCGRRVSRSSGHHCELQCGHAFCELCLLMTEECTTIICPDCEVATAVNTRQRYYPMAGYIKEDSIMEKLQPKTIKNCSQDFKKTADQLTTGLERSASTDKTLLNSSAVMLDTNTAEEIDEALNTAHHSFEQLSIAGKALEHMQKQTIEERERVIEVVEKQFDQLLAFFDSRKKNLCEEFARTTDDYLSNLIKAKSYIEEKKNNLNAAMNIARALQLSPSLRTYCDLNQIIRTLQLTSDSELAQVSSPQLRNPPRLSVNCSEIICMFNNMGKIEFRDSTKCYPQENEIRQNVQKKYNNKKELSCYDTYPPLEKKKVDMSVLTSEAPPPPLQPETNDVHLEAKNFQPQKDVATASPKTIAVLPQMGSSPDVIIEEIIEDNVESSAELVFVSHVIDPCHFYIRKYSQIKDAKVLEKKVNEFCNRSSHLDPSDILELGARIFVSSIKNGMWCRGTITELIPIEGRNTRKPCSPTRLFVHEVALIQIFMVDFGNSEVLIVTGVVDTHVRPEHSAKQHIALNDLCLVLRKSEPYTEGLLKDIQPLAQPCSLKDIVPQNSNEGWEEEAKVEFLKMVNNKAVSMKVFREEDGVLIVDLQKPPPNKISSDMPVSLRDALVFMELAKFKSQSLRSHFEKNTTLHYHPPILPKEMTDVSVTVCHINSPGDFYLQLIEGLDILFLLKTIEEFYKSEDGENLEILCPVQDQACVAKFEDGIWYRAKVIGLPGHQEVEVKYVDFGNTAKITIKDVRKIKDEFLNAPEKAIKCKLAYIEPYKRTMQWSKEAKEKFEEKAQDKFMTCSVIKILEDNVLLVELFDSLGAPEMTTTSINDQLVKEGLASYEIGYILKDNSQKHIEVWDPSPEEIISNEVHNLNPVSAKSLPNENFQSLYNKELPVHICNVISPEKIYVQWLLTENLLNSLEEKMIAAYENSKWEPVKWENDMHCAVKIQDKNQWRRGQIIRMVTDTLVEVLLYDVGVELVVNVDCLRKLEENLKTMGRLSLECSLVDIRPAGGSDKWTATACDCLSLYLTGAVATIILQVDSEENNTTWPLPVKIFCRDEKGERVDVSKYLIKKGLALRERRINNLDNSHSLSEKSLEVPLEQEDSVVTNCIKTNFDPDKKTADIISEQKVSEFQEKILEPRTTRGYKPPAIPNMNVFEATVSCVGDDGTIFVVPKLSEFELIKMTNEIQSNLKCLGLLEPYFWKKGEACAVRGSDTLWYRGKVMEVVGGAVRVQYLDHGFTEKIPQCHLYPILLYPDIPQFCIPCQLHNTTPVGNVWQPDAIEVLQQLLSKRQVDIHIMKPRSDHDKKYEEEQWEIRFEELLSAETDTPLLPPYLSSSLPSPGELYAVQVKHVVSPNEVYICLDSIETSNQSNQHSDTDDSGVSGESESESLDEALQRVNKKVEALPPLTDFRTEMPCLAEYDDGLWYRAKIVAIKEFNPLSILVQFVDYGSTAKLTLNRLCQIPSHLMRYPARAIKVLLAGFKPPLRDLGETRIPYCPKWSMEALWAMIDCLQGKQLYAVSMAPAPEQIVTLYDDEQHPVHMPLVEMGLADKDE

SEQ ID NO: 62267 - protein, 1068 aa, Homo sapiens
MLDTNTAEEIDEALNTAHHSFEQLSIAGKALEHMQKQTIEERERVIEVVEKQFDQLLAFFDSRKKNLCEEFARTTDDYLSNLIKAKSYIEEKKNNLNAAMNIARALQLSPSLRTYCDLNQIIRTLQLTSDSELAQVSSPQLRNPPRLSVNCSEIICMFNNMGKIEFRDSTKCYPQENEIRQNVQKKYNNKKELSCYDTYPPLEKKKVDMSVLTSEAPPPPLQPETNDVHLEAKNFQPQKDVATASPKTIAVLPQMGSSPDVIIEEIIEDNVESSAELVFVSHVIDPCHFYIRKYSQIKDAKVLEKKVNEFCNRSSHLDPSDILELGARIFVSSIKNGMWCRGTITELIPIEGRNTRKPCSPTRLFVHEVALIQIFMVDFGNSEVLIVTGVVDTHVRPEHSAKQHIALNDLCLVLRKSEPYTEGLLKDIQPLAQPCSLKDIVPQNSNEGWEEEAKVEFLKMVNNKAVSMKVFREEDGVLIVDLQKPPPNKISSDMPVSLRDALVFMELAKFKSQSLRSHFEKNTTLHYHPPILPKEMTDVSVTVCHINSPGDFYLQLIEGLDILFLLKTIEEFYKSEDGENLEILCPVQDQACVAKFEDGIWYRAKVIGLPGHQEVEVKYVDFGNTAKITIKDVRKIKDEFLNAPEKAIKCKLAYIEPYKRTMQWSKEAKEKFEEKAQDKFMTCSVIKILEDNVLLVELFDSLGAPEMTTTSINDQLVKEGLASYEIGYILKDNSQKHIEVWDPSPEEIISNEVHNLNPVSAKSLPNENFQSLYNKELPVHICNVISPEKIYVQWLLTENLLNSLEEKMIAAYENSKWEPVKWENDMHCAVKIQDKNQWRRGQIIRMVTDTLVEVLLYDVGVELVVNVDCLRKLEENLKTMGRLSLECSLVDIRPAGGSDKWTATACDCLSLYLTGAVATIILQVDSEENNTTWPLPVKIFCRDEKGERVDVSKYLIKKGLALRERRINNLDNSHSLSEKSLEVPLEQEDSVVTNCIKTNFDPDKKTADIISEQKVSEFQEKILEPRTTRGYKPPAIPNMNVFEATVSCVGDDGTIFVVPKLSEFELIK

SEQ ID NO: 62268 - protein, 153 aa, Homo sapiens
MASYFDEHDCEPSDPEQETRTNMLLELARSLFNRMDFEDLGLVVDWDHHLPPPAAKTVVENLPRTVIRGSQAELKCPVCLLEFEEEETAIEMPCHHLFHSSCILPWLSKTNSCPLCRYELPTDDDTYEEHRRDKARKQQQQHRLENLHGAMYT

SEQ ID NO: 62269 - protein, 227 aa, Homo sapiens
MACTKTLQQSQPISAGATTTTTAVAPAGGHSGSTECDLECLVCREPYSCPRLPKLLACQHAFCAICLKLLLCVQDNTWSITCPLCRKVTAVPGGLICSLRDHEAVVGQLAQPCTEVSLCPQGLVDPADLAAGHPSLVGEDGQDEVSANHVAARRLAAHLLLLALLIILIGPFIYPGVLRWVLTFIIALALLMSTLFCCLPSTRGSCWPSSRTLFCREQKHSHISSIA

SEQ ID NO: 62270 - protein, 264 aa, Homo sapiens
MSQAVQTNGTQPLSKTWELSLYELQRTPQEAITDGLEIVVSPRSLHSELMCPICLDMLKNTMTTKECLHRFCADCIITALRSGLQRGKKQQIENGSGAEDNGDSSHCSNASTHSNQEAGPSNKRTKTSDDSGLELDNNNAAMAIDPVMDGASEIELVFRPHPTLMEKDDSAQTRYIKTSGNATVDHLSKYLAVRLALEELRSKGESNQMNLDTASEKQYTIYIATASGQFTVLNGSFSLELVSEKYWKVNKPMELYYAPTKEHK

SEQ ID NO: 62271 - protein, 336 aa, Homo sapiens
MSQAVQTNGTQPLSKTWELSLYELQRTPQEAITDGLEIVVSPRSLHSELMCPICLDMLKNTMTTKECLHRFCADCIITALRSGNKECPTCRKKLVSKRSLRPDPNFDALISKIYPSRDEYEAHQERVLARINKHNNQQALSHSIEEGLKIQAMNRLQRGKKQQIENGSGAEDNGDSSHCSNASTHSNQEAGPSNKRTKTSDDSGLELDNNNAAMAIDPVMDGASEIELVFRPHPTLMEKDDSAQTRYIKTSGNATVDHLSKYLAVRLALEELRSKGESNQMNLDTASEKQYTIYIATASGQFTVLNGSFSLELVSEKYWKVNKPMELYYAPTKEHK

SEQ ID NO: 62272 - protein, 246 aa, Homo sapiens
MSQAVQTNGTQPLSKTWELSLYELQRTPQEAITDGLEIVVSPRSLHSELMCPICLDMLKNTMTTKECLHRFCADCIITALRSGNKECPTCRKKLVSKRSLRPDPNFDALISKIYPSRDEYEAHQERVLARINKHNNQQALSHSIEEGLKIQAMNRLQRGKKQQIENGSGAEDNGDSSHCSNASTHSNQEAGPSNKRTKTSDDSGLELDNNNAAMAIDPVMDGASEIELVFRPHPTLMEKDDSAQTR

SEQ ID NO: 62273 - protein, 273 aa, Homo sapiens
MANWVFCNRCFQPPHRTSCFSLTNCGHVYCDACLGKGKKNECLICKAPCRTVLLSKHTDADIQAFFMSIDSLCKKYSRETSQYLRLSRGCCRLKLCPATSSKEVPRGSTHGSQAAARDPQEHWVSTTRAPRPGCRRSQSQPEAQGNTIQDAPHPLTLLHPSRTLIHTKSPWGQKLLEFIKHVCYHRHQSHRPCAPGWFCQVLQRPGAVSGEKTQQTRPAPPATCLLCLSCLSGFRHGPWRSQALPSDLVAPLFVSYTVEVSITNAGWSFPAAV

SEQ ID NO: 62274 - protein, 232 aa, Homo sapiens
MANWVFCNRCFQPPHRTSCFSLTNCGHVYCDACLGKGKKNECLICKAPCRTVLLSKHTDADIQAFFMSIDSLCKKYSRETSQILEFQEKHRKRLLAFYREKISRLEESLRKSVLQIEQLQSMRSSQQTAFSTIKSSVSTKPHGCLLPPHSSAPDRLESMEVDLSPSPIRKSEIAAGPARISMISPPQDGRMAPCARRVCHFQRFTMFLHRRLSSLAAPPSVQFWKARGTHQL

SEQ ID NO: 62275 - protein, 297 aa, Homo sapiens
MANWVFCNRCFQPPHRTSCFSLTNCGHVYCDACLGKGKKNECLICKAPCRTVLLSKHTDADIQAFFMSIDSLCKKYSRETSQILEFQEKHRKRLLAFYREKISRLEESLRKSVLQIEQLQSMRSSQQTAFSTIKSSVSTKPHGCLLPPHSSAPDRLESMEVDLSPSPIRKSEIAAGPARISMISPPQDGRMGPHLTASFCFIPWLTLSKPPVPGECVISRGSPCFCIDVCPHWLLLLAFSSGRHGELTNSKTLPIYAEVQRAVLFPFQQAEGTLDTFRTPAVSVVFPLCQFERKKSF

SEQ ID NO: 62276 - protein, 1063 aa, Homo sapiens
MECPSCQHVSKEETPKFCSQCGERLPPAAPIADSENNNSTMASASEGEMECGQELKEEGGPCLFPGSDSWQENPEEPCSKASWTVQESKKKKRKKKKKGNKSASSELASLPLSPASPCHLTLLSNPWPQDTALPHSQAQQSGPTGQPSQPPGTATTPLEGDGLSAPTEVGDSPLQAQALGEAGVATGSEAQSSPQFQDHTEGEDQDASIPSGGRGLSQEGTGPPTSAGEGHSRTEDAAQELLLPESKGGSSEPGTELQTTEQQAGASASMAVDAVAEPANAVKGAGKEMKEKTQRMKQPPATTPPFKTHCQEAETKTKDEMAAAEEKVGKNEQGEPEDLKKPEGKNRSAAAVKNEKEQKNQEADVQEVKASTLSPGGGVTVFFHAIISLHFPFNPDLHKVFIRGGEEFGESKWDSNICELHYTRDLGHDRVLVEGIVCISKKHLDKYIPYKYVIYNGESFEYEFIYKHQQKKGEYVNRCLFIKSSLLGSGDWHQYYDIVYMKPHGRLQKVMNHITDGPRKDLVKGKQIAAALMLDSTFSILQTWDTINLNSFFTQFEQFCFVLQQPMIYEGQAQLWTDLQYREKEVKRYLWQHLKKHVVPLPDGKSTDFLPVDCPVRSKLKTGLIVLFVVEKIELLLEGSLDWLCHLLTSDASSPDEFHRDLSHILGIPQSWRLYLVNLCQRCMDTRTYTWLGALPVLHCCMELAPRHKDAWRQPEDTWAALEGLSFSPFREQMLDTSSLLQFMREKQHLLSIDEPLFRSWFSLLPLSHLVMYMENFIEHLGRFPAHILDCLSGIYYRLPGLEQVLNTQDVQDVQNVQNILEMLLRLLDTYRDKIPEEALSPSYLTVCLKLHEAICSSTKLLKFYELPALSAEIVCRMIRLLSLVDSAGQRDETGNNSVQTVFQGTLAATKRWLREVFTKNMLTSSGASFTYVKEIEVWRRLVEIQFPAEHGWKESLLGDMEWRLTKEEPLSQITAYCNSCWDTKGLEDSVAKTFEKCIIEAVSSACQVNNLSSWETDSGSQLCSAMTQLRAMKHPLGLSSSANSEIGKWAPSSLAKGNGAEI

SEQ ID NO: 62277 - protein, 3280 aa, Homo sapiens
MVCDGDWEHCYLPSAFSQHKVFVTPQAPLEAIQAYLAGHYRVPKQTLSAAAVFNDRLCVGIVASERAGVGKSLYVKRLHDKMKMQLNVKNVPLKTIRLIDPQVDESRVLGALLPFLDAQYQKVPVLFHLDVTSSVQTGIWVFLFKLLILQYLMDINGKMWLRNPCHLYIVEILERRTSVPSRSSSALRTRVPQFSFLDIFPKVTCRPPKEVIDMELSALRSDTEPGMDLWEFCSETFQRPYQYLRRFNQNQDLDTFQYQEGSVEGTPEECLQHFLFHCGVINPSWSELRNFARFLNYQLRDCEASLFCNPSFIGDTLRGFKKFVVTFMIFMARDFATPSLHTSDQSPGKHMVTMDGVREEDLAPFSLRKRWESEPHPYVFFNDDHTTMTFIGFHLQPNINGSVDAISHLTGKVIKRDVMTRDLYQGLLLQRVPFNVDFDKLPRHKKLERLCLTLGIPQATDPDKTYELTTDNMLKILAIEMRFRCGIPVIIMGETGCGKTRLIKFLSDLRRGGTNADTIKLVKVHGGTTADMIYSRVREAENVAFANKDQHQLDTILFFDEANTTEAISCIKEVLCDHMVDGQPLAEDSGLHIIAACNPYRKHSEEMICRLESAGLGYRVSMEETADRLGSIPLRQLVYRVHALPPSLIPLVWDFGQLSDVAEKLYIQQIVQRLVESISLDENGTRVITEVLCASQGFMRKTEDECSFVSLRDVERCVKVFRWFHEHSAMLLAQLNAFLSKSSVSKNHTERDPVLWSLMLAIGVCYHASLEKKDSYRKAIARFFPKPYDDSRLLLDEITRAQDLFLDGVPLRKTIAKNLALKENVFMMVVCIELKIPLFLVGKPGSSKSLAKTIVADAMQGPAAYSDLFRSLKQVHLVSFQCSPHSTPQGIISTFRQCARFQQGKDLQQYVSVVVLDEVGLAEDSPKMPLKTLHPLLEDGCIEDDPAPHKKVGFVGISNWALDPAKMNRGIFVSRGSPNETELIESAKGICSSDILVQDRVQGYFASFAKAYETVCKRQDKEFFGLRDYYSLIKMVFAAAKASNRKPSPQDIAQAVLRNFSGKDDIQALDIFLANLPEAKCSEEVSPMQLIKQNIFGPSQKVPGGEQEDAESRYLLVLTKNYVALQILQQTFFEGDQQPEIIFGSGFPKDQEYTQLCRNINRVKICMETGKMVLLLNLQNLYESLYDALNQYYVHLGGQKYVDLGLGTHRVKCRVHPNFRLIVIEEKDVVYKHFPIPLINRLEKHYLDINTVLEKWQKSIVEELCAWVEKFINVKAHHFQKRHKYSPSDVFIGYHSDACASVVLQVIERQGPRALTEELHQKVSEEAKSILLNCATPDAVVRLSAYSLGGFAAEWLSQEYFHRQRHNSFADFLQAHLHTADLERHAIFTEITTFSRLLTSHDCEILESEVTGRAPKPTLLWLQQFDTEYSFLKEVRNCLTNTAKCKILIFQTDFEDGIRSAQLIASAKYSVINEINKIRENEDRIFVYFITKLSRVGRGTAYVGFHGGLWQSVHIDDLRRSTLMVSDVTRLQHVTISQLFAPGDLPELGLEHRAEDGHEEAMETEASTSGEVAEVAEEAMETESSEKVGKETSELGGSDVSILDTTRLLRSCVQSAVGMLRDQNESCTRNMRRVVLLLGLLNEDDACHASFLRVSKMRLSVFLKKQEESQFHPLEWLAREACNQDALQEAGTFRHTLWKRVQGAVTPLLASMISFIDRDGNLELLTRPDTPPWARDLWMFIFSDTMLLNIPLVMNNERHKGEMAYIVVQNHMNLSENASNNVPFSWKIKDYLEELWVQAQYITDAEGLPKKFVDIFQQTPLGRFLAQLHGEPQQELLQCYLKDFILLTMRVSTEEELKFLQMALWSCTRKLKAASEAPEEEVSLPWVHLAYQRFRSRLQNFSRILTIYPQVLHSLMEARWNHELAGCEMTLDAFAAMACTEMLTRNTLKPSPQAWLQLVKNLSMPLELICSDEHMQGSGSLAQAVIREVRAQWSRIFSTALFVEHVLLGTESRVPELQGLVTEHVFLLDKCLRENSDVKTHGPFEAVMRTLCECKETASKTLSRFGIQPCSICLGDAKDPVCLPCDHVHCLRCLRAWFASEQMICPYCLTALPDEFSPAVSQAHREAIEKHARFRQMCNSFFVDLVSTICFKDNAPPEKEVIESLLSLLFVQKGRLRDAAQRHCEHTKSLSPFNDVVDKTPVIRSVILKLLLKYSFHDVKDYIQEYLTLLKKKAFITEDKTELYMLFINCLEDSILEKTSAYSRNDELNHLEEEGRFLKAYSPASRGREPANEASVEYLQEVARIRLCLDRAADFLSEPEGGPEMAKEKQCYLQQVKQFCIRVENDWHRVYLVRKLSSQRGMEFVQGLSKPGRPHQWVFPKDVVKQQGLRQDHPGQMDRYLVYGDEYKALRDAVAKAVLECKPLGIKTALKACKTPQSQQSAYFLLTLFREVAILYRSHNASLHPTPEQCEAVSKFIGECKILSPPDISRFATSLVDNSVPLLRAGPSDSNLDGTVTEMAIHAAAVLLCGQNELLEPLKNLAFSPATMAHAFLPTMPEDLLAQARRWKGLERVHWYTCPNGHPCSVGECGRPMEQSICIDCHAPIGGIDHKPRDGFHLVKDKADRTQTGHVLGNPQRRDVVTCDRGLPPVVFLLIRLLTHLALLLGASQSSQALINIIKPPVRDPKGFLQQHILKDLEQLAKMLGHSADETIGVVHLVLRRLLQEQHQLSSRRLLNFDTELSTKEMRNNWEKEIAAVISPELEHLDKTLPTMNNLISQDKRISSNPVAKIIYGDPVTFLPHLPRKSVVHCSKIWSCRKRITVEYLQHIVEQKNGKERVPILWHFLQKEAELRLVKFLPEILALQRDLVKQFQNVQQVEYSSIRGFLSKHSSDGLRQLLHNRITVFLSTWNKLRRSLETNGEINLPKDYCSTDLDLDTEFEILLPRRRGLGLCATALVSYLIRLHNEIVYAVEKLSKENNSYSVDAAEVTELHVISYEVERDLTPLILSNCQYQVEEGRETVQEFDLEKIQRQIVSRFLQGKPRLSLKGIPTLVYRHDWNYEHLFMDIKNKMAQDSLPSSVISAISGQLQSYSDACEVLSVVEVTLGFLSTAGGDPNMQLNVYTQDILQMGDQTIHVLKALNRCQLKHTIALWQFLSAHKSEQLLRLHKEPFGEISSRYKADLSPENAKLLSTFLNQTGLDAFLLELHEMIILKLKNPQTQTEERFRPQWSLRDTLVSYMQTKESEILPEMASQFPEEILLASCVSVWKTAAVLKWNREMR

SEQ ID NO: 62278 - protein, 1550 aa, Homo sapiens
MECPSCQHVSKEETPKFCSQCGERLPPAAPIADSENNNSTMASASEGEMECGQELKEEGGPCLFPGSDSWQENPEEPCSKASWTVQESKKKKRKKKKKGNKSASSELASLPLSPASPCHLTLLSNPWPQDTALPHSQAQQSGPTGQPSQPPGTATTPLEGDGLSAPTEVGDSPLQAQALGEAGVATGSEAQSSPQFQDHTEGEDQDASIPSGGRGLSQEGTGPPTSAGEGHSRTEDAAQELLLPESKGGSSEPGTELQTTEQQAGASASMAVDAVAEPANAVKGAGKEMKEKTQRMKQPPATTPPFKTHCQEAETKTKDEMAAAEEKVGKNEQGEPEDLKKPEGKNRSAAAVKNEKEQKNQEADVQEVKASTLSPGGGVTVFFHAIISLHFPFNPDLHKVFIRGGEEFGESKWDSNICELHYTRDLGHDRVLVEGIVCISKKHLDKYIPYKYVIYNGESFEYEFIYKHQQKKGEYVNRCLFIKSSLLGSGDWHQYYDIVYMKPHGRLQKVMNHITDGPRKDLVKGKQIAAALMLDSTFSILQTWDTINLNSFFTQFEQFCFVLQQPMIYEGQAQLWTDLQYREKEVKRYLWQHLKKHVVPLPDGKSTDFLPVDCPVRSKLKTGLIVLFVVEKIELLLEGSLDWLCHLLTSDASSPDEFHRDLSHILGIPQSWRLYLVNLCQRCMDTRTYTWLGALPVLHCCMELAPRHKDAWRQPEDTWAALEGLSFSPFREQMLDTSSLLQFMREKQHLLSIDEPLFRSWFSLLPLSHLVMYMENFIEHLGRFPAHILDCLSGIYYRLPGLEQVLNTQDVQDVQNVQNILEMLLRLLDTYRDKIPEEALSPSYLTVCLKLHEAICSSTKLLKFYELPALSAEIVCRMIRLLSLVDSAGQRDETGNNSVQTVFQGTLAATKRWLREVFTKNMLTSSGASFTYVKEIEVWRRLVEIQFPAEHGWKESLLGDMEWRLTKEEPLSQITAYCNSCWDTKGLEDSVAKTFEKCIIEAVSSACQSQTSILQGFSYSDLRKFGIVLSAVITKSWPRTADNFNDILKHLLTLADVKHVFRLCGTDEKILANVTEDAKRLIAVADSVLTKVVGDLLSGTILVGQLELIIKHKNQFLDIWQLREKSLSPQDEQCAVEEALDWRREELLLLKKEKRCVDSLLKMCGNVKHLIQVDFGVLAVRHSQDLSSKRLNDTVTVRLSTSSNSQRATHYHLSSQVQEMAGKIDLLRDSHIFQLFWREAAEPLSEPKEDQEAAELLSEPEEESERHILELEEVYDYLYQPSYRKFIKLHQDLKSGEVTLAEIDVIFKDFVNKYTDLDSELKIMCTVDHQDQRDWIKDRVEQIKEYHHLHQAVHAAKVILQVKESLGLNGDFSVLNTLLNFTDNFDDFRRETLDQINQELIQAKKLLQDISEARCKGLQALSLRKEFICWVREALGGINELKVFVDLASISAGENDIDVDRVACFHDAVQGYASLLFKLDPSVDFSAFMKHLKKLWKALDKDQYLPRKLVSLILSLMQILLNRALLSNVRAVTVEMVAHLCGRFVHSRFQ

SEQ ID NO: 62279 - protein, 5256 aa, Homo sapiens
MECPSCQHVSKEETPKFCSQCGERLPPAAPIADSENNNSTMASASEGEMECGQELKEEGGPCLFPGSDSWQENPEEPCSKASWTVQEGATSEVLVDAAVDLISDEWEAANAIPSKRRKQDAAPLEAASVPSADCEQSKKKKRKKKKKGNKSASSELASLPLSPASPCHLTLLSNPWPQDTALPHSQAQQSGPTGQPSQPPGTATTPLEGDGLSAPTEVGDSPLQAQALGEAGVATGSEAQSSPQFQDHTEGEDQDASIPSGGRGLSQEGTGPPTSAGEGHSRTEDAAQELLLPESKGGSSEPGTELQTTEQQAGASASMAVDAVAEPANAVKGAGKEMKEKTQRMKQPPATTPPFKTHCQEAETKTKDEMAAAEEKVGKNEQGEPEDLKKPEGKNRSAAAVKNEKEQKNQEADVQEVKASTLSPGGGVTVFFHAIISLHFPFNPDLHKVFIRGGEEFGESKWDSNICELHYTRDLGHDRVLVEGIVCISKKHLDKYIPYKYVIYNGESFEYEFIYKHQQKKGEYVNRCLFIKSSLLGSGDWHQYYDIVYMKPHGRLQKVMNHITDGPRKDLVKGKQIAAALMLDSTFSILQTWDTINLNSFFTQFEQFCFVLQQPMIYEGQAQLWTDLQYREKEVKRYLWQHLKKHVVPLPDGKSTDFLPVDCPVRSKLKTGLIVLFVVEKIELLLEGSLDWLCHLLTSDASSPDEFHRDLSHILGIPQSWRLYLVNLCQRCMDTRTYTWLGALPVLHCCMELAPRHKDAWRQPEDTWAALEGLSFSPFREQMLDTSSLLQFMREKQHLLSIDEPLFRSWFSLLPLSHLVMYMENFIEHLGRFPAHILDCLSGIYYRLPGLEQVLNTQDVQDVQNVQNILEMLLRLLDTYRDKIPEEALSPSYLTVCLKLHEAICSSTKLLKFYELPALSAEIVCRMIRLLSLVDSAGQRDETGNNSVQTVFQGTLAATKRWLREVFTKNMLTSSGASFTYVKEIEVWRRLVEIQFPAEHGWKESLLGDMEWRLTKEEPLSQITAYCNSCWDTKGLEDSVAKTFEKCIIEAVSSACQSQTSILQGFSYSDLRKFGIVLSAVITKSWPRTADNFNDILKHLLTLADVKHVFRLCGTDEKILANVTEDAKRLIAVADSVLTKVVGDLLSGTILVGQLELIIKHKNQFLDIWQLREKSLSPQDEQCAVEEALDWRREELLLLKKEKRCVDSLLKMCGNVKHLIQVDFGVLAVRHSQDLSSKRLNDTVTVRLSTSSNSQRATHYHLSSQVQEMAGKIDLLRDSHIFQLFWREAAEPLSEPKEDQEAAELLSEPEEESERHILELEEVYDYLYQPSYRKFIKLHQDLKSGEVTLAEIDVIFKDFVNKYTDLDSELKIMCTVDHQDQRDWIKDRVEQIKEYHHLHQAVHAAKVILQVKESLGLNGDFSVLNTLLNFTDNFDDFRRETLDQINQELIQAKKLLQDISEARCKGLQALSLRKEFICWVREALGGINELKVFVDLASISAGENDIDVDRVACFHDAVQGYASLLFKLDPSVDFSAFMKHLKKLWKALDKDQYLPRKLCDSARNLEWLKTVNESHGSVERSSLTLATAINQRGIYVIQAPKGGQKISPDTVLHLILPESPGSHEESREYSLEEVKELLNKLMLMSGKKDRNNTEVERFSEVFCSVQRLSQAFIDLHSAGNMLFRTWIAMAYCSPKQGVSLQMDFGLDLVTELKEGGDVTELLAALCRQMEHFLDSWKRFVTQKRMEHFYLNFYTAEQLVYLSTELRKQPPSDAALTMLSFIKSNCTLRDVLRASVGCGSEAARYRMRRVMEELPLMLLSEFSLVDKLRIIMEQSMRCLPAFLPDCLDLETLGHCLAHLAGMGGSPVERCLPRGLQVGQPNLVVCGHSEVLPAALAVYMQTPSQPLPTYDEVLLCTPATTFEEVALLLRRCLTLGSLGHKVYSLLFADQLSYEVARQAEELFHNLCTQQHREDYQLVMVCDGDWEHCYLPSAFSQHKVFVTPQAPLEAIQAYLAGHYRVPKQTLSAAAVFNDRLCVGIVASERAGVGKSLYVKRLHDKMKMQLNVKNVPLKTIRLIDPQVDESRVLGALLPFLDAQYQKVPVLFHLDVTSSVQTGIWVFLFKLLILQYLMDINGKMWLRNPCHLYIVEILERRTSVPSRSSSALRTRVPQFSFLDIFPKVTCRPPKEVIDMELSALRSDTEPGMDLWEFCSETFQRPYQYLRRFNQNQDLDTFQYQEGSVEGTPEECLQHFLFHCGVINPSWSELRNFARFLNYQLRDCEASLFCNPSFIGDTLRGFKKFVVTFMIFMARDFATPSLHTSDQSPGKHMVTMDGVREEDLAPFSLRKRWESEPHPYVFFNDDHTTMTFIGFHLQPNINGSVDAISHLTGKVIKRDVMTRDLYQGLLLQRVPFNVDFDKLPRHKKLERLCLTLGIPQATDPDKTYELTTDNMLKILAIEMRFRCGIPVIIMGETGCGKTRLIKFLSDLRRGGTNADTIKLVKVHGGTTADMIYSRVREAENVAFANKDQHQLDTILFFDEANTTEAISCIKEVLCDHMVDGQPLAEDSGLHIIAACNPYRKHSEEMICRLESAGLGYRVSMEETADRLGSIPLRQLVYRVHALPPSLIPLVWDFGQLSDVAEKLYIQQIVQRLVESISLDENGTRVITEVLCASQGFMRKTEDECSFVSLRDVERCVKVFRWFHEHSAMLLAQLNAFLSKSSVSKNHTERDPVLWSLMLAIGVCYHASLEKKDSYRKAIARFFPKPYDDSRLLLDEITRAQDLFLDGVPLRKTIAKNLALKENVFMMVVCIELKIPLFLVGKPGSSKSLAKTIVADAMQGPAAYSDLFRSLKQVHLVSFQCSPHSTPQGIISTFRQCARFQQGKDLQQYVSVVVLDEVGLAEDSPKMPLKTLHPLLEDGCIEDDPAPHKKVGFVGISNWALDPAKMNRGIFVSRGSPNETELIESAKGICSSDILVQDRVQGYFASFAKAYETVCKRQDKEFFGLRDYYSLIKMVFAAAKASNRKPSPQDIAQAVLRNFSGKDDIQALDIFLANLPEAKCSEEVSPMQLIKQNIFGPSQKVPGGEQEDAESRYLLVLTKNYVALQILQQTFFEGDQQPEIIFGSGFPKDQEYTQLCRNINRVKICMETGKMVLLLNLQNLYESLYDALNQYYVHLGGQKYVDLGLGTHRVKCRVHPNFRLIVIEEKDVVYKHFPIPLINRLEKHYLDINTVLEKWQKSIVEELCAWVEKFINVKAHHFQKRHKYSPSDVFIGYHSDACASVVLQVIERQGPRALTEELHQKVSEEAKSILLNCATPDAVVRLSAYSLGGFAAEWLSQEYFHRQRHNSFADFLQAHLHTADLERHAIFTEITTFSRLLTSHDCEILESEVTGRAPKPTLLWLQQFDTEYSFLKEVRNCLTNTAKCKILIFQTDFEDGIRSAQLIASAKYSVINEINKIRENEDRIFVYFITKLSRVGRGTAYVGFHGGLWQSVHIDDLRRSTLMVSDVTRLQHVTISQLFAPGDLPELGLEHRAEDGHEEAMETEASTSGEVAEVAEEAMETESSEKVGKETSELGGSDVSILDTTRLLRSCVQSAVGMLRDQNESCTRNMRRVVLLLGLLNEDDACHASFLRVSKMRLSVFLKKQEESQFHPLEWLAREACNQDALQEAGTFRHTLWKRVQGAVTPLLASMISFIDRDGNLELLTRPDTPPWARDLWMFIFSDTMLLNIPLVMNNERHKGEMAYIVVQNHMNLSENASNNVPFSWKIKDYLEELWVQAQYITDAEGLPKKFVDIFQQTPLGRFLAQLHGEPQQELLQCYLKDFILLTMRVSTEEELKFLQMALWSCTRKLKAASEAPEEEVSLPWVHLAYQRFRSRLQNFSRILTIYPQVLHSLMEARWNHELAGCEMTLDAFAAMACTEMLTRNTLKPSPQAWLQLVKNLSMPLELICSDEHMQGSGSLAQAVIREVRAQWSRIFSTALFVEHVLLGTESRVPELQGLVTEHVFLLDKCLRENSDVKTHGPFEAVMRTLCECKETASKTLSRFGIQPCSICLGDAKDPVCLPCDHVHCLRCLRAWFASEQMICPYCLTALPDEFSPAVSQAHREAIEKHARFRQMCNSFFVDLVSTICFKDNAPPEKEVIESLLSLLFVQKGRLRDAAQRHCEHTKSLSPFNDVVDKTPVIRSVILKLLLKYSFHDVKDYIQEYLTLLKKKAFITEDKTELYMLFINCLEDSILEKTSAYSRNDELNHLEEEGRFLKAYSPASRGREPANEASVEYLQEVARIRLCLDRAADFLSEPEGGPEMAKEKQCYLQQVKQFCIRVENDWHRVYLVRKLSSQRGMEFVQGLSKPGRPHQWVFPKDVVKQQGLRQDHPGQMDRYLVYGDEYKALRDAVAKAVLECKPLGIKTALKACKTPQSQQSAYFLLTLFREVAILYRSHNASLHPTPEQCEAVSKFIGECKILSPPDISRFATSLVDNSVPLLRAGPSDSNLDGTVTEMAIHAAAVLLCGQNELLEPLKNLAFSPATMAHAFLPTMPEDLLAQARRWKGLERVHWYTCPNGHPCSVGECGRPMEQSICIDCHAPIGGIDHKPRDGFHLVKDKADRTQTGHVLGNPQRRDVVTCDRGLPPVVFLLIRLLTHLALLLGASQSSQALINIIKPPVRDPKGFLQQHILKDLEQLAKMLGHSADETIGVVHLVLRRLLQEQHQLSSRRLLNFDTELSTKEMRNNWEKEIAAVISPELEHLDKTLPTMNNLISQDKRISSNPVAKIIYGDPVTFLPHLPRKSVVHCSKIWSCRKRITVEYLQHIVEQKNGKERVPILWHFLQKEAELRLVKFLPEILALQRDLVKQFQNVQQVEYSSIRGFLSKHSSDGLRQLLHNRITVFLSTWNKLRRSLETNGEINLPKDYCSTDLDLDTEFEILLPRRRGLGLCATALVSYLIRLHNEIVYAVEKLSKENNSYSVDAAEVTELHVISYEVERDLTPLILSNCQYQVEEGRETVQEFDLEKIQRQIVSRFLQGKPRLSLKGIPTLVYRHDWNYEHLFMDIKNKMAQDSLPSSVISAISGQLQSYSDACEVLSVVEVTLGFLSTAGGDPNMQLNVYTQDILQMGDQTIHVLKALNRCQLKHTIALWQFLSAHKSEQLLRLHKEPFGEISSRYKADLSPENAKLLSTFLNQTGLDAFLLELHEMIILKLKNPQTQTEERFRPQWSLRDTLVSYMQTKESEILPEMASQFPEEILLASCVSVWKTAAVLKWNREMR

SEQ ID NO: 62280 - protein, 5207 aa, Homo sapiens
MECPSCQHVSKEETPKFCSQCGERLPPAAPIADSENNNSTMASASEGEMECGQELKEEGGPCLFPGSDSWQENPEEPCSKASWTVQESKKKKRKKKKKGNKSASSELASLPLSPASPCHLTLLSNPWPQDTALPHSQAQQSGPTGQPSQPPGTATTPLEGDGLSAPTEVGDSPLQAQALGEAGVATGSEAQSSPQFQDHTEGEDQDASIPSGGRGLSQEGTGPPTSAGEGHSRTEDAAQELLLPESKGGSSEPGTELQTTEQQAGASASMAVDAVAEPANAVKGAGKEMKEKTQRMKQPPATTPPFKTHCQEAETKTKDEMAAAEEKVGKNEQGEPEDLKKPEGKNRSAAAVKNEKEQKNQEADVQEVKASTLSPGGGVTVFFHAIISLHFPFNPDLHKVFIRGGEEFGESKWDSNICELHYTRDLGHDRVLVEGIVCISKKHLDKYIPYKYVIYNGESFEYEFIYKHQQKKGEYVNRCLFIKSSLLGSGDWHQYYDIVYMKPHGRLQKVMNHITDGPRKDLVKGKQIAAALMLDSTFSILQTWDTINLNSFFTQFEQFCFVLQQPMIYEGQAQLWTDLQYREKEVKRYLWQHLKKHVVPLPDGKSTDFLPVDCPVRSKLKTGLIVLFVVEKIELLLEGSLDWLCHLLTSDASSPDEFHRDLSHILGIPQSWRLYLVNLCQRCMDTRTYTWLGALPVLHCCMELAPRHKDAWRQPEDTWAALEGLSFSPFREQMLDTSSLLQFMREKQHLLSIDEPLFRSWFSLLPLSHLVMYMENFIEHLGRFPAHILDCLSGIYYRLPGLEQVLNTQDVQDVQNVQNILEMLLRLLDTYRDKIPEEALSPSYLTVCLKLHEAICSSTKLLKFYELPALSAEIVCRMIRLLSLVDSAGQRDETGNNSVQTVFQGTLAATKRWLREVFTKNMLTSSGASFTYVKEIEVWRRLVEIQFPAEHGWKESLLGDMEWRLTKEEPLSQITAYCNSCWDTKGLEDSVAKTFEKCIIEAVSSACQSQTSILQGFSYSDLRKFGIVLSAVITKSWPRTADNFNDILKHLLTLADVKHVFRLCGTDEKILANVTEDAKRLIAVADSVLTKVVGDLLSGTILVGQLELIIKHKNQFLDIWQLREKSLSPQDEQCAVEEALDWRREELLLLKKEKRCVDSLLKMCGNVKHLIQVDFGVLAVRHSQDLSSKRLNDTVTVRLSTSSNSQRATHYHLSSQVQEMAGKIDLLRDSHIFQLFWREAAEPLSEPKEDQEAAELLSEPEEESERHILELEEVYDYLYQPSYRKFIKLHQDLKSGEVTLAEIDVIFKDFVNKYTDLDSELKIMCTVDHQDQRDWIKDRVEQIKEYHHLHQAVHAAKVILQVKESLGLNGDFSVLNTLLNFTDNFDDFRRETLDQINQELIQAKKLLQDISEARCKGLQALSLRKEFICWVREALGGINELKVFVDLASISAGENDIDVDRVACFHDAVQGYASLLFKLDPSVDFSAFMKHLKKLWKALDKDQYLPRKLCDSARNLEWLKTVNESHGSVERSSLTLATAINQRGIYVIQAPKGGQKISPDTVLHLILPESPGSHEESREYSLEEVKELLNKLMLMSGKKDRNNTEVERFSEVFCSVQRLSQAFIDLHSAGNMLFRTWIAMAYCSPKQGVSLQMDFGLDLVTELKEGGDVTELLAALCRQMEHFLDSWKRFVTQKRMEHFYLNFYTAEQLVYLSTELRKQPPSDAALTMLSFIKSNCTLRDVLRASVGCGSEAARYRMRRVMEELPLMLLSEFSLVDKLRIIMEQSMRCLPAFLPDCLDLETLGHCLAHLAGMGGSPVERCLPRGLQVGQPNLVVCGHSEVLPAALAVYMQTPSQPLPTYDEVLLCTPATTFEEVALLLRRCLTLGSLGHKVYSLLFADQLSYEVARQAEELFHNLCTQQHREDYQLVMVCDGDWEHCYLPSAFSQHKVFVTPQAPLEAIQAYLAGHYRVPKQTLSAAAVFNDRLCVGIVASERAGVGKSLYVKRLHDKMKMQLNVKNVPLKTIRLIDPQVDESRVLGALLPFLDAQYQKVPVLFHLDVTSSVQTGIWVFLFKLLILQYLMDINGKMWLRNPCHLYIVEILERRTSVPSRSSSALRTRVPQFSFLDIFPKVTCRPPKEVIDMELSALRSDTEPGMDLWEFCSETFQRPYQYLRRFNQNQDLDTFQYQEGSVEGTPEECLQHFLFHCGVINPSWSELRNFARFLNYQLRDCEASLFCNPSFIGDTLRGFKKFVVTFMIFMARDFATPSLHTSDQSPGKHMVTMDGVREEDLAPFSLRKRWESEPHPYVFFNDDHTTMTFIGFHLQPNINGSVDAISHLTGKVIKRDVMTRDLYQGLLLQRVPFNVDFDKLPRHKKLERLCLTLGIPQATDPDKTYELTTDNMLKILAIEMRFRCGIPVIIMGETGCGKTRLIKFLSDLRRGGTNADTIKLVKVHGGTTADMIYSRVREAENVAFANKDQHQLDTILFFDEANTTEAISCIKEVLCDHMVDGQPLAEDSGLHIIAACNPYRKHSEEMICRLESAGLGYRVSMEETADRLGSIPLRQLVYRVHALPPSLIPLVWDFGQLSDVAEKLYIQQIVQRLVESISLDENGTRVITEVLCASQGFMRKTEDECSFVSLRDVERCVKVFRWFHEHSAMLLAQLNAFLSKSSVSKNHTERDPVLWSLMLAIGVCYHASLEKKDSYRKAIARFFPKPYDDSRLLLDEITRAQDLFLDGVPLRKTIAKNLALKENVFMMVVCIELKIPLFLVGKPGSSKSLAKTIVADAMQGPAAYSDLFRSLKQVHLVSFQCSPHSTPQGIISTFRQCARFQQGKDLQQYVSVVVLDEVGLAEDSPKMPLKTLHPLLEDGCIEDDPAPHKKVGFVGISNWALDPAKMNRGIFVSRGSPNETELIESAKGICSSDILVQDRVQGYFASFAKAYETVCKRQDKEFFGLRDYYSLIKMVFAAAKASNRKPSPQDIAQAVLRNFSGKDDIQALDIFLANLPEAKCSEEVSPMQLIKQNIFGPSQKVPGGEQEDAESRYLLVLTKNYVALQILQQTFFEGDQQPEIIFGSGFPKDQEYTQLCRNINRVKICMETGKMVLLLNLQNLYESLYDALNQYYVHLGGQKYVDLGLGTHRVKCRVHPNFRLIVIEEKDVVYKHFPIPLINRLEKHYLDINTVLEKWQKSIVEELCAWVEKFINVKAHHFQKRHKYSPSDVFIGYHSDACASVVLQVIERQGPRALTEELHQKVSEEAKSILLNCATPDAVVRLSAYSLGGFAAEWLSQEYFHRQRHNSFADFLQAHLHTADLERHAIFTEITTFSRLLTSHDCEILESEVTGRAPKPTLLWLQQFDTEYSFLKEVRNCLTNTAKCKILIFQTDFEDGIRSAQLIASAKYSVINEINKIRENEDRIFVYFITKLSRVGRGTAYVGFHGGLWQSVHIDDLRRSTLMVSDVTRLQHVTISQLFAPGDLPELGLEHRAEDGHEEAMETEASTSGEVAEVAEEAMETESSEKVGKETSELGGSDVSILDTTRLLRSCVQSAVGMLRDQNESCTRNMRRVVLLLGLLNEDDACHASFLRVSKMRLSVFLKKQEESQFHPLEWLAREACNQDALQEAGTFRHTLWKRVQGAVTPLLASMISFIDRDGNLELLTRPDTPPWARDLWMFIFSDTMLLNIPLVMNNERHKGEMAYIVVQNHMNLSENASNNVPFSWKIKDYLEELWVQAQYITDAEGLPKKFVDIFQQTPLGRFLAQLHGEPQQELLQCYLKDFILLTMRVSTEEELKFLQMALWSCTRKLKAASEAPEEEVSLPWVHLAYQRFRSRLQNFSRILTIYPQVLHSLMEARWNHELAGCEMTLDAFAAMACTEMLTRNTLKPSPQAWLQLVKNLSMPLELICSDEHMQGSGSLAQAVIREVRAQWSRIFSTALFVEHVLLGTESRVPELQGLVTEHVFLLDKCLRENSDVKTHGPFEAVMRTLCECKETASKTLSRFGIQPCSICLGDAKDPVCLPCDHVHCLRCLRAWFASEQMICPYCLTALPDEFSPAVSQAHREAIEKHARFRQMCNSFFVDLVSTICFKDNAPPEKEVIESLLSLLFVQKGRLRDAAQRHCEHTKSLSPFNDVVDKTPVIRSVILKLLLKYSFHDVKDYIQEYLTLLKKKAFITEDKTELYMLFINCLEDSILEKTSAYSRNDELNHLEEEGRFLKAYSPASRGREPANEASVEYLQEVARIRLCLDRAADFLSEPEGGPEMAKEKQCYLQQVKQFCIRVENDWHRVYLVRKLSSQRGMEFVQGLSKPGRPHQWVFPKDVVKQQGLRQDHPGQMDRYLVYGDEYKALRDAVAKAVLECKPLGIKTALKACKTPQSQQSAYFLLTLFREVAILYRSHNASLHPTPEQCEAVSKFIGECKILSPPDISRFATSLVDNSVPLLRAGPSDSNLDGTVTEMAIHAAAVLLCGQNELLEPLKNLAFSPATMAHAFLPTMPEDLLAQARRWKGLERVHWYTCPNGHPCSVGECGRPMEQSICIDCHAPIGGIDHKPRDGFHLVKDKADRTQTGHVLGNPQRRDVVTCDRGLPPVVFLLIRLLTHLALLLGASQSSQALINIIKPPVRDPKGFLQQHILKDLEQLAKMLGHSADETIGVVHLVLRRLLQEQHQLSSRRLLNFDTELSTKEMRNNWEKEIAAVISPELEHLDKTLPTMNNLISQDKRISSNPVAKIIYGDPVTFLPHLPRKSVVHCSKIWSCRKRITVEYLQHIVEQKNGKERVPILWHFLQKEAELRLVKFLPEILALQRDLVKQFQNVQQVEYSSIRGFLSKHSSDGLRQLLHNRITVFLSTWNKLRRSLETNGEINLPKDYCSTDLDLDTEFEILLPRRRGLGLCATALVSYLIRLHNEIVYAVEKLSKENNSYSVDAAEVTELHVISYEVERDLTPLILSNCQYQVEEGRETVQEFDLEKIQRQIVSRFLQGKPRLSLKGIPTLVYRHDWNYEHLFMDIKNKMAQDSLPSSVISAISGQLQSYSDACEVLSVVEVTLGFLSTAGGDPNMQLNVYTQDILQMGDQTIHVLKALNRCQLKHTIALWQFLSAHKSEQLLRLHKEPFGEISSRYKADLSPENAKLLSTFLNQTGLDAFLLELHEMIILKLKNPQTQTEERFRPQWSLRDTLVSYMQTKESEILPEMASQFPEEILLASCVSVWKTAAVLKWNREMR

SEQ ID NO: 62281 - protein, 923 aa, Homo sapiens
MEEGNNNEEVIHLNNFHCHRGQEWINLRDGPITISDSSDEERIPMLVTPAPQQHEEEDLDDDVILTETNKPQRSRPNLIKPAAQWQDLKRLGEERPKKSRAAFESDKSSYFSVCNNPLFDSGAQDDSEDDYGEFLDLGPPGISEFTKPSGQTEREPKPGPSHNQAANDIVNPRSEQKVIILEEGSLLYTESDPLETQNQSSEDSETELLSNLGESAALADDQAIEEDCWLDHPYFQSLNQQPREITNQVVPQERQPEAELGRLLFQHEFPGPAFPRPEPQQGGISGPSSPQPAHPLGEFEDQQLASDDEEPGPAFPMQESQEPNLENIWGQEAAEVDQELVELLVKETEARFPDVANGFIEEIIHFKNYYDLNVLCNFLLENPDYPKREDRIIINPSSSLLASQDETKLPKIDFFDYSKLTPLDQRCFIQAADLLMADFKVLSSQDIKWALHELKGHYAITRKALSDAIKKWQELSPETSGKRKKRKQMNQYSYIDFKFEQGDIKIEKRMFFLENKRRHCRSYDRRALLPAVQQEQEFYEQKIKEMAEHEDFLLALQMNEEQYQKDGQLIECRCCYGEFPFEELTQCADAHLFCKECLIRYAQEAVFGSGKLELSCMEGSCTCSFPTSELEKVLPQTILYKYYERKAEEEVAAAYADELVRCPSCSFPALLDSDVKRFSCPNPHCRKETCRKCQGLWKEHNGLTCEELAEKDDIKYRTSIEEKMTAARIRKCHKCGTGLIKSEGCNRMSCRCGAQMCYLCRVSINGYDHFCQHPRSPGAPCQECSRCSLWTDPTEDDEKLIEEIQKEAEEEQKRKNGENTFKRIGPPLEKPVEKVQRVEALPRPVPQNLPQPQMPPYAFAHPPFPLPPVRPVFNNFPLNMGPIPAPYVPPLPNVRVNYDFGPIHMPLEHNLPMHFGPQPRHRF

SEQ ID NO: 62282 - protein, 20 aa, Homo sapiens
MEEGNNNEEVIHLNNFHCHR

SEQ ID NO: 62283 - protein, 866 aa, Homo sapiens
MEEGNNNEEVIHLNNFHCHRGQEWINLRDGPITISDSSDEERIPMLVTPAPQQHEEEDLDDDVILTEDDSEDDYGEFLDLGPPGISEFTKPSGQTEREPKPGPSHNQAANDIVNPRSEQKVIILEEGSLLYTESDPLETQNQSSEDSETELLSNLGESAALADDQAIEEDCWLDHPYFQSLNQQPREITNQVVPQERQPEAELGRLLFQHEFPGPAFPRPEPQQGGISGPSSPQPAHPLGEFEDQQLASDDEEPGPAFPMQESQEPNLENIWGQEAAEVDQELVELLVKETEARFPDVANGFIEEIIHFKNYYDLNVLCNFLLENPDYPKREDRIIINPSSSLLASQDETKLPKIDFFDYSKLTPLDQRCFIQAADLLMADFKVLSSQDIKWALHELKGHYAITRKALSDAIKKWQELSPETSGKRKKRKQMNQYSYIDFKFEQGDIKIEKRMFFLENKRRHCRSYDRRALLPAVQQEQEFYEQKIKEMAEHEDFLLALQMNEEQYQKDGQLIECRCCYGEFPFEELTQCADAHLFCKECLIRYAQEAVFGSGKLELSCMEGSCTCSFPTSELEKVLPQTILYKYYERKAEEEVAAAYADELVRCPSCSFPALLDSDVKRFSCPNPHCRKETCRKCQGLWKEHNGLTCEELAEKDDIKYRTSIEEKMTAARIRKCHKCGTGLIKSEGCNRMSCRCGAQMCYLCRVSINGYDHFCQHPRSPGAPCQECSRCSLWTDPTEDDEKLIEEIQKEAEEEQKRKNGENTFKRIGPPLEKPVEKVQRVEALPRPVPQNLPQPQMPPYAFAHPPFPLPPVRPVFNNFPLNMGPIPAPYVPPLPNVRVNYDFGPIHMPLEHNLPMHFGPQPRHRF

SEQ ID NO: 62284 - protein, 678 aa, Homo sapiens
MEEGNNNEEVIHLNNFHCHRGQEWINLRDGPITISDSSDEERIPMLVTPAPQQHEEEDLDDDVILTETNKPQRSRPNLIKPAAQWQEAAEVDQELVELLVKETEARFPDVANGFIEEIIHFKNYYDLNVLCNFLLENPDYPKREDRIIINPSSSLLASQDETKLPKIDFFDYSKLTPLDQRCFIQAADLLMADFKVLSSQDIKWALHELKGHYAITRKALSDAIKKWQELSPETSGKRKKRKQMNQYSYIDFKFEQGDIKIEKRMFFLENKRRHCRSYDRRALLPAVQQEQEFYEQKIKEMAEHEDFLLALQMNEEQYQKDGQLIECRCCYGEFPFEELTQCADAHLFCKECLIRYAQEAVFGSGKLELSCMEGSCTCSFPTSELEKVLPQTILYKYYERKAEEEVAAAYADELVRCPSCSFPALLDSDVKRFSCPNPHCRKETCRKCQGLWKEHNGLTCEELAEKDDIKYRTSIEEKMTAARIRKCHKCGTGLIKSEGCNRMSCRCGAQMCYLCRVSINGYDHFCQHPRSPGAPCQECSRCSLWTDPTEDDEKLIEEIQKEAEEEQKRKNGENTFKRIGPPLEKPVEKVQRVEALPRPVPQNLPQPQMPPYAFAHPPFPLPPVRPVFNNFPLNMGPIPAPYVPPLPNVRVNYDFGPIHMPLEHNLPMHFGPQPRHRF

SEQ ID NO: 62285 - protein, 148 aa, Homo sapiens
MSSDFPHYNFRMPNIGFQNLPLNIYIVVFGTAIFVFILSLLFCCYLIRLRHQAHKEFYAYKQVILKEKVKELNLHELCAVCLEDFKPRDELGICPCKHAFHRKCLIKWLEVRKVCPLCNMPVLQLAQLHSKQDRGPPQGPLPGAENIV

SEQ ID NO: 62286 - protein, 148 aa, Homo sapiens; identical to SEQ ID NO: 62285

SEQ ID NO: 62287 - protein, 169 aa, Homo sapiens
MLNKSGESRYPALFPVLGGSSMSSDFPHYNFRMPNIGFQNLPLNIYIVVFGTAIFVFILSLLFCCYLIRLRHQAHKEFYAYKQVILKEKVKELNLHELCAVCLEDFKPRDELGICPCKHAFHRKCLIKWLEVRKVCPLCNMPVLQLAQLHSKQDRGPPQGPLPGAENIV

SEQ ID NO: 62288 - protein, 169 aa, Homo sapiens; identical to SEQ ID NO: 62287

SEQ ID NO: 62289 - protein, 433 aa, Homo sapiens
MEAVYLVVNGLGLVLDVLTLVLDLNFLLVSSLLASLAWLLAFVYNLPHTVLTSLLHLGRGVLLSLLALIEAVVRFTCGGLQALCTLLYSCCSGLESLKLLGHLASHGALRSREILHRGVLNVVSSGHALLRQACDICAIAMSLVAYVINSLVNICLIGTQNLFSLVLALWDAVTGPLWRMTDVVAAFLAHISSSAVAMAILLWTPCQLALELLASAARLLASFVLVNLTGLVLLACVLAVTVTVLHPDFTLRLATQALSQLHARPSYHRLREDVMRLSRLALGSEAWRRVWSRSLQLASWPNRGGAPGAPQGDPMRVFSVRTRRQDTLPEAGRRSEAEEEEARTIRVTPVRGRERLNEEEPPGGQDPWKLLKEQEERKKCVICQDQSKTVLLLPCRHLCLCQACTEILMRHPVYHRNCPLCRRGILQTLNVYL

SEQ ID NO: 62290 - protein, 1072 aa, Homo sapiens
MPGEEEERAFLVAREELASALRRDSGQAFSLEQLRPLLASSLPLAARYLQLDAARLVRCNAHGEPRNYLNTLSTALNILEKYGRNLLSPQRPRYWRGVKFNNPVFRSTVDAVQGGRDVLRLYGYTEEQPDGLSFPEGQEEPDEHQVATVTLEVLLLRTELSLLLQNTHPRQQALEQLLEDKVEDDMLQLSEFDPLLREIAPGPLTTPSVPGSTPGPCFLCGSAPGTLHCPSCKQALCPACDHLFHGHPSRAHHLRQTLPGVLQGTHLSPSLPASAQPRPQSTSLLALGDSSLSSPNPASAHLPWHCAACAMLNEPWAVLCVACDRPRGCKGLGLGTEGPQGTGGLEPDLARGRWACQSCTFENEAAAVLCSICERPRLAQPPSLVVDSRDAGICLQPLQQGDALLASAQSQVWYCIHCTFCNSSPGWVCVMCNRTSSPIPAQHAPRPYASSLEKGPPKPGPPRRLSAPLPSSCGDPEKQRQDKMREEGLQLVSMIREGEAAGACPEEIFSALQYSGTEVPLQWLRSELPYVLEMVAELAGQQDPGLGAFSCQEARRAWLDRHGNLDEAVEECVRTRRRKVQELQSLGFGPEEGSLQALFQHGGDVSRALTELQRQRLEPFRQRLWDSGPEPTPSWDGPDKQSLVRRLLAVYALPSWGRAELALSLLQETPRNYELGDVVEAVRHSQDRAFLRRLLAQECAVCGWALPHNRMQALTSCECTICPDCFRQHFTIALKEKHITDMVCPACGRPDLTDDTQLLSYFSTLDIQLRESLEPDAYALFHKKLTEGVLMRDPKFLWCAQCSFGFIYEREQLEATCPQCHQTFCVRCKRQWEEQHRGRSCEDFQNWKRMNDPEYQAQGLAMYLQENGIDCPKCKFSYALARGGCMHFHCTQCRHQFCSGCYNAFYAKNKCPEPNCRVKKSLHGHHPRDCLFYLRDWTALRLQKLLQDNNVMFNTEPPAGARAVPGGGCRVIEQKEVPNGLRDEACGKETPAGYAGLCQAHYKEYLVSLINAHSLDPATLYEVEELETATERYLHVRPQPLAGEDPPAYQARLLQKLTEEVPLGQSIPRRRK

SEQ ID NO: 62291 - protein, 505 aa, Homo sapiens
MPGEEEERAFLVAREELASALRRDSGQAFSLEQLRPLLASSLPLAARYLQLDAARLVRCNAHGEPRNYLNTLPTPSWDGPDKQSLVRRLLAVYALPSWGRAELALSLLQETPRNYELGDVVEAVRHSQDRAFLRRLLAQECAVCGWALPHNRMQALTSCECTICPDCFRQHFTIALKEKHITDMVCPACGRPDLTDDTQLLSYFSTLDIQLRESLEPDAYALFHKKLTEGVLMRDPKFLWCAQCSFGFIYEREQLEATCPQCHQTFCVRCKRQCEDFQNWKRMNDPEYQAQGLAMYLQENGIDCPKCKFSYALARGGCMHFHCTQCRHQFCSGCYNAFYAKNKCPEPNCRVKKSLHGHHPRDCLFYLRDWTALRLQKLLQDNNVMFNTEPPAGARAVPGGGCRVIEQKEVPNGLRDEACGKETPAGYAGLCQAHYKEYLVSLINAHSLDPATLYEVEELETATERYLHVRPQPLAGEDPPAYQARLLQKLTEEVPLGQSIPRRRK

SEQ ID NO: 62292 - protein, 921 aa, Homo sapiens
MDLCTRAGEPSLTQNTHPRQQALEQLLEDKVEDDMLQLSEFDPLLREIAPGPLTTPSVPGSTPGPCFLCGSAPGTLHCPSCKQALCPACDHLFHGHPSRAHHLRQTLPGVLQGTHLSPSLPASAQPRPQSTSLLALGDSSLSSPNPASAHLPWHCAACAMLNEPWAVLCVACDRPRGCKGLGLGTEGPQGTGGLEPDLARGRWACQSCTFENEAAAVLCSICERPRLAQPPSLVVDSRDAGICLQPLQQGDALLASAQSQVWYCIHCTFCNSSPGWVCVMCNRTSSPIPAQHAPRPYASSLEKGPPKPGPPRRLSAPLPSSCGDPEKQRQDKMREEGLQLVSMIREGEAAGACPEEIFSALQYSGTEVPLQWLRSELPYVLEMVAELAGQQDPGLGAFSCQEARRAWLDRHGNLDEAVEECVRTRRRKVQELQSLGFGPEEGSLQALFQHGGDVSRALTELQRQRLEPFRQRLWDSGPEPTPSWDGPDKQSLVRRLLAVYALPSWGRAELALSLLQETPRNYELGDVVEAVRHSQDRAFLRRLLAQECAVCGWALPHNRMQALTSCECTICPDCFRQHFTIALKEKHITDMVCPACGRPDLTDDTQLLSYFSTLDIQLRESLEPDAYALFHKKLTEGVLMRDPKFLWCAQCSFGFIYEREQLEATCPQCHQTFCVRCKRQWEEQHRGRSCEDFQNWKRMNDPEYQAQGLAMYLQENGIDCPKCKFSYALARGGCMHFHCTQCRHQFCSGCYNAFYAKNKCPEPNCRVKKSLHGHHPRDCLFYLRDWTALRLQKLLQDNNVMFNTEPPAGARAVPGGGCRVIEQKEVPNGLRDEACGKETPAGYAGLCQAHYKEYLVSLINAHSLDPATLYEVEELETATERYLHVRPQPLAGEDPPAYQARLLQKLTEEVPLGQSIPRRRK

SEQ ID NO: 62293 - protein, 170 aa, Homo sapiens
MPGEEEERAFLVAREELASALRRDSGQAFSLEQLRPLLASSLPLAARYLQLDAARLVRCNAHGEPRNYLNTLSTALNILEKYGRNLLSPQRPRYWRGVKFNNPVFRSTVDAVQGGRDVLRLYGYTEEQPDGLSFPEGQEEPDEHQVATVTLEVLLLRTELSLLLQNTHPR

SEQ ID NO: 62294 - protein, 56 aa, Homo sapiens
MPGEEEERAFLVAREELASALRRDSGQAFSLEQLRPLLASSLPLAARYLQLDAARL

SEQ ID NO: 62295 - protein, 373 aa, Homo sapiens
MRKAGATSMWASCCGLLNEVMGTGAVRGQQSAFAGATGPFRFTPNPEFSTYPPAATEGPNIVCKACGLSFSVFRKKHVCCDCKKDFCSVCSVLQENLRRCSTCHLLQETAFQRPQLMRLKVKDLRQYLILRNIPIDTCREKEDLVDLVLCHHGLGSEDDMDTSSLNSSRSQTSSFFTRSFFSNYTAPSATMSSFQGELMDGDQTSRSGVPAQVQSEITSANTEDDDDDDDEDDDDEEENAEDRNPGLSKERVRASLSDLSSLDDVEGMSVRQLKEILARNFVNYSGCCEKWELVEKVNRLYKENEENQKSYGERLQLQDEEDDSLCRICMDAVIDCVLLECGHMVTCTKCGKRMSECPICRQYVVRAVHVFKS

SEQ ID NO: 62296 - protein, 372 aa, Homo sapiens
MKAGATSMWASCCGLLNEVMGTGAVRGQQSAFAGATGPFRFTPNPEFSTYPPAATEGPNIVCKACGLSFSVFRKKHVCCDCKKDFCSVCSVLQENLRRCSTCHLLQETAFQRPQLMRLKVKDLRQYLILRNIPIDTCREKEDLVDLVLCHHGLGSEDDMDTSSLNSSRSQTSSFFTRSFFSNYTAPSATMSSFQGELMDGDQTSRSGVPAQVQSEITSANTEDDDDDDDEDDDDEEENAEDRNPGLSKERVRASLSDLSSLDDVEGMSVRQLKEILARNFVNYSGCCEKWELVEKVNRLYKENEENQKSYGERLQLQDEEDDSLCRICMDAVIDCVLLECGHMVTCTKCGKRMSECPICRQYVVRAVHVFKS

SEQ ID NO: 62297 - protein, 373 aa, Homo sapiens; identical to SEQ ID NO: 62295

SEQ ID NO: 62298 - protein, 515 aa, Homo sapiens
MACKISPGANSASLPGHPNKVICERVRLQSLFPLLPSDQNTTVQEDAHFKAFFQSEDSPSPKRQRLSHSVFDYTSASPAPSPPMRPWEMTSNRQPPSVRPSQHHFSGERCNTPARNRRSPPVRRQRGRRDRLSRHNSISQDENYHHLPYAQQQAIEEPRAFHPPNVSPRLLHPAAHPPQQNAVMVDIHDQLHQGTVPVSYTVTTVAPHGIPLCTGQHIPACSTQQVPGCSVVFSGQHLPVCSVPPPMLQACSVQHLPVPYAAFPPLISSDPFLIHPPHLSPHHPPHLPPPGQFVPFQTQQSRSPLQRIENEVELLGEHLPVGGFTYPPSAHPPTLPPSAPLQFLTHDPLHQEVSFGVPYPPFMPRRLTGRSRYRSQQPIPPPPYHPSLLPYVLSMLPVPPAVGPTFSFELDVEDGEVENYEALLNLAERLGEAKPRGLTKADIEQLPSYRFNPNNHQSEQTLCVVCMCDFESRQLLRVLPCNHEFHAKCVDKWLKANRTCPICRADASEVHRDSE

SEQ ID NO: 62299 - protein, 432 aa, Homo sapiens
MRPWEMTSNRQPPSVRPSQHHFSGERCNTPARNRRSPPVRRQRGRRDRLSRHNSISQDENYHHLPYAQQQAIEEPRAFHPPNVSPRLLHPAAHPPQQNAVMVDIHDQLHQGTVPVSYTVTTVAPHGIPLCTGQHIPACSTQQVPGCSVVFSGQHLPVCSVPPPMLQACSVQHLPVPYAAFPPLISSDPFLIHPPHLSPHHPPHLPPPGQFVPFQTQQSRSPLQRIENEVELLGEHLPVGGFTYPPSAHPPTLPPSAPLQFLTHDPLHQEVSFGVPYPPFMPRRLTGRSRYRSQQPIPPPPYHPSLLPYVLSMLPVPPAVGPTFSFELDVEDGEVENYEALLNLAERLGEAKPRGLTKADIEQLPSYRFNPNNHQSEQTLCVVCMCDFESRQLLRVLPCNHEFHAKCVDKWLKANRTCPICRADASEVHRDSE

SEQ ID NO: 62300 - protein, 465 aa, Homo sapiens
MACKSEDSPSPKRQRLSHSVFDYTSASPAPSPPMRPWEMTSNRQPPSVRPSQHHFSGERCNTPARNRRSPPVRRQRGRRDRLSRHNSISQDENYHHLPYAQQQAIEEPRAFHPPNVSPRLLHPAAHPPQQNAVMVDIHDQLHQGTVPVSYTVTTVAPHGIPLCTGQHIPACSTQQVPGCSVVFSGQHLPVCSVPPPMLQACSVQHLPVPYAAFPPLISSDPFLIHPPHLSPHHPPHLPPPGQFVPFQTQQSRSPLQRIENEVELLGEHLPVGGFTYPPSAHPPTLPPSAPLQFLTHDPLHQEVSFGVPYPPFMPRRLTGRSRYRSQQPIPPPPYHPSLLPYVLSMLPVPPAVGPTFSFELDVEDGEVENYEALLNLAERLGEAKPRGLTKADIEQLPSYRFNPNNHQSEQTLCVVCMCDFESRQLLRVLPCNHEFHAKCVDKWLKANRTCPICRADASEVHRDSE

SEQ ID NO: 62301 - protein, 432 aa, Homo sapiens; identical to SEQ ID NO: 62299

SEQ ID NO: 62302 - protein, 439 aa, Homo sapiens
MQHTCTQQKKVTYKHIARFSPRNRLCQADAVFNNNLAGFQLQSPPVRRQRGRRDRLSRHNSISQDENYHHLPYAQQQAIEEPRAFHPPNVSPRLLHPAAHPPQQNAVMVDIHDQLHQGTVPVSYTVTTVAPHGIPLCTGQHIPACSTQQVPGCSVVFSGQHLPVCSVPPPMLQACSVQHLPVPYAAFPPLISSDPFLIHPPHLSPHHPPHLPPPGQFVPFQTQQSRSPLQRIENEVELLGEHLPVGGFTYPPSAHPPTLPPSAPLQFLTHDPLHQEVSFGVPYPPFMPRRLTGRSRYRSQQPIPPPPYHPSLLPYVLSMLPVPPAVGPTFSFELDVEDGEVENYEALLNLAERLGEAKPRGLTKADIEQLPSYRFNPNNHQSEQTLCVVCMCDFESRQLLRVLPCNHEFHAKCVDKWLKANRTCPICRADASEVHRDSE

SEQ ID NO: 62303 - protein, 332 aa, Homo sapiens
MVDIHDQLHQGTVPVSYTVTTVAPHGIPLCTGQHIPACSTQQVPGCSVVFSGQHLPVCSVPPPMLQACSVQHLPVPYAAFPPLISSDPFLIHPPHLSPHHPPHLPPPGQFVPFQTQQSRSPLQRIENEVELLGEHLPVGGFTYPPSAHPPTLPPSAPLQFLTHDPLHQEVSFGVPYPPFMPRRLTGRSRYRSQQPIPPPPYHPSLLPYVLSMLPVPPAVGPTFSFELDVEDGEVENYEALLNLAERLGEAKPRGLTKADIEQLPSYRFNPNNHQSEQTLCVVCMCDFESRQLLRVLPCNHEFHAKCVDKWLKANRTCPICRADASEVHRDSE

SEQ ID NO: 62304 - protein, 439 aa, Homo sapiens; identical to SEQ ID NO: 62302

SEQ ID NO: 62305 - protein, 432 aa, Homo sapiens; identical to SEQ ID NO: 62299

SEQ ID NO: 62306 - protein, 420 aa, Homo sapiens
MWWRDLTRLRLWLKREAIPGEGRKAAKVNAGVGEKGIYTASSRGGPPSARSKAVTVVAEGAASRSWLSMDAPELGPGLVERLEQLATCPLCGGSFEDPVLLACEHSFCRACLARRWGTPPATGTEASPTACPCCGLPCPRRSLRSNVRLAVEVRISRELREKLAEPGARAGRRRGGRIPTMGCLDLPGEDMRKTWRRFEVPTSKSSNSEDDLPEDYPVVKKMLHRLTADLTLDPGTAHRRLLISADRRSVQLAPPGTPAPPDGPKRFDQLPAVLGAQGFGAGRHCWEVETADAASCRDSSGEDADDEESHYAVGAAGESVQRKGCVRLCPAGAVWAVEGRGGRLWALTAPEPTLLGGVEPPPRRIRVDLDWERGRVAFYDGRSLDLLYAFQAPGPLGERIFPLFCTCDPRAPLRIVPAES

SEQ ID NO: 62307 - protein, 251 aa, Homo sapiens
MWWRDLTRLRLWLKREAIPGEGRKAAKVNAGVGEKGIYTASSRGGPPSARSKAVTVVAEGAASRSWLSMDAPELGPGLVERLEQLATCPLCGGSFEDPVLLACEHSFCRACLARRWGTPPATGTEASPTACPCCGLPCPRRSLRSNVRLAVEVRISRELLFGGGIPHSFLGTHSHAHCRSINSNPHFRPKIMRPHLVSTFPRPCSKPNPFLPSGSQNLLSPTATTVLPDFSHSNHSRPAMGNRPSPSVLVK

SEQ ID NO: 62308 - protein, 354 aa, Homo sapiens
MWWRDLTRLRLWLKREAIPGEGRKAAKVNAGVGEKGIYTASSRGGPPSARSKAVTVVAEGAASRSWLSMDAPELGPGLVERLEQLATCPLCGGSFEDPVLLACEHSFCRACLARRWGTPPATGTEASPTACPCCGLPCPRRSLRSNVRLAVEVRISRELREKLAEPGARAGRRRGGRIPTMGCLDLPGEDMRKTWRRFEVPTPKSSNSEDDLPEDYPVVKKMLHRLTADLTLDPGTAHRRLLISTDRRSVQLAPPGTPAPPDGPKRFDQLPAVLGAQGFGAGRHCWEVETADAASCRDSSGEDEDDEESHYAVGAAGESVQRKGCAPGPLGERIFPLFCTCDPRAPLRIVPAES

SEQ ID NO: 62309 - protein, 354 aa, Homo sapiens
MWWRDLTRLRLWLKREAIPGEGRKAAKVNAGVGEKGIYTASSRGGPPSARSKAVTVVAEGAASRSWLSMDAPELGPGLVERLEQLATCPLCGGSFEDPVLLACEHSFCRACLARRWGTPPATGTEASPTACPCCGLPCPRRSLRSNVRLAVEVRISRELREKLAEPGARAGRRRGGRIPTMGCLDLPGEDMRKTWRRFEVPTSKSSNSEDDLPEDYPVVKKMLHRLTADLTLDPGTAHRRLLISADRRSVQLAPPGTPAPPDGPKRFDQLPAVLGAQGFGAGRHCWEVETADAASCRDSSGEDADDEESHYAVGAAGESVQRKGCAPGPLGERIFPLFCTCDPRAPLRIVPAES

SEQ ID NO: 62310 - protein, 420 aa, Homo sapiens
MWWRDLTRLRLWLKREAIPGEGRKAAKVNAGVGEKGIYTASSRGGPPSARSKAVTVVAEGAASRSWLSMDAPELGPGLVERLEQLATCPLCGGSFEDPVLLACEHSFCRACLARRWGTPPATGTEASPTACPCCGLPCPRRSLRSNVRLAVEVRISRELREKLAEPGARAGRRRGGRIPTMGCLDLPGEDMRKTWRRFEVPTPKSSNSEDDLPEDYPVVKKMLHRLTADLTLDPGTAHRRLLISTDRRSVQLAPPGTPAPPDGPKRFDQLPAVLGAQGFGAGRHCWEVETADAASCRDSSGEDEDDEESHYAVGAAGESVQRKGCVRLCPAGAVWAVEGRGGRLWALTAPEPTLLGGVEPPPRRIRVDLDWERGRVAFYDGRSLDLLYAFQAPGPLGERIFPLFCTCDPRAPLRIVPAES

SEQ ID NO: 62311 - protein, 354 aa, Homo sapiens
MWWRDLTRLRLWLKREAIPGEGRKAAKVNAGVGEKGIYTASSRGGPPSARSKAVTVVAEGAASRSWLSMDAPELGPGLVERLEQLATCPLCGGSFEDPVLLACEHSFCRACLARRWGTPPATGTEASPTACPCCGLPCPRRSLRSNVRLAVEVRISRELREKLAEPGARAGRRRGGRIPTMGCLDLPGEDMRKTWRRFEVPTSKSSNSEDDLPEDYPVVKKMLHRLTADLTLDPGTAHRRLLISADRRSVQLAPPGTPAPPDGPKRFNQLPAVLGAQGFGAGRHCWEVETADAASCRDSSGEDADDEESHYAVGAAGESVQRKGCAPGPLGERIFPLFCTCDPRAPLRIVPAES

SEQ ID NO: 62312 - protein, 420 aa, Homo sapiens
MWWRDLTRLRLWLKREAIPGEGRKAAKVNAGVGEKGIYTASSRGGPPSARSKAVTVVAEGAASRSWLSMDAPELGPGLVERLEQLATCPLCGGSFEDPVLLACEHSFCRACLARRWGTPPATGTEASPTACPCCGLPCPRRSLRSNVRLAVEVRISRELREKLAEPGARAGRRRGGRIPTMGCLDLPGEDMRKTWRRFEVPTSKSSNSEDDLPEDYPVVKKMLHRLTADLTLDPGTAHRRLLISADRRSVQLAPPGTPAPPDGPKRFDQLPAVLGAQGFGAGRHCWEVETADAASCRDSSGEDADDEESHYAVGAAGESVQRKGCVRLCPAGAVWAVGGRGGRLWALTAPEPTLLGGVEPPPRRIRVDLDWERGRVAFYDGRSLDLLYAFQAPGPLGERIFPLFCTCDPRAPLRIVPAES

SEQ ID NO: 62313 - protein, 420 aa, Homo sapiens; identical to SEQ ID NO: 62306

SEQ ID NO: 62314 - protein, 420 aa, Homo sapiens; identical to SEQ ID NO: 62306

SEQ ID NO: 62315 - protein, 354 aa, Homo sapiens; identical to SEQ ID NO: 62309

SEQ ID NO: 62316 - protein, 354 aa, Homo sapiens; identical to SEQ ID NO: 62309

SEQ ID NO: 62317 - protein, 354 aa, Homo sapiens; identical to SEQ ID NO: 62309

SEQ ID NO: 62318 - protein, 420 aa, Homo sapiens
MWWRDLTRLRLWLKREAIPGEGRKAAKVNAGVGEKGIYTASSRGGPPSARSKAVTVVAEGAASRSWLSMDAPELGPGLVERLEQLATCPLCGGSFEDPVLLACEHSFCRACLARRWGTPPATGTEASPTACPCCGLPCPRRSLRSNVRLAVEVRISRELREKLAEPGARAGRRRGGRIPTMGCLDLPGEDMRKTWRRFEVPTSKSSNSEDDLPEDYPVVKKMLHRLTADLTLDPGTAHRRLLISADRRSVQLAPPGTPAPPDGPKRFNQLPAVLGAQGFGAGRHCWEVETADAASCRDSSGEDADDEESHYAVGAAGESVQRKGCVRLCPAGAVWAVEGRGGRLWALTAPEPTLLGGVEPPPRRIRVDLDWERGRVAFYDGRSLDLLYAFQAPGPLGERIFPLFCTCDPRAPLRIVPAES

SEQ ID NO: 62319 - protein, 420 aa, Homo sapiens; identical to SEQ ID NO: 62306

SEQ ID NO: 62320 - protein, 354 aa, Homo sapiens; identical to SEQ ID NO: 62309

SEQ ID NO: 62321 - protein, 420 aa, Homo sapiens; identical to SEQ ID NO: 62306

SEQ ID NO: 62322 - protein, 354 aa, Homo sapiens; identical to SEQ ID NO: 62309

SEQ ID NO: 62323 - protein, 251 aa, Homo sapiens; identical to SEQ ID NO: 62307

SEQ ID NO: 62324 - protein, 251 aa, Homo sapiens; identical to SEQ ID NO: 62307

SEQ ID NO: 62325 - protein, 251 aa, Homo sapiens; identical to SEQ ID NO: 62307

SEQ ID NO: 62326 - protein, 251 aa, Homo sapiens; identical to SEQ ID NO: 62307

SEQ ID NO: 62327 - protein, 251 aa, Homo sapiens; identical to SEQ ID NO: 62307

SEQ ID NO: 62328 - protein, 251 aa, Homo sapiens
MWWRDLTRLRLWLKREAIPGEGRKAAKVNAGVGEKGIYTASSRGGPPSARSKAVTVVAEGAASRSWLSMDAPELGPGLVERLEQLATCPLCGGSFEDPVLLACEHSFCRACLARRWGTPPATGTEASPTACPCCGLPCPRRSLRSNVRLAVEVRISRELLFGGGIPHSFLGTHSHAHCRSINSNPHFRPKIMRPHLVSTFPRPCSKPNPFLPSGSQNLLSPTAATVLPDFSHSNHSRPAMGNRPSPSVLVK

SEQ ID NO: 62329 - protein, 251 aa, Homo sapiens
MWWRDLTRLRLWLKREAIPGEGRKAAKVNAGVGEKGIYTASSRGGPPSARSKAVTVVAEGAASRSWLSMDAPELGPGLVERLEQLATCPLCGGSFEDPVLLACEHSFCRACLARRWGTPPATGTEASPTACPCCGLPCPRRSLRSNVRLAVEVRISRELLFGRGIPHSFLGTHSHAHCRSINSNPHFRPKIMRPHLVSTFPHPCSKPNPFLPSGSQNLLSPTATTVLPDFSHSNHSRPAMGNRPSPSVLVK

SEQ ID NO: 62330 - protein, 190 aa, Homo sapiens
MSTRKRRGGAINSRQAQKRTREATSTPEISLEAEPIELVETAGDEIVDLTCESLEPVVVDLTHNDSVVIVDERRRPRRNARRLPQDHADSCVVSSDDEELSRDRDVYVTTHTPRNARDEGATGLRPSGTVSCPICMDGYSEIVQNGRLIVSTECGHVFCSQCLRDSLKNANTCPTCRKKINHKRYHPIYI

SEQ ID NO: 62331 - protein, 5 aa, Homo sapiens
MSTRK

SEQ ID NO: 62332 - protein, 190 aa, Homo sapiens; identical to SEQ ID NO: 62330

SEQ ID NO: 62333 - protein, 190 aa, Homo sapiens; identical to SEQ ID NO: 62330

SEQ ID NO: 62334 - protein, 54 aa, Homo sapiens
MSTRKRRGGAINSRQAQKRTREATSTPEISLEAEPIELVETAGDEIVDLTCESL

SEQ ID NO: 62335 - protein, 114 aa, Homo sapiens
MSTRKRRGGAINSRQAQKRTREATSTPEISLEAEPIELVETAGDEIVDLTCESLEPVVVDLTHNDSVVVSVGVPQVLSVVPSAWTDTQRSCRMDVSSFPQNAAMSSVASASVIP

SEQ ID NO: 62336 - protein, 190 aa, Homo sapiens
MSTRKRRGGAINSRQAQKRTREATSTPEISLEAEPIELVETAGDEIVDLTCESLEPVVVDLTHNDSVVVSDERRRPRRNARRLPQDHADSCVVSSDDEELSRDRDVYVTTHTPRNARDEGATGLRPSGTVSCPICMDGYSEIVQNGRLIVSTECGHVFCSQCLRDSLKNANTCPTCRKKINHKRYHPIYI

SEQ ID NO: 62337 - protein, 113 aa, Homo sapiens
MSTRKRRGGAINSRQAQKRTREATSTPEISLEAEPIELVETAGDEIVDLTCESLEPVVVDLTHNDSVVIVDGPQVLSVVPSAWTDTQRSCRMDVSSFPQNAAMSSVASASVIP

SEQ ID NO: 62338 - protein, 783 aa, Homo sapiens
MSGGHQLQLAALWPWLLMATLQAGFGRTGLVLAAAVESERSAEQKAIIRVIPLKMDPTGKLNLTLEGVFAGVAEITPAEGKLMQSHPLYLCNASDDDNLEPGFISIVKLESPRRAPRPCLSLASKARMAGERGASAVLFDITEDRAAAEQLQQPLGLTWPVVLIWGNDAEKLMEFVYKNQKAHVRIELKEPPAWPDYDVWILMTVVGTIFVIILASVLRIRCRPRHSRPDPLQQRTAWAISQLATRRYQASCRQARGEWPDSGSSCSSAPVCAICLEEFSEGQELRVISCLHEFHRNCVDPWLHQHRTCPLCMFNITEGDSFSQSLGPSRSYQEPGRRLHLIRQHPGHAHYHLPAAYLLGPSRSAVARPPRPGPFLPSQEPGMGPRHHRFPRAAHPRAPGEQQRLAGAQHPYAQGWGLSHLQSTSQHPAACPVPLRRARPPDSSGSGESYCTERSGYLADGPASDSSSGPCHGSSSDSVVNCTDISLQGVHGSSSTFCSSLSSDFDPLVYCSPKGDPQRVDMQPSVTSRPRSLDSVVPTGETQVSSHVHYHRHRHHHYKKRFQWHGRKPGPETGVPQSRPPIPRTQPQPEPPSPDQQVTRSNSAAPSGRLSNPQCPRALPEPAPGPVDASSICPSTSSLFNLQKSSLSARHPQRKRRGGPSEPTPGSRPQDATVHPACQIFPHYTPSVAYPWSPEAHPLICGPPGLDKRLLPETPGPCYSNSQPVWLCLTPRQPLEPHPPGEGPSEWSSDTAEGRPCPYPHCQVLSAQPGSEEELEELCEQAV

SEQ ID NO: 62339 - protein, 742 aa, Homo sapiens
MSGGHQLQLAALWPWLLMATLQAGFGRTGLVLAAAVESERSAEQKAIIRVIPLKMDPTGKLNLTLEGVFAGVAEITPAEGKLMQARMAGERGASAVLFDITEDRAAAEQLQQPLGLTWPVVLIWGNDAEKLMEFVYKNQKAHVRIELKEPPAWPDYDVWILMTVVGTIFVIILASVLRIRCRPRHSRPDPLQQRTAWAISQLATRRYQASCRQARGEWPDSGSSCSSAPVCAICLEEFSEGQELRVISCLHEFHRNCVDPWLHQHRTCPLCMFNITEGDSFSQSLGPSRSYQEPGRRLHLIRQHPGHAHYHLPAAYLLGPSRSAVARPPRPGPFLPSQEPGMGPRHHRFPRAAHPRAPGEQQRLAGAQHPYAQGWGLSHLQSTSQHPAACPVPLRRARPPDSSGSGESYCTERSGYLADGPASDSSSGPCHGSSSDSVVNCTDISLQGVHGSSSTFCSSLSSDFDPLVYCSPKGDPQRVDMQPSVTSRPRSLDSVVPTGETQVSSHVHYHRHRHHHYKKRFQWHGRKPGPETGVPQSRPPIPRTQPQPEPPSPDQQVTRSNSAAPSGRLSNPQCPRALPEPAPGPVDASSICPSTSSLFNLQKSSLSARHPQRKRRGGPSEPTPGSRPQDATVHPACQIFPHYTPSVAYPWSPEAHPLICGPPGLDKRLLPETPGPCYSNSQPVWLCLTPRQPLEPHPPGEGPSEWSSDTAEGRPCPYPHCQVLSAQPGSEEELEELCEQAV

SEQ ID NO: 62340 - protein, 180 aa, Homo sapiens
MAAAEEEDGGPEGPNRERGGAGATFECNICLETAREAVVSVCGHLYCWPCLHQWLETRPERQECPVCKAGISREKVVPLYGRGSQKPQDPRLKTPPRPQGQRPAPESRGGFQPFGDTGGFHFSFGVGAFPFGFFTTVFNAHEPFRRGTGVDLGQGHPASSWQDSLFLFLAIFFFFWLLSI

SEQ ID NO: 62341 - protein, 180 aa, Homo sapiens; identical to SEQ ID NO: 62340

SEQ ID NO: 62342 - protein, 182 aa, Homo sapiens
MAAAEEEDGGPEGPNRERGGAGATFECNICLETAREAVVSVCGHLYCWPCLHQWLETRPERQECPVCKAGISREKVVPLYGRGSQKPQDPRLKTPPRPQGQRPAPESRGGFQPFGDTGGFHFSFGVGAFPFGFFTTVFNAHEPFRRGTGPFSTSPAFFHYLIGNTSREFRGRIYNFWLPRNL

SEQ ID NO: 62343 - protein, 180 aa, Homo sapiens; identical to SEQ ID NO: 62340

SEQ ID NO: 62344 - protein, 180 aa, Homo sapiens; identical to SEQ ID NO: 62340

SEQ ID NO: 62345 - protein, 180 aa, Homo sapiens; identical to SEQ ID NO: 62340

SEQ ID NO: 62346 - protein, 180 aa, Homo sapiens; identical to SEQ ID NO: 62340

SEQ ID NO: 62347 - protein, 180 aa, Homo sapiens; identical to SEQ ID NO: 62340

SEQ ID NO: 62348 - protein, 182 aa, Homo sapiens; identical to SEQ ID NO: 62342

SEQ ID NO: 62349 - protein, 182 aa, Homo sapiens; identical to SEQ ID NO: 62342

SEQ ID NO: 62350 - protein, 182 aa, Homo sapiens; identical to SEQ ID NO: 62342

SEQ ID NO: 62351 - protein, 182 aa, Homo sapiens; identical to SEQ ID NO: 62342

SEQ ID NO: 62352 - protein, 182 aa, Homo sapiens; identical to SEQ ID NO: 62342

SEQ ID NO: 62353 - protein, 182 aa, Homo sapiens; identical to SEQ ID NO: 62342

SEQ ID NO: 62354 - protein, 113 aa, Homo sapiens
MADVEDGEETCALASHSGSSGSKSGGDKMFSLKKWNAVAMWSWDVECDTCAICRVQVMDACLRCQAENKQEDCVVVWGECNHSFHNCCMSLWVKQNNRCPLCQQDWVVQRIGK

SEQ ID NO: 62355 - protein, 90 aa, Homo sapiens
MADVEDGEETCALASHSGSSGSKSGGDKMFSLKKWNAVAMWSWDVECDTCAICRVQMPVLDVKLKTNKRTVLWSGENVIIPSTTAACPCG

SEQ ID NO: 62356 - protein, 97 aa, Homo sapiens
MADVEDGEETCALASHSGSSGSKSGGDKMFSLKKWNAVAMWSWDVECDTCAICRVQVMVVWGECNHSFHNCCMSLWVKQNNRCPLCQQDWVVQRIGK

SEQ ID NO: 62357 - protein, 624 aa, Homo sapiens
MENSDSNDKGSGDQSAAQRRSQMDRLDREEAFYQFVNNLSEEDYRLMRDNNLLGTPGESTEEELLRRLQQIKEGPPPQNSDENRGGDSSDDVSNGDSIIDWLNSVRQTGNTTRSGQRGNQSWRAVSRTNPNSGDFRFSLEINVNRNNGSQNSENENEPSARRSSGENVENNSQRQVENPRSESTSARPSRSERNSTEALTEVPPTRGQRRARSRSPDHRRTRARAERSRSPLHPMSEIPRRSHHSISSQTFEHPLVNETEGSSRTRHHVTLRQQISGPELLSRGLFAASGTRNASQGAGSSDTAASGESTGSGQRPPTIVLDLQVRRVRPGEYRQRDSIASRTRSRSQTPNNTVTYESERGGFRRTFSRSERAGVRTYVSTIRIPIRRILNTGLSETTSVAIQTMLRQIMTGFGELSYFMYSDSDSEPTGSVSNRNMERAESRSGRGGSGGGSSSGSSSSSSSSSSSSSSSSSSSSPSSSSGGESSETSSDLFEGSNEGSSSSGSSGARREGRHRAPVTFDESGSLPFLSLAQFFLLNEDDDDQPRGLTKEQIDNLAMRSFGENDALKTCSVCITEYTEGNKLRKLPCSHEYHVHCIDRWLSENSTCPICRRAVLASGNRESVV

SEQ ID NO: 62358 - protein, 624 aa, Homo sapiens; identical to SEQ ID NO: 62357

SEQ ID NO: 62359 - protein, 317 aa, Homo sapiens
  VARIANT 1: note = MOD_RES - Any amino acid
XLPAPAAALPGAPPPPPGVRGYPARARGLQGASGGARFPSSLSLPVPGKGGWVVSRAKFPALDSCEITTAHPRLCFAVSPPFSCSLPLPSLFPHSPLLGRPKRQAKPAADEGFWDCSVCTFRNSAEAFKCSICDVRKGTSTRKPRINSQLVAQQVAQQYATPPPPKKEKKEKVEKQDKEKPEKDKEISPSVTKKNTNKKTKPKSDILKDPPSEANSIQSANATTKTSETNHTSRPRLKNVDRSTAQQLAVTVGNVTVIITDFKEKTRSSSTSSSTVTSSAGSEQQNQSSSGSESTDKGSSRSSTPKGDMSAVNDESF

SEQ ID NO: 62360 - protein, 151 aa, Homo sapiens
MDSAACAAAATPVPALALALAPDLAQAPLALPGLLSPSCLLSSGQEVNGSERGTCLWRPWLSSTNDSPRQMRKLVDLAAGGATAAEVTKAESKFHHPVRLFWPKSRSFDYLYSAGEILLQNFPVQATINLYEDSDSEEEEEDEEQEDEEEK

SEQ ID NO: 62361 - protein, 104 aa, Homo sapiens
MDSAACAAAATPVPALALALAPDLAQAPLALPGLLSPSCLLSSGQEVNGSERLFWPKSRSFDYLYSAGEILLQNFPVQATINLYEDSDSEEEEEDEEQEDEEEK

SEQ ID NO: 62362 - protein, 70 aa, Homo sapiens
MPDGPGMTAASGKLYQFRHPVRLFWPKSKCYDYLYQEAEALLKNFPIQATISFYEDSDSEDEIEDLTCEN

SEQ ID NO: 62363 - protein, 128 aa, Homo sapiens
MENAGGAEGTESGAAACAATDGPTRRAGADSGYAGFWRPWVDAGGKKEEETPNHAAEAMPDGPGMTAASGKLYQFRHPVRLFWPKSKCYDYLYQEAEALLKNFPIQATISFYEDSDSEDEIEDLTCEN

SEQ ID NO: 62364 - protein, 147 aa, Homo sapiens
MAAAADSFSGGPAGVRLPRSPPLKVLAEQLRRDAEGGPGAWRLSRAAAGRGPLDLAAVWMQGRVVMADRGEARLRDPSGDFSVRGLERVPRGRPCLVPGKYVMVMGVVQACSPEPCLQAVKMTDLSDNPIHESMWELEVEDLHRNIP

SEQ ID NO: 62365 - protein, 84 aa, Homo sapiens
MKQTQVGSLFSLGIRNPEPGPVSGTAVPRQLAWKSGKYVMVMGVVQACSPEPCLQAVKMTDLSDNPIHESMWELEVEDLHRNIP

SEQ ID NO: 62366 - protein, 476 aa, Homo sapiens
MANSAKAEEYEKMSLEQAKASVNSETESSFNINENTTASGTGLSEKTSVCRQVDIARKRKEFEDDLVKESSSCGKDTPSKKRKLDPEIVPEEKDCGDAEGNSKKRKRETEDVPKDKSSTGDGTQNKRKIALEDVPEKQKNLEEGHSSTVAAHYNELQEVGLEKRSQSRIFYLRNFNNWMKSVLIGEFLEKVRQKKKRDITVLDLGCGKGGDLLKWKKGRINKLVCTDIADVSVKQCQQRYEDMKNRRDSEYIFSAEFITADSSKELLIDKFRDPQMCFDICSCQFVCHYSFESYEQADMMLRNACERLSPGGYFIGTTPNSFELIRRLEASETESFGNEIYTVKFQKKGDYPLFGCKYDFNLEGVVDVPEFLVYFPLLNEMAKKYNMKLVYKKTFLEFYEEKIKNNENKMLLKRMQALEPYPANESSKLVSEKVDDYEHAAKYMKNSQVRLPLGTLSKSEWEATSIYLVFAFEKQQ

SEQ ID NO: 62367 - protein, 476 aa, Homo sapiens; identical to SEQ ID NO: 62366

SEQ ID NO: 62368 - protein, 234 aa, Homo sapiens [sequence omitted]

SEQ ID NO: 62369 - protein, 476 aa, Homo sapiens; identical to SEQ ID NO: 62366

SEQ ID NO: 62370 - protein, 129 aa, Homo sapiens [sequence omitted]

SEQ ID NO: 62371 - protein, 155 aa, Homo sapiens
MAPRTWCPAGIFGLFCPLTLACSSLTIALTDCQPIILVSPTLSLWMVVRSVWIMQASLLGEPEEVALGPMGVVAATLEVVGTRAMGVAGIMTVDLEGMDMDMDVPETIMAETRVVMTATQEEITETIMTTEMRHAHNIGETWISALSEPVCHTLS

SEQ ID NO: 62372 - protein, 157 aa, Homo sapiens
MSSEEGKLFVGGLNFNTDEQALEDHFSSFGPISEVVVVKDRETQRSRGFGFITFTNPEHASVAMRAMNGESLDGRQIRVDHAGKSARGTRGGGFGAHGRGRSYSRGGGDQGYGSGRYYDSRPGGYGYGYGRSRDYNGRNQGGYDRYSGGNYRDNYDN

SEQ ID NO: 62373 - protein, 157 aa, Homo sapiens; identical to SEQ ID NO: 62372

SEQ ID NO: 62374 - protein, 169 aa, Homo sapiens
MAPRTWCPAGIFGLFCPLTLACSSLTIALTDCQPIILVSPTLSLWMVVRSVWIMQASLLGEPEEVALGPMGVVAATLEVVGTRAMGVAGIMTVDLEGMDMDMDVPETIMAETRVVMTATQEEITETIMTTEMRHAHNIDTQGIISDPGSSFQMAVFIKVFGAAPKHLIL

SEQ ID NO: 62375 - protein, 852 aa, Homo sapiens
MEYERRGGRGDRTGRYGATDRSQDDGGENRSRDHDYRDMDYRSYPREYGSQEGKHDYDDSSEEQSAEIRGQLQSHGVQAREVRLMRNKSSGQSRGFAFVEFSHLQDATRWMEANQHSLNILGQKVSMHYSDPKPKINEDWLCNKCGVQNFKRREKCFKCGVPKSEAEQKLPLGTRLDQQTLPLGGRELSQGLLPLPQPYQAQGVLASQALSQGSEPSSENANDTIILRNLNPHSTMDSILGALAPYAVLSSSNVRVIKDKQTQLNRGFAFIQLSTIEAAQLLQILQALHPPLTIDGKTINVEFAKGSKRDMASNEGSRISAASVASTAIAAAQWAISQASQGGEGTWATSEEPPVDYSYYQQDEGYGNSQGTESSLYAHGYLKGTKGPGITGTKGDPTGAGPEASLEPGADSVSMQAFSRAQPGAAPGIYQQSAEASSSQGTAANSQSYTIMSPAVLKSELQSPTHPSSALPPATSPTAQESYSQYPVPDVSTYQYDETSGYYYDPQTGLYYDPNSQYYYNAQSQQYLYWDGERRTYVPALEQSADGHKETGAPSKEGKEKKEKHKTKTAQQIAKDMERWARSLNKQKENFKNSFQPISSLRDDERRESATADAGYAILEKKGALAERQHTSMDLPKLASDDRPSPPRGLVAAYSGESDSEEEQERGGPEREEKLTDWQKLACLLCRRQFPSKEALIRHQQLSGLHKQNLEIHRRAHLSENELEALEKNDMEQMKYRDRAAERREKYGIPEPPEPKRRKYGGISTASVDFEQPTRDGLGSDNIGSRMLQAMGWKEGSGLGRKKQGIVTPIEAQTRVRGSGLGARGSSYGVTSTESYKETLHKTMVTRFNEAQ

SEQ ID NO: 62376 - protein, 853 aa, Homo sapiens
MEYERRGGRGDRTGRYGATDRSQDDGGENRSRDHDYRDMDYRSYPREYGSQEGKHDYDDSSEEQSAEIRGQLQSHGVQAREVRLMRNKSSGQSRGFAFVEFSHLQDATRWMEANQHSLNILGQKVSMHYSDPKPKINEDWLCNKCGVQNFKRREKCFKCGVPKSEAEQKLPLGTRLDQQTLPLGGRELSQGLLPLPQPYQAQGVLASQALSQGSEPSSENANDTIILRNLNPHSTMDSILGALAPYAVLSSSNVRVIKDKQTQLNRGFAFIQLSTIVEAAQLLQILQALHPPLTIDGKTINVEFAKGSKRDMASNEGSRISAASVASTAIAAAQWAISQASQGGEGTWATSEEPPVDYSYYQQDEGYGNSQGTESSLYAHGYLKGTKGPGITGTKGDPTGAGPEASLEPGADSVSMQAFSRAQPGAAPGIYQQSAEASSSQGTAANSQSYTIMSPAVLKSELQSPTHPSSALPPATSPTAQESYSQYPVPDVSTYQYDETSGYYYDPQTGLYYDPNSQYYYNAQSQQYLYWDGERRTYVPALEQSADGHKETGAPSKEGKEKKEKHKTKTAQQIAKDMERWARSLNKQKENFKNSFQPISSLRDDERRESATADAGYAILEKKGALAERQHTSMDLPKLASDDRPSPPRGLVAAYSGESDSEEEQERGGPEREEKLTDWQKLACLLCRRQFPSKEALIRHQQLSGLHKQNLEIHRRAHLSENELEALEKNDMEQMKYRDRAAERREKYGIPEPPEPKRRKYGGISTASVDFEQPTRDGLGSDNIGSRMLQAMGWKEGSGLGRKKQGIVTPIEAQTRVRGSGLGARGSSYGVTSTESYKETLHKTMVTRFNEAQ

SEQ ID NO: 62377 - protein, 930 aa, Homo sapiens
MEYERRGGRGDRTGRYGATDRSQDDGGENRSRDHDYRDMDYRSYPREYGSQEGKHDYDDSSEEQSAEDSYEASPGSETQRRRRRRHRHSPTGPPGFPRDGDYRDQDYRTEQGEEEEEEEDEEEEEKASNIVMLRMLPQAATEDDIRGQLQSHGVQAREVRLMRNKSSGQSRGFAFVEFSHLQDATRWMEANQHSLNILGQKVSMHYSDPKPKINEDWLCNKCGVQNFKRREKCFKCGVPKSEAEQKLPLGTRLDQQTLPLGGRELSQGLLPLPQPYQAQGVLASQALSQGSEPSSENANDTIILRNLNPHSTMDSILGALAPYAVLSSSNVRVIKDKQTQLNRGFAFIQLSTIVEAAQLLQILQALHPPLTIDGKTINVEFAKGSKRDMASNEGSRISAASVASTAIAAAQWAISQASQGGEGTWATSEEPPVDYSYYQQDEGYGNSQGTESSLYAHGYLKGTKGPGITGTKGDPTGAGPEASLEPGADSVSMQAFSRAQPGAAPGIYQQSAEASSSQGTAANSQSYTIMSPAVLKSELQSPTHPSSALPPATSPTAQESYSQYPVPDVSTYQYDETSGYYYDPQTGLYYDPNSQYYYNAQSQQYLYWDGERRTYVPALEQSADGHKETGAPSKEGKEKKEKHKTKTAQQIAKDMERWARSLNKQKENFKNSFQPISSLRDDERRESATADAGYAILEKKGALAERQHTSMDLPKLASDDRPSPPRGLVAAYSGESDSEEEQERGGPEREEKLTDWQKLACLLCRRQFPSKEALIRHQQLSGLHKQNLEIHRRAHLSENELEALEKNDMEQMKYRDRAAERREKYGIPEPPEPKRRKYGGISTASVDFEQPTRDGLGSDNIGSRMLQAMGWKEGSGLGRKKQGIVTPIEAQTRVRGSGLGARGSSYGVTSTESYKETLHKTMVTRFNEAQ

SEQ ID NO: 62378 - protein, 669 aa, Homo sapiens
MKIFVGNVDGADTTPEELAALFAPYGTVMSCAVMKQFAFVHMRENAGALRAIEALHGHELRPGRALVVEMSRPRPLNTWKIFVGNVSAACTSQELRSLFERRGRVIECDVVKDYAFVHMEKEADAKAAIAQLNGKEVKGKRINVELSTKGQKKGPGLAVQSGDKTKKPGAGDTAFPGTGGFSATFDYQQAFGNSTGGFDGQARQPTPPFFGRDRSPLRRSPPRASYVAPLTAQPATYRAQPSVSLGAAYRAQPSASLGVGYRTQPMTAQAASYRAQPSVSLGAPYRGQLASPSSQSAAASSLGPYGGAQPSASALSSYGGQAAAASSLNSYGAQGSSLASYGNQPSSYGAQAASSYGVRAAASSYNTQGAASSLGSYGAQAASYGAQSAASSLAYGAQAASYNAQPSASYNAQSAPYAAQQAASYSSQPAAYVAQPATAAAYASQPAAYAAQATTPMAGSYGAQPVVQTQLNSYGAQASMGLSGSYGAQSAAAATGSYGAAAAYGAQPSATLAAPYRTQSSASLAASYAAQQHPQAAASYRGQPGNAYDGAGQPSAAYLSMSQGAVANANSTPPPYERTRLSPPRASYDDPYKKAVAMSKRYGSDRRLAELSDYRRLSESQLSFRRSPTKSSLDYRRLPDAHSDYARYSGSYNDYLRAAQMHSGYQRRM

SEQ ID NO: 62379 - protein, 156 aa, Homo sapiens
MKIFVGNVDGADTTPEELAALFAPYGTVMSCAVMKQFAFVHMRENAGALRAIEALHGHELRPGRALVVEMSRPRPLNTWKIFVGNVSAACTSQELRSLFERRGRVIECDVVKDYAFVHMEKEADAKAAIAQLNGKEVKGKRINVELSTKGMVPTGV

SEQ ID NO: 62380 - protein, 119 aa, Homo sapiens
MKIFVGNVDGADTTPEELAALFAPYGTVMSCAVMKQFAFVHMRENAGALRAIEALHGHELRPGRALVVEMSRPRPLNTWKIFVGNVSAACTSQELRSLFERRGRVIECDVVKGMVPTGV

SEQ ID NO: 62381 - protein, 977 aa, Homo sapiens
MRTAGRDPVPRRSPRWRRAVPLCETSAGRRVTQLRGDDLRRPATMKGKERSPVKAKRSRGGEDSTSRGERSKKLGGSGGSNGSSSGKTDSGGGSRRSLHLDKSSSRGGSREYDTGGGSSSSRLHSYSSPSTKNSSGGGESRSSSRGGGGESRSSGAASSAPGGGDGAEYKTLKISELGSQLSDEAVEDGLFHEFKRFGDVSVKISHLSGSGSGDERVAFVNFRRPEDARAAKHARGRLVLYDRPLKIEAVYVSRRRSRSPLDKDTYPPSASVVGASVGGHRHPPGGGGGQRSLSPGGAALGYRDYRLQQLALGRLPPPPPPPLPRDLERERDYPFYERVRPAYSLEPRVGAGAGAAPFREVDEISPEDDQRANRTLFLGNLDITVTESDLRRAFDRFGVITEVDIKRPSRGQTSTYGFLKFENLDMSHRAKLAMSGKIIIRNPIKIGYGKATPTTRLWVGGLGPWVPLAALAREFDRFGTIRTIDYRKGDSWAYIQYESLDAAHAAWTHMRGFPLGGPDRRLRVDFADTEHRYQQQYLQPLPLTHYELVTDAFGHRAPDPLRGARDRTPPLLYRDRDRDLYPDSDWVPPPPPVRERSTRTAATSVPAYEPLDSLDRRRDGWSLDRDRGDRDLPSSRDQPRKRRLPEESGGRHLDRSPESDRPRKRHCAPSPDRSPELSSSRDRYNSDNDRSSRLLLERPSPIRDRRGSLEKSQGDKRDRKNSASAERDRKHRTTAPTEGKSPLKKEDRSDGSAPSTSTASSKLKSPSQKQDGGTAPVASASPKLCLAWQGMLLLKNSNFPSNMHLLQGDLQVASSLLVEGSTGGKVAQLKITQRLRLDQPKLDEVTRRIKVAGPNGYAILLAVPGSSDSRSSSSSAASDTATSTQRPLRNLVSYLKQKQAAGVISLPVGGNKDKENTGVLHAFPPCEFSQQFLDSPAKALAKSEEDYLVMIIVRGFGFQIGVRYENKKRENLALTLL

SEQ ID NO: 62382 - protein, 890 aa, Homo sapiens
MKRQSERDSSPSGRGSSSSAKRPREREREAEAGGRRAAHKASGGAKHPVPARARDKPRGSGSGGGGHRDGRGTGDANHRASSGRSSGSGAGGGGRGGKASGDPGASGMSPRASPLPPPPPPPGAEPACPGSSAAAPEYKTLLISSLSPALPAEHLEDRLFHQFKRFGEISLRLSHTPELGRVAYVNFRHPQDAREARQHALARQLLLYDRPLKVEPVYLRGGGGSSRRSSSSSAAASTPPPGPPAPADPLGYLPLHGGYQYKQRSLSPVAAPPLREPRARHAAAAFALDAAAAAAVGLSRERALDYYGLYDDRGRPYGYPAVCEEDLMPEDDQRATRNLFIGNLDHSVSEVELRRAFEKYGIIEEVVIKRPARGQGGAYAFLKFQNLDMAHRAKVAMSGRVIGRNPIKIGYGKANPTTRLWVGGLGPNTSLAALAREFDRFGSIRTIDHVKGDSFAYIQYESLDAAQAACAKMRGFPLGGPDRRLRVDFAKAEETRYPQQYQPSPLPVHYELLTDGYTRHRNLDADLVRDRTPPHLLYSDRDRTFLEGDWTSPSKSSDRRNSLEGYSRSVRSRSGERWGADGDRGLPKPWEERRKRRSLSSDRGRTTHSPYEERSRTKGSGQQSERGSDRTPERSRKENHSSEGTKESSSNSLSNSRHGAEERGHHHHHHEAADSSHGKKARDSERNHRTTEAEPKPLEEPKHETKKLKNLSEYAQTLQLGWNGLLVLKNSCFPTSMHILEGDQGVISSLLKDHTSGSKLTQLKIAQRLRLDQPKLDEVTRRIKQGSPNGYAVLLATQATPSGLGTEGMPTVEPGLQRRLLRNLVSYLKQKQAAGVISLPVGGSKGRDGTGMLYAFPPCDFSQQYLQSALRTLGKLEEEHMVIVIVRDTA

SEQ ID NO: 62383 - protein, 254 aa, Homo sapiens
METVVCPPWEERRKRRSLSSDRGRTTHSPYEERSRTKGSGQQSERGSDRTPERSRKENHSSEGTKESSSNSLSNSRHGAEERGHHHHHHEAADSSHGKKARDSERNHRTTEAEPKPLEEPKHETKKLKNLSEYAQTLQLGWNGLLVLKNSCFPTSMHILEGDQGVISSLLKDHTSGSKLTQLKIAQRLRLDQPKLDEVTRRIKQGSPNGYAVLLATQATPSGLGTEGMPTVEPGLQRRLLRNLVSYLKQKQAAG

SEQ ID NO: 62384 - protein, 211 aa, Homo sapiens [sequence omitted]

SEQ ID NO: 62385 - protein, 563 aa, Homo sapiens
MPEDDQRATRNLFIGNLDHSVSEVELRRAFEKYGIIEEVVIKRPARGQGGAYAFLKFQNLDMAHRAKVAMSGRVIGRNPIKIGYGKANPTTRLWVGGLGPNTSLAALAREFDRFGSIRTIDHVKGDSFAYIQYESLDAAQAACAKMRGFPLGGPDRRLRVDFAKAEETRYPQQYQPSPLPVHYELLTDGYTRHRNLDADLVRDRTPPHLLYSDRDRTFLEGDWTSPSKSSDRRNSLEGYSRSVRSRSGERWGADGDRGLPKPWEERRKRRSLSSDRGRTTHSPYEERSRTKGSGQQSERGSDRTPERSRKENHSSEGTKESSSNSLSNSRHGAEERGHHHHHHEAADSSHGKKARDSERNHRTTEAEPKPLEEPKHETKKLKNLSEYAQTLQLGWNGLLVLKNSCFPTSMHILEGDQGVISSLLKDHTSGSKLTQLKIAQRLRLDQPKLDEVTRRIKQGSPNGYAVLLATQATPSGLGTEGMPTVEPGLQRRLLRNLVSYLKQKQAAGVISLPVGGSKGRDGTGMLYAFPPCDFSQQYLQSALRTLGKLEEEHMVIVIVRDTA

SEQ ID NO: 62386 - protein, 243 aa, Homo sapiens
MGRVGRAGRSQRTKQSTVLAPVIDLKRGGSSDDRQIVDTPPHVAAGLKDPVPSGFSAGEVLIPLADEYDPMFPNDYEKVVKRQREERQRQRELERQKEIEEREKRRKDRHEASGFARRPDPDSDEDEDYERERRKRSMGGAAIAPPTSLVEKDKELPRDFPYEEDSRPRSQSSKAAIPPPVYEEQDRPRSPTGPSNSFLANMGGTVAHKIMQKYGFREGQGLGKHEQGLSTALSVEKTSKRGG

SEQ ID NO: 62387 - protein, 401 aa, Homo sapiens
MSLYDDLGVETSDSKTEGWSKNFKLLQSQLQVKKAALTQAKSQRTKQSTVLAPVIDLKRGGSSDDRQIVDTPPHVAAGLKDPVPSGFSAGEVLIPLADEYDPMFPNDYEKVVKRQREERQRQRELERQKEIEEREKRRKDRHEASGFARRPDPDSDEDEDYERERRKRSMGGAAIAPPTSLVEKDKELPRDFPYEEDSRPRSQSSKAAIPPPVYEEQDRPRSPTGPSNSFLANMGGTVAHKIMQKYGFREGQGLGKHEQGLSTALSVEKTSKRGGKIIVGDATEKDASKKSDSNPLTEILKCPTKVVLLRNMVGAGEVDEDLEVETKEECEKYGKVGKCVIFEIPGAPDDEAVRIFLEFERVESAIKAVVDLNGRYFGGRVVKACFYNLDKFRVLDLAEQV

SEQ ID NO: 62388 - protein, 212 aa, Homo sapiens
MSLYDDLGVETSDSKTEGWSKNFKLLQSQLQVKKAALTQAKSQRTKQSTVLAPVIDLKRGGSSDDRQIVDTPPHVAAGLKDPVPSGFSAGEVLIPLADEYDPMFPNDYEKVVKRQREERQRQRELERQKEIEEREKRRKDRHEASGFARRPDPDSDEDEDYERERRKRSMGGAAIAPPTSLVEKDKELPRDFPYEEDSRPRSQSSKAAIPPP

SEQ ID NO: 62389 - protein, 221 aa, Homo sapiens
MSLYDDLGVETSDSKTEGWSKNFKLLQSQLQVKKAALTQAKSQRTKQSTVLAPVIDLKRGGSSDDRQIVDTPPHVAAGLKDPVPSGFSAGEVLIPLADEYDPMFPNDYEKVVKRQREERQRQRELERQKEIEEREKRKDRHEASGFARRPDPDSDEDEDYERERRKRSMGGAAIAPPTSLVEKDKELPRDFPYEEDSRPRSQSSKAAIPPPVYEEQDRPRS

SEQ ID NO: 62390 - protein, 243 aa, Homo sapiens; identical to SEQ ID NO: 62386

SEQ ID NO: 62391 - protein, 401 aa, Homo sapiens; identical to SEQ ID NO: 62387

SEQ ID NO: 62392 - protein, 225 aa, Homo sapiens
  VARIANT 1: note = MOD_RES - Any amino acid
XPLADEYDPMFPNDYEKVVKRQREERQRQRELERQKEIEEREKRRKDRHEASGFARRPDPDSDEDEDYERERRKRSMGGAAIAPPTSLVEKDKELPRDFPYEEDSRPRSQSSKAAIPPPVYEEQDRPRSPTGPSNSFLANMGGTVAHKIMQKYGFREGQGLGKHEQGLSTALSVEKTSKRGGKIIVGDATEKGVSPGKRVTRGKGLAPSISDMASLDPHVSAGGQ

SEQ ID NO: 62393 - protein, 1227 aa, Homo sapiens
MVLAAAMSQDADPSGPEQPDRVACSVPGARASPAPSGPRGMQQPPPPPQPPPPPQAGLPQIIQNAAKLLDKNPFSVSNPNPLLPSPASLQLAQLQAQLTLHRLKLAQTAVTNNTAAATVLNQVLSKVAMSQPLFNQLRHPSVITGPHGHAGVPQHAAAIPSTRFPSNAIAFSPPSQTRGPGPSMNLPNQPPSAMVMHPFTGVMPQTPGQPAVILGIGKTGPAPATAGFYEYGKASSGQTYGPETDGQPGFLPSSASTSGSVTYEGHYSHTGQDGQAAFSKDFYGPNSQGSHVASGFPAEQAGGLKSEVGPLLQGTNSQWESPHGFSGQSKPDLTAGPMWPPPHNQPYELYDPEEPTSDRTPPSFGGRLNNSKQGFIGAGRRAKEDQALLSVRPLQAHELNDFHGVAPLHLPHICSICDKKVFDLKDWELHVKGKLHAQKCLVFSENAGIRCILGSAEGTLCASPNSTAVYNPAGNEDYASNLGTSYVPIPARSFTQSSPTFPLASVGTTFAQRKGAGRVVHICNLPEGSCTENDVINLGLPFGKVTNYILMKSTNQAFLEMAYTEAAQAMVQYYQEKSAVINGEKLLIRMSKRYKELQLKKPGKAVAAIIQDIHSQRERDMFREADRYGPERPRSRSPVSRSLSPRSHTPSFTSCSSSHSPPGPSRADWGNGRDSWEHSPYARREEERDPAPWRDNGDDKRDRMDPWAHDRKHHPRQLDKAELDERPEGGRPHREKYPRSGSPNLPHSVSSYKSREDGYYRKEPKAKWDKYLKQQQDAPGRSRRKDEARLRESRHPHPDDSGKEDGLGPKVTRAPEGAKAKQNEKNKTKRTDRDQEGADDRKENTMAENEAGKEEQEGMEESPQSVGRQEKEAEFSDPENTRTKKEQDWESESEAEGESWYPTNMEELVTVDEVGEEEDFIVEPDIPELEEIVPIDQKDKICPETCLCVTTTLDLDLAQDFPKEGVKAVGNGAAEISLKSPRELPSASTSCPSDMDVEMPGLNLDAERKPAESETGLSLEDSDCYEKEAKGVESSDVHPAPTVQQMSSPKPAEERARQPSPFVDDCKTRGTPEDGACEGSPLEEKASPPIETDLQNQACQEVLTPENSRYVEMKSLEVRSPEYTEVELKQPLSLPSWEPEDVFSELSIPLGVEFVVPRTGFYCKLCGLFYTSEETAKMSHCRSAVHYRNLQKYLSQLAEEGLKETEGADSPRPEDSGIVPRFERKKL

SEQ ID NO: 62394 - protein, 1125 aa, Homo sapiens
MVLAAAMSQDADPSGPEQPDRVACSVPGARASPAPSGPRGMQQPPPPPQPPPPPQAGLPQIIQNAAKLLDKNPFSVSNPNPLLPSPASLQLAQLQAQLTLHRLKLAQTAVTNNTAAATVLNQVLSKVAMSQPLFNQLRHPSVITGPHGHAGVPQHAAAIPSTRFPSNAIAFSPPSQTRGPGPSMNLPNQPPSAMVMHPFTGVMPQTPGQPAVILGIGKTGPAPATAGFYEYGKASSGQTYGPETDGQPGFLPSSASTSGSVTYEGHYSHTGQDGQAAFSKDFYGPNSQGSHVASGFPAEQAGGLKSEVGPLLQGTNSQWESPHGFSGQSKPDLTAGPMWPPPHNQPYELYDPEEPTSDRTPPSFGGRLNNSKQGFIGAGRRAKEDQALLSVRPLQAHELNDFHGVAPLHLPHICSICDKKVFDLKDWELHVKGKLHAQKCLVFSENAGIRCILGSAEGTLCASPNSTAVYNPAGNEDYASNLGTSYVPIPARSFTQSSPTFPLASVGTTFAQRKGAGRVVHICNLPEGSCTENDVINLGLPFGKVTNYILMKSTNQAFLEMAYTEAAQAMVQYYQEKSAVINGEKLLIRMSKRYKELQLKKPGKAVAAIIQDIHSQRERDMFREADRYGPERPRSRSPVSRSLSPRSHTPSFTSCSSSHSPPGPSRADWGNGRDSWEHSPYARREEERDPAPWRDNGDDKRDRMDPWAHDRKHHPRQLDKAELDERPEGGRPHREKYPRSGSPNLPHSVSSYKSREDGYYRKEPKAKWDKYLKQQQDAPGRSRRKDEARLRESRHPHPDDSGKEDGLGPKVTRAPEGAKAKQNEKNKTKRTDRDQEGADDRKENTMAENEAGKEEQEGMEESPQSVGRQEKEAEFSDPENTRTKKEQDWESESEAEGESWYPTNMEELVTVDEVGEEEDFIVEPDIPELEEIVPIDQKDKICPETCLCVTTTLDLDLAQDFPKEGVKAVGNGAAEISLKSPRELPSASTSCPSDMDVEMPGLNLDAERKPAESETGLSLEDSDCYEKEAKGVESSDVHPAPTVQQMSSPKPAEERARQPSPFVDDCKTRGTPEDGACEGSPLEEKASPPIETDLQNQACQGSDSDTRLVSGYSLTPLEKTPGTWK

SEQ ID NO: 62395 - protein, 420 aa, Homo sapiens
MATSLGSNTYNRQNWEDADFPILCQTCLGENPYIRMTKEKYGKECKICARPFTVFRWCPGVRMRFKKTEVCQTCSKLKNVCQTCLLDLEYGLPIQVRDAGLSFKDDMPKSDVNKEYYTQNMEREISNSDGTRPVGMLGKATSTSDMLLKLARTTPYYKRNRPHICSFWVKGECKRGEECPYRHEKPTDPDDPLADQNIKDRYYGINDPVADKLLKRASTMPRLDPPEDKTITTLYVGGLGDTITETDLRNHFYQFGEIRTITVVQRQQCAFIQFATRQAAEVAAEKSFNKLIVNGRRLNVKWGRSQAARGKEKEKDGTTDSGIKLEPVPGLPGALPPPPAAEEEASANYFNLPPSGPPAVVNIALPPPPGIAPPPPPGFGPHMFHPMGPPPPFMRAPGPIHYPSQDPQRMGAHAGKHSSP

SEQ ID NO: 62396 - protein, 371 aa, Homo sapiens
MATSLGSNTYNRQNWEDADFPILCQTCLGENPYIRMTKEKYGLPIQVRDAGLSFKDDMPKSDVNKEYYTQNMEREISNSDGTRPVGMLGKATSTSDMLLKLARTTPYYKRNRPHICSFWVKGECKRGEECPYRHEKPTDPDDPLADQNIKDRYYGINDPVADKLLKRASTMPRLDPPEDKTITTLYVGGLGDTITETDLRNHFYQFGEIRTITVVQRQQCAFIQFATRQAAEVAAEKSFNKLIVNGRRLNVKWGRSQAARGKEKEKDGTTDSGIKLEPVPGLPGALPPPPAAEEEASANYFNLPPSGPPAVVNIALPPPPGIAPPPPPGFGPHMFHPMGPPPPFMRAPGPIHYPSQDPQRMGAHAGKHSSP

SEQ ID NO: 62397 - protein, 371 aa, Homo sapiens
MATSLGSNTYNRQNWEDADFPILCQTCLGENPYIRMEREKSGLPIQVRDAGLSFKDDMPKSDVNKEYYTQNMEREISNSDGTRPVGMLGKATSTSDMLLKLARTTPYYKRNRPHICSFWVKGECKRGEECPYRHEKPTDPDDPLADQNIKDRYYGINDPVADKLLKRASTMPRLDPPEDKTITTLYVGGLGDTITETDLRNHFYQFGEIRTITVVQRQQCAFIQFATRQAAEVAAEKSFNKLIVNGRRLNVKWGRSQAARGKEKEKDGTTDSGIKLEPVPGLPGALPPPPAAEEEASANYFNLPPSGPPAVVNIALPPPPGIAPPPPPGFGPHMFHPMGPPPPFMRAPGPIHYPSQDPQRMGAHAGKHSSP

SEQ ID NO: 62398 - protein, 843 aa, Homo sapiens
MSFPPHLNRPPMGIPALPPGIPPPQFPGFPPPVPPGTPMIPVPMSIMAPAPTVLVPTVSMVGKHLGARKDHPGLKAKENDENCGPTTTVFVGNISEKASDMLIRQLLAKCGLVLSWKRVQGASGKLQAFGFCEYKEPESTLRALRLLHDLQIGEKKLLVKVDAKTKAQLDEWKAKKKASNGNARPETVTNDDEEALDEETKRRDQMIKGAIEVLIREYSSELNAPSQESDSHPRKKKKEKKEDIFRRFPVAPLIPYPLITKEDINAIEMEEDKRDLISREISKFRDTHKKLEEEKGKKEKERQEIEKERRERERERERERERREREREREREREREKEKERERERERDRDRDRTKERDRDRDRERDRDRDRERSSDRNKDRSRSREKSRDREREREREREREREREREREREREREREREREREREKDKKRDREEDEEDAYERRKLERKLREKEAAYQERLKNWEIRERKKTREYEKEAEREEERRREMAKEAKRLKEFLEDYDDDRDDPKYYRGSALQKRLRDREKEMEADERDRKREKEELEEIRQRLLAEGHPDPDAELQRMEQEAERRRQPQIKQEPESEEEEEEKQEKEEKREEPMEEEEEPEQKPCLKPTLRPISSAPSVSSASGNATPNTPGDESPCGIIIPHENSPDQQQPEEHRPKIGLSLKLGASNSPGQPNSVKRKKLPVDSVFNKFEDEDSDDVPRKRKLVPLDYGEDDKNATKGTVNTEEKRKHIKSLIEKIPTAKPELFAYPLDWSIVDSILMERRIRPWINKKIIEYIGEEEATLVDFVCSKVMAHSSPQSILDDVAMVLDEEAEVFIVKMWRLLIYETEAKKIGLVK

SEQ ID NO: 62399 - protein, 127 aa, Homo sapiens
MSFPPHLNRPPMGIPALPPGIPPPQFPGFPPPVPPGTPMIPVPMSIMAPAPTVLVPTVSMVGKHLGARKDHPGLKAKENDENCGPTTTVFVGNISEKASDMLIRQLLAKCGLVLSWKRVQGASGKLQ

SEQ ID NO: 62400 - protein, 300 aa, Homo sapiens
MSFPPHLNRPPMGIPALPPGIPPPQFPGFPPPVPPGTPMIPVPMSIMAPAPTVLVPTVSMVGKHLGARKDHPGLKAKENDENCGPTTTVFVGNISEKASDMLIRQLLAKCGLVLSWKRVQGASGKLQAFGFCEYKEPESTLRALRLLHDLQIGEKKLLVKVDAKTKAQLDEWKAKKKASNGNARPETVTNDDEEALDEETKRRDQMIKGAIEVLIREYSSELNAPSQESDSHPRKKKKEKKEDIFRRFPVAPLIPYPLITKEDINAIEMEEDKRDLISREISKFRDTHKVVFLSFHLIPI

SEQ ID NO: 62401 - protein, 294 aa, Homo sapiens
MSFPPHLNRPPMGIPALPPGIPPPQFPGFPPPVPPGTPMIPVPMSIMAPAPTVLVPTVSMVGKHLGARKDHPGLKAKENDENCGPTTTVFVGNISEKASDMLIRQLLAKCGLVLSWKRVQGASGKLQAFGFCEYKEPESTLRALRLLHDLQIGEKKLLVKVDAKTKAQLDEWKAKKKASNGNARPETVTNDDEEALDEETKRRDQMIKGAIEVLIREYSSELNAPSQESDSHPRKKKKEKKEDIFRRFPVAPLIPYPLITKEDINAIEMEEDKRDLISREISKFRDTHKRSYGD

SEQ ID NO: 62402 - protein, 843 aa, Homo sapiens; identical to SEQ ID NO: 62398

SEQ ID NO: 62403 - protein, 243 aa, Homo sapiens
MSFPPHLNRPPMGIPALPPGIPPPQFPGFPPPVPPGTPMIPVPMSIMAPAPTVLVPTVSMVGKHLGARKDHPGLKAKENDENCGPTTTVFVGNISEKASDMLIRQLLAKCGLVLSWKRVQGASGKLQAFGFCEYKEPESTLRALRLLHDLQIGEKKLLVKVDAKTKAQLDEWKAKKKASNGNARPETVTNDDEEALDEETKRRDQMIKGAIEVLIREYSSELNAPSQESDSHPRKKKKEKKED

SEQ ID NO: 62404 - protein, 294 aa, Homo sapiens; identical to SEQ ID NO: 62401

SEQ ID NO: 62405 - protein, 759 aa, Homo sapiens
MAGLTLFVGRLPPSARSEQLEELFSQVGPVKQCFVVTEKGSKACRGFGYVTFSMLEDVQRALKEITTFEGCKINVTVAKKKLRNKTKEKGKNENSECPKKEPKAKKAKVADKKARLIIRNLSFKCSEDDLKTVFAQFGAVLEVNIPRKPDGKMRGFGFVQFKNLLEAGKALKGMNMKEIKGRTVAVDWAVAKDKYKDTQSVSAIGEEKSHESKHQESVKKKGREEEDMEEEENDDDDDDDDEEDGVFDDEDEEEENIESKVTKPVQIQKRAVKRPAPAKSSDHSEEDSDLEESDSIDDGEELAQSDTSTEEQEDKAVQVSNKKKRKLPSDVNEGKTVFIRNLSFDSEEEELGELLQQFGELKYVRIVLHPDTEHSKGCAFAQFMTQEAAQKCLLAASPENEAGGLKLDGRQLKVDLAVTRDEAAKLQTTKVKKPTGTRNLYLAREGLIRAGTKAAEGVSAADMAKRERFELLKHQKLKDQNIFVSRTRLCLHNLPKAVDDKQLRKLLLSATSGEKGVRIKECRVMRDLKGVHGNMKGQSLGYAFAEFQEHEHALKALRLINNNPEIFGPLKRPIVEFSLEDRRKLKMKELRIQRSLQKMRSKPATGEPQKGQPEPAKDQQQKAAQHHTEEQSKVPPEQKRKAGSTSWTGFQTKAEVEQVELPDGKKRRKVLALPSHRGPKIRLRDKGKVKPVHPKKPKPQINQWKQEKQQLSSEQVSRKKAKGNKTETRFNQLVEQYKQKLLGPSKGAPLAKRSKWFDS

SEQ ID NO: 62406 - protein, 618 aa, Homo sapiens
MAGLTLFVGRLPPSARSEQLEELFSQVGPVKQCFVVTEKGRTVAVDWAVAKDKYKDTQSVSAIGEEKSHESKHQESVKKKGREEEDMEEEENDDDDDDDDEEDGVFDDEDEEEENIESKVTKPVQIQKRAVKRPAPAKSSDHSEEDSDLEESDSIDDGEELAQSDTSTEEQEDKAVQVSNKKKRKLPSDVNEGKTVFIRNLSFDSEEEELGELLQQFGELKYVRIVLHPDTEHSKGCAFAQFMTQEAAQKCLLAASPENEAGGLKLDGRQLKVDLAVTRDEAAKLQTTKVKKPTGTRNLYLAREGLIRAGTKAAEGVSAADMAKRERFELLKHQKLKDQNIFVSRTRLCLHNLPKAVDDKQLRKLLLSATSGEKGVRIKECRVMRDLKGVHGNMKGQSLGYAFAEFQEHEHALKALRLINNNPEIFGPLKRPIVEFSLEDRRKLKMKELRIQRSLQKMRSKPATGEPQKGQPEPAKDQQQKAAQHHTEEQSKVPPEQKRKAGSTSWTGFQTKAEVEQVELPDGKKRRKVLALPSHRGPKIRLRDKGKVKPVHPKKPKPQINQWKQEKQQLSSEQVSRKKAKGNKTETRFNQLVEQYKQKLLGPSKGAPLAKRSKWFDS

SEQ ID NO: 62407 - protein, 239 aa, Homo sapiens
MLLQPAPCAPSAGFPRPLAAPGAMHGSQKDTTFTKIFVGGLPYHTTDASLRKYFEGFGDIEEAVVITDRQTGKSRGYGFVTMADRAAAERACKDPNPIIDGRKANVNLAYLGAKPRSLQTGFAIGVQQLHPTLIQRTYGLTPHYIYPPAIVQPSVVIPAAPVPSLSSPYIEYTPASPAYAQYPPATYDQYPYAASPATAASFVGYSYPAAVPQALSAAAPAGTTFVQYQAPQLQPDRMQ

SEQ ID NO: 62408 - protein, 158 aa, Homo sapiens
MADRAAAERACKDPNPIIDGRKANVNLAYLGAKPRSLQTGFAIGVQQLHPTLIQRTYGLTPHYIYPPAIVQPSVVIPAAPVPSLSSPYIEYTPASPAYAQYPPATYDQYPYAASPATAASFVGYSYPAAVPQALSAAAPAGTTFVQYQAPQLQPDRMQ

SEQ ID NO: 62409 - protein, 121 aa, Homo sapiens
MLLQPAPCAPSAGFPRPLAAPGAMHGSQKDTTFTKIFVGGLPYHTTDASLRKYFEGFGDIEEAVVITDRQTGKSRGYGFVTMADRAAAERACKDPNPIIDGRKANVNLAYLGAKPRSLQTG

SEQ ID NO: 62410 - protein, 364 aa, Homo sapiens
MVKLFIGNLPREATEQEIRSLFEQYGKVLECDIIKNYGFVHIEDKTAAEDAIRNLHHYKLHGVNINVEASKNKSKTSTKLHVGNISPTCTNKELRAKFEEYGPVIECDIVKDYAFVHMERAEDAVEAIRGLDNTEFQGKRMHVQLSTSRLRTAPGMGDQSGCYRCGKEGHWSKECPIDRSGRVADLTEQYNEQYGAVRTPYTMSYGDSLYYNNAYGALDAYYKRCRAARSYEAVAAAAASVYNYAEQTLSQLPQVQNTAMASHLTSTSLDPYDRHLLPTSGAAATAAAAAAAAAAVTAASTSYYGRDRSPLRRATAPVPTVGEGYGYGHESELSQASAAARNSLYDMARYEREQYADRARYSAF

SEQ ID NO: 62411 - protein, 364 aa, Homo sapiens; identical to SEQ ID NO: 62410

SEQ ID NO: 62412 - protein, 364 aa, Homo sapiens; identical to SEQ ID NO: 62410

SEQ ID NO: 62413 - protein, 177 aa, Homo sapiens
MVKLFIGNLPREATEQEIRSLFEQYGKVLECDIIKNYGFVHIEDKTAAEDAIRNLHHYKLHGVNINVEASKNKSKTSTKLHVGNISPTCTNKELRAKFEEYGPVIECDIVKDYAFVHMERAEDAVEAIRGLDNTEFQGEPPSLGRGLNTRLCAENGWISKRRGLVKITAVGWLVMKK

SEQ ID NO: 62414 - protein, 177 aa, Homo sapiens; identical to SEQ ID NO: 62413

SEQ ID NO: 62415 - protein, 173 aa, Homo sapiens
MVKLFIGNLPREATEQEIRSLFEQYGKVLECDIIKNYGFVHIEDKTAAEDAIRNLHHYKLHGVNINVEASKNKSKTSTKLHVGNISPTCTNKELRAKFEEYGPVIECDIVKDYAFVHMERAEDAVEAIRGLDNTEFQGKITPVTEGYCCCNKGHTYIFKNCNLILESRKSRRC

SEQ ID NO: 62416 - protein, 143 aa, Homo sapiens
MVKLFIGNLPREATEQEIRSLFEQYGKVLECDIIKNYGFVHIEDKTAAEDAIRNLHHYKLHGVNINVEASKNKSKTSTKLHVGNISPTCTNKELRAKFEEYGPVIECDIVKDYAFVHMERAEDAVEAIRGLDNTEFQGGMCVG

SEQ ID NO: 62417 - protein, 480 aa, Homo sapiens
MAGAGPAPGLPGAGGPVVPGPGAGIPGKSGEERLKEMEAEMALFEQEVLGAPVPGIPTAVPAVPTVPTVPTVEAMQVPAAPVIRPIIATNTYQQVQQTLEARAAAAATVVPPMVGGPPFVGPVGFGPGDRSHLDSPEAREAMFLRRAAVAPQRAPILRPAFVPHVLQRADSALSSAAAGPRPMALRPPHQALVGPPLPGPPGPPMMLPPMARAPGPPLGSMAALRPPLEEPAAPRELGLGLGLGLKEKEEAVVAAAAGLEEASAAVAVGAGGAPAGPAVIGPSLPLALAMPLPEPEPLPLPLEVVRGLLPPLRIPELLSLRPRPRPPRPEPPPGLMALEVPEPLGEDKKKGKPEKLKRCIRTAAGSSWEDPSLLEWDADDFRIFCGDLGNEVNDDILARAFSRFPSFLKAKVIRDKRTGKTKGYGFVSFKDPSDYVRAMREMNGKYVGSRPIKLRKSMWKDRNLDVVRKKQKEKKKLGLR

SEQ ID NO: 62418 - protein, 451 aa, Homo sapiens
MAGAGPAPGLPGAGGPVVPGPGAGIPGKSGEERLKEMEAEMALFEQEVLGAPVPGIPTAVPAVPTVPTVPTVEAMQVPAAPVIRPIIATNTYQQVQQTLEARAAAAATVVPPMVGGPPFVGPVGFGPGDRSHLDSPEAREAMFLRRAAAGPRPMALRPPHQALVGPPLPGPPGPPMMLPPMARAPGPPLGSMAALRPPLEEPAAPRELGLGLGLGLKEKEEAVVAAAAGLEEASAAVAVGAGGAPAGPAVIGPSLPLALAMPLPEPEPLPLPLEVVRGLLPPLRIPELLSLRPRPRPPRPEPPPGLMALEVPEPLGEDKKKGKPEKLKRCIRTAAGSSWEDPSLLEWDADDFRIFCGDLGNEVNDDILARAFSRFPSFLKAKVIRDKRTGKTKGYGFVSFKDPSDYVRAMREMNGKYVGSRPIKLRKSMWKDRNLDVVRKKQKEKKKLGLR

SEQ ID NO: 62419 - protein, 266 aa, Homo sapiens
MGAAAAEADRTLFVGNLETKVTEELLFELFHQAGPVIKVKIPKDKDGKPKQFAFVNFKHEVSVPYAMNLLNGIKLYGRPIKIQFRSGSSHAPQDVSLSYPQHHVGNSSPTSTSPSRYERTMDNMTSSAQIIQRSFSSPENFQRQAVMNSALRQMSYGGKFGSSPLDQSGFSPSVQSHSHSFNQSSSSQWRQGTPSSQRKVRMNSYPYLADRHYSREQRYTDHGSDHHYRGKRDDFFYEDRNHDDWSHDYDNRRDSSRDGKWRSSRH

SEQ ID NO: 62420 - protein, 174 aa, Homo sapiens
MADVLDLHEAGGEDFAMDEDGDESIHKLKEKAKKRKGRGFGSEEGSRARMREDYDSVEQDGDEPGPQRSVEGWILFVTGVHEEATEEDIHDKFAEYGEIKNIHLNLDRRTGYLKGYTLVEYETYKEAQAAMEGLNGQDLMGQPISVDWCFVRGPPKGKRRGGRRRSRSPDRRRR

SEQ ID NO: 62421 - protein, 173 aa, Homo sapiens
MADVLDLHEAGGEDFAMDEDGDESIHKLKEKAKKRKGRGFGSEGSRARMREDYDSVEQDGDEPGPQRSVEGWILFVTGVHEEATEEDIHDKFAEYGEIKNIHLNLDRRTGYLKGYTLVEYETYKEAQAAMEGLNGQDLMGQPISVDWCFVRGPPKGKRRGGRRRSRSPDRRRR

SEQ ID NO: 62422 - protein, 392 aa, Homo sapiens
MVEADRPGKLFIGGLNLETDEKALEAEFGKYGRIVEVLLMKDRETNKSRGFAFVTFESPADAKAAARDMNGKSLDGKAIKVAQATKPAFESSRRGPPPPRSRGRPRFLRGTRGGGGGPRRSPSRGGPDDDGGYTADFDLRPSRAPMPMKRGPPPRRVGPPPKRAAPSGPARSSGGGMRGRALAVRGRDGYSGPPRREPLPPRRDPYLGPRDEGYSSRDGYSSRDYREPRGFAPSPGEYTHRDYGHSSVRDDCPLRGYSDRDGYGGRDRDYGDHLSRGSHREPFESYGELRGAAPGRGTPPSYGGGGRYEEYRGYSPDAYSGGRDSYSSSYGRSDRYSRGRHRVGRPDRGLSLSMERGCPPQRDSYSRSGCRVPRGGGRLGGRLERGGGRSRY

SEQ ID NO: 62423 - protein, 496 aa, Homo sapiens
MVEADHPGKLFIGGLNRETNEKMLKAVFGKHGPISEVLLIKDRTSKSRGFAFITFENPADAKNAAKDMNGKSLHGKAIKVEQAKKPSFQSGGRRRPPASSRNRSPSGSLRSARGSRGGTRGWLPSHEGHLDDGGYTPDLKMSYSRGLIPVKRGPSSRSGGPPPKKSAPSAVARSNSWMGSQGPMSQRRENYGVPPRRATISSWRNDRMSTRHDGYATNDGNHPSCQETRDYAPPSRGYAYRDNGHSNRDEHSSRGYRNHRSSRETRDYAPPSRGHAYRDYGHSRRDESYSRGYRNRRSSRETREYAPPSRGHGYRDYGHSRRHESYSRGYRNHPSSRETRDYAPPHRDYAYRDYGHSSWDEHSSRGYSYHDGYGEALGRDHSEHLSGSSYRDALQRYGTSHGAPPARGPRMSYGGSTCHAYSNTRDRYGRSWESYSSCGDFHYCDREHVCRKDQRNPPSLGRVLPDPREACGSSSYVASIVDGGESRSEKGDSSRY

SEQ ID NO: 62424 - protein, 496 aa, Homo sapiens; identical to SEQ ID NO: 62423

SEQ ID NO: 62425 - protein, 289 aa, Homo sapiens
MSTRHDGYATNDGNHPSCQETRDYAPPSRGYAYRDNGHSNRDEHSSRGYRNHRSSRETRDYAPPSRGHAYRDYGHSRRDESYSRGYRNRRSSRETREYAPPSRGHGYRDYGHSRRHESYSRGYRNHPSSRETRDYAPPHRDYAYRDYGHSSWDEHSSRGYSYHDGYGEALGRDHSEHLSGSSYRDALQRYGTSHGAPPARGPRMSYGGSTCHAYSNTRDRYGRSWESYSSCGDFHYCDREHVCRKDQRNPPSLGRVLPDPREACGSSSYVASIVDGGESRSEKGDSSRY

SEQ ID NO: 62426 - protein, 421 aa, Homo sapiens
MGKRLDQPQMYPQYTYYYPHYLQTKQSYAPAPHPMAPPSPSTNSSSNNSSNNSSGEQLSKTNLYIRGLPPGTTDQDLIKLCQPYGKIVSTKAILDKNTNQCKGYGFVDFDSPAAAQKAVASLKANGVQAQMAKQQEQDPTNLYISNLPISMDEQELENMLKPFGHVISTRILRDANGVSRGVGFARMESTEKCEVVIQHFNGKYLKTPPGIPAPSEPLLCKFADGGQKKRQNQSKYTQNGRPWPREGEAGMALTYDPTAAIQNGFYSSPYSIATNRMIPQTSITPFIAASPVSTYQVQSTSWMPHPPYVMQPTGAVITPTMDHPMSMQPANMMGPLTQQMNHLSLGTTGTYMTAAAPMQGTYIPQYTPVPPTAVSIEGVVADTSPQTVAPSSQDTSGQQQQIAVDTSNEHAPAYSYQQSKP

SEQ ID NO: 62427 - protein, 420 aa, Homo sapiens
MGKRLDQPQMYPQYTYYYPHYLQTKQSYAPAPHPMAPPSPSTNSSSNNSSNNSSGEQLSKTNLYIRGLPPGTTDQDLIKLCQPYGKIVSTKAILDKNTNQCKGYGFVDFDSPAAAQKAVASLKANGVQAQMAKQQEQDPTNLYISNLPISMDEQELENMLKPFGHVISTRILRDANGVSRGVGFARMESTEKCEVVIQHFNGKYLKTPPGIPAPSEPLLCKFADGGQKKRQNQSKYTQNGRPWPREGEAGMALTYDPTAAIQNGFYSSPYSIATNRMIPQTSITPFIAASPVSTYQVQSTSWMPHPPYVMQPTGAVITPTMDHPMSMQPANMMGPLTQQMNHLSLGTTGTYMTAAAPMQGTYIPQYTPVPPTAVSIEGVVADTSPQTVAPSSQDTSGQQQQIAVDTSNEHAPAYSYQQSK

SEQ ID NO: 62428 - protein, 419 aa, Homo sapiens
MGKRLDQPQMYPQYTYYYPHYLQTKSYAPAPHPMAPPSPSTNSSSNNSSNNSSGEQLSKTNLYIRGLPPGTTDQDLIKLCQPYGKIVSTKAILDKNTNQCKGYGFVDFDSPAAAQKAVASLKANGVQAQMAKQQEQDPTNLYISNLPISMDEQELENMLKPFGHVISTRILRDANGVSRGVGFARMESTEKCEVVIQHFNGKYLKTPPGIPAPSEPLLCKFADGGQKKRQNQSKYTQNGRPWPREGEAGMALTYDPTAAIQNGFYSSPYSIATNRMIPQTSITPFIAASPVSTYQGAVITPTMDHPMSMQPANMMGPLTQQMNHLSLGTTGTIQSQDRIMILHQLLCQYMTAAAPMQGTYIPQYTPVPPTAVSIEGVVADTSPQTVAPSSQDTSGQQQQIAVDTSNEHAPAYSYQQSKP

SEQ ID NO: 62429 - protein, 437 aa, Homo sapiens
MGKRLDQPQMYPQYTYYYPHYLQTKQSYAPAPHPMAPPSPSTNSSSNNSSNNSSGEQLSKTNLYIRGLPPGTTDQDLIKLCQPYGKIVSTKAILDKNTNQCKGYGFVDFDSPAAAQKAVASLKANGVQAQMAKQQEQDPTNLYISNLPISMDEQELENMLKPFGHVISTRILRDANGVSRGVGFARMESTEKCEVVIQHFNGKYLKTPPGIPAPSEPLLCKFADGGQKKRQNQSKYTQNGRPWPREGEAGMALTYDPTAAIQNGFYSSPYSIATNRMIPQTSITPFIAASPVSTYQVQSTSWMPHPPYVMQPTGAVITPTMDHPMSMQPANMMGPLTQQMNHLSLGTTGTIQSQDRIMILHQLLCQYMTAAAPMQGTYIPQYTPVPPTAVSIEGVVADTSPQTVAPSSQDTSGQQQQIAVDTSNEHAPAYSYQQSKP

SEQ ID NO: 62430 - protein, 434 aa, Homo sapiens
MGKRLDQPQMYPQYTYYYPHYLQTKQSYAPAPHPMAPPSPSTNSSSNNSSNNSSGEQLSKTNLYIRGLPPGTTDQDLIKLCQPYGKIVSTKAILDKNTNQCKGYGFVDFDSPAAAQKAVASLKANGVQAQMAKQQEQDPTNLYISNLPISMDEQELENMLKPFGHVISTRILRDANGVSRGVGFARMESTEKCEVVIQHFNGKYLKTPPGIPAPSEPLLCKFADGGQKKRQNQSKYTQNGRPWPREGEVLRGRTVPRQNREAGMALTYDPTAAIQNGFYSSPYSIATNRMIPQTSITPFIAASPVSTYQVQSTSWMPHPPYVMQPTGAVITPTMDHPMSMQPANMMGPLTQQMNHLSLGTTGTYMTAAAPMQGTYIPQYTPVPPTAVSIEGVVADTSPQTVAPSSQDTSGQQQQIAVDTSNEHAPAYSYQQSKP

SEQ ID NO: 62431 - protein, 436 aa, Homo sapiens
MGKRLDQPQMYPQYTYYYPHYLQTKSYAPAPHPMAPPSPSTNSSSNNSSNNSSGEQLSKTNLYIRGLPPGTTDQDLIKLCQPYGKIVSTKAILDKNTNQCKGYGFVDFDSPAAAQKAVASLKANGVQAQMAKQQEQDPTNLYISNLPISMDEQELENMLKPFGHVISTRILRDANGVSRGVGFARMESTEKCEVVIQHFNGKYLKTPPGIPAPSEPLLCKFADGGQKKRQNQSKYTQNGRPWPREGEAGMALTYDPTAAIQNGFYSSPYSIATNRMIPQTSITPFIAASPVSTYQVQSTSWMPHPPYVMQPTGAVITPTMDHPMSMQPANMMGPLTQQMNHLSLGTTGTIQSQDRIMILHQLLCQYMTAAAPMQGTYIPQYTPVPPTAVSIEGVVADTSPQTVAPSSQDTSGQQQQIAVDTSNEHAPAYSYQQSKP

SEQ ID NO: 62432 - protein, 433 aa, Homo sapiens
MGKRLDQPQMYPQYTYYYPHYLQTKQSYAPAPHPMAPPSPSTNSSSNNSSNNSSGEQLSKTNLYIRGLPPGTTDQDLIKLCQPYGKIVSTKAILDKNTNQCKGYGFVDFDSPAAAQKAVASLKANGVQAQMAKQQEQDPTNLYISNLPISMDEQELENMLKPFGHVISTRILRDANGVSRGVGFARMESTEKCEVVIQHFNGKYLKTPPGIPAPSEPLLCKFADGGQKKRQNQSKYTQNGRPWPREGEVLRGRTVPRQNREAGMALTYDPTAAIQNGFYSSPYSIATNRMIPQTSITPFIAASPVSTYQVQSTSWMPHPPYVMQPTGAVITPTMDHPMSMQPANMMGPLTQQMNHLSLGTTGTYMTAAAPMQGTYIPQYTPVPPTAVSIEGVVADTSPQTVAPSSQDTSGQQQQIAVDTSNEHAPAYSYQQSK

SEQ ID NO: 62433 - protein, 204 aa, Homo sapiens
MNNGGKAEKENTPSEANLQEEEVRTLFVSGLPLDIKPRELYLLFRPFKGYEGSLIKLTSKQPVGFVSFDSRSEAEAAKNALNGIRFDPEIPQTLRLEFAKANTKMAKNKLVGTPNPSTPLPNTVPQFIAREPYELTVPALYPSSPEVWAPYPLYPAELAPALPPPAFTYPASLHAQLCEGQTVRRSHPLSAPSPDSASLAWFPV

SEQ ID NO: 62434 - protein, 196 aa, Homo sapiens
MNNGGKAEKENTPSEANLQEEEVRTLFVSGLPLDIKPRELYLLFRPFKGYEGSLIKLTSKQPVGFVSFDSRSEAEAAKNALNGIRFDPEIPQTLRLEFAKANTKMAKNKLVGTPNPSTPLPNTVPQFIAREPYELTVPALYPSSPEVWAPYPLYPAELAPALPPPAFTYPASLHAQMRWLPPSEATSQGWKSRQFC

SEQ ID NO: 62435 - protein, 219 aa, Homo sapiens
MNNGGKAEKENTPSEANLQEEEVRTLFVSGLPLDIKPRELYLLFRPFKGYEGSLIKLTSKQPVGFVSFDSRSEAEAAKNALNGIRFDPEIPQTLRLEFAKANTKMAKNKLVGTPNPSTPLPNTVPQFIAREPYELTVPALYPSSPEVWAPYPLYPAELAPALPPPAFTYPASLHAQCFSPEAKPNTPVFCPLLQQIRFVSGNVFVTYQPTADQQRELPC

SEQ ID NO: 62436 - protein, 196 aa, Homo sapiens; identical to SEQ ID NO: 62434

SEQ ID NO: 62437 - protein, 153 aa, Homo sapiens
MNNGGKAEKENTPSEANLQEEEVRTLFVSGLPLDIKPRELYLLFRPFKGYEGSLIKLTSKQPVGFVSFDSRSEAEAAKNALNGIRFDPEIPQTLRLEFAKANTKMAKNKLVGTPNPSTPLPNTVPQFIAREPLMRWLPPSEATSQGWKSRQFC

SEQ ID NO: 62438 - protein, 418 aa, Homo sapiens
MLASQGVLLHPYGVPMIVPAAPYLPGLIQGNQEAAAAPDTMAQPYASAQFAPPQNGIPAEYTAPHPHPAPEYTGQTTVPEHTLNLYPPAQTHSEQSPADTSAQTVSGTATQTDDAAPTDGQPQTQPSENTENKSQPKRLHVSNIPFRFRDPDLRQMFGQFGKILDVEIIFNERGSKGFGFVTFENSADADRAREKLHGTVVEGRKIEVNNATARVMTNKKTVNPYTNGWKLNPVVGAVYSPEFYAGTVLLCQANQEGSSMYSAPSSLVYTSAMPGFPYPAATAAAAYRGAHLRGRGRTVYNTFRAAAPPPPIPAYGGVVYQEPVYGNKLLQGGYAAYRYAQPTPATAAAYSDSYGRVYAADPYHHALAPAPTYGVGAMNAFAPLTDAKTRSHADDVGLVLSSLQASIYRGGYNRFAPY

SEQ ID NO: 62439 - protein, 402 aa, Homo sapiens
MIVPAAPYLPGLIQGNQEAAAAPDTMAQPYASAQFAPPQNGIPAEYTAPHPHPAPEYTGQTTVPEHTLNLYPPAQTHSEQSPADTSAQTVSGTATQTDDAAPTDGQPQTQPSENTENKSQPKRLHVSNIPFRFRDPDLRQMFGQFGKILDVEIIFNERGSKGFGFVTFENSADADRAREKLHGTVVEGRKIEVNNATARVMTNKKTVNPYTNGWKLNPVVGAVYSPEFYAGTVLLCQANQEGSSMYSAPSSLVYTSAMPGFPYPAATAAAAYRGAHLRGRGRTVYNTFRAAAPPPPIPAYGGVVYQDGFYGADIYGGYAAYRYAQPTPATAAAYSDSYGRVYAADPYHHALAPAPTYGVGAMNAFAPLTDAKTRSHADDVGLVLSSLQASIYRGGYNRFAPY

SEQ ID NO: 62440 - protein, 391 aa, Homo sapiens
MLASQGVLLHPYGVPMIVPAAPYLPGLIQGNQEAAAAPDTMAQPYASAQFAPPQNGIPAEYTAPHPHPAPEYTGQTTVPEHTLNLYPPAQTHSEQSPADTSAQTVSGTATQTDDAAPTDGQPQTQPSENTENKSQPKRLHVSNIPFRFRDPDLRQMFGQFGKILDVEIIFNERGSKGFGFVTFENSADADRAREKLHGTVVEGRKIEVNNATARVMTNKKTVNPYTNGWKLNPVVGAVYSPEFYAVPGFPYPAATAAAAYRGAHLRGRGRTVYNTFRAAAPPPPIPAYGGVVYQEPVYGNKLLQGGYAAYRYAQPTPATAAAYSDSYGRVYAADPYHHALAPAPTYGVGAMNAFAPLTDAKTRSHADDVGLVLSSLQASIYRGGYNRFAPY

SEQ ID NO: 62441 - protein, 395 aa, Homo sapiens
MLASQGVLLHPYGVPMIVPAAPYLPGLIQGNQEAAAAPDTMAQPYASAQFAPPQNGIPAEYTAPHPHPAPEYTGQTTVPEHTLNLYPPAQTHSEQSPADTSAQTVSGTATQTDDAAPTDGQPQTQPSENTENKSQPKRLHVSNIPFRFRDPDLRQMFGQFGKILDVEIIFNERGSKGFGFVTFENSADADRAREKLHGTVVEGRKIEVNNATARVMTNKKTVNPYTNGWKLNPVVGAVYSPEFYAGTVLLCQANQEGSSMYSAPSSLVYTSAMPGFPYPAATAAAAYRGAHLRGRGRTVYNTFRAAAPPPPIPAYGGVVYQEPVYGNKLLQGGYAAYRYAQPTPATAAAYSDRNQFVFVAADEISCNTSAVTDEFMLPTPTTTHLLQPPPTALVP

SEQ ID NO: 62442 - protein, 392 aa, Homo sapiens
MLASQGVLLHPYGVPMIVPAAPYLPGLIQGNQEAAAAPDTMAQPYASAQFAPPQNGIPAEYTAPHPHPAPEYTGQTTVPEHTLNLYPPAQTHSEQSPADTSAQTVSGTATQTDDAAPTDGQPQTQPSENTENKSQPKRLHVSNIPFRFRDPDLRQMFGQFGKILDVEIIFNERGSKGFGFVTFENSADADRAREKLHGTVVEGRKIEVNNATARVMTNKKTVNPYTNGWKLNPVVGAVYSPEFYAGTVLLCQANQEGSSMYSAPSSLVYTSAMPGFPYPAATAAAAYRGAHLRGRGRTVYNTFRAAAPPPPIPAYGGVVYQEPVYGNKLLQGGYAAYRYAQPTPATAAAYSDSYGRVYAADPYHHALAPAPTYGVGAMASIYRGGYNRFAPY

SEQ ID NO: 62443 - protein, 397 aa, Homo sapiens
MNCEREQLRGNQEAAAAPDTMAQPYASAQFAPPQNGIPAEYTAPHPHPAPEYTGQTTVPEHTLNLYPPAQTHSEQSPADTSAQTVSGTATQTDDAAPTDGQPQTQPSENTENKSQPKRLHVSNIPFRFRDPDLRQMFGQFGKILDVEIIFNERGSKGFGFVTFENSADADRAREKLHGTVVEGRKIEVNNATARVMTNKKTVNPYTNGWKLNPVVGAVYSPEFYAGTVLLCQANQEGSSMYSAPSSLVYTSAMPGFPYPAATAAAAYRGAHLRGRGRTVYNTFRAAAPPPPIPAYGGVVYQDGFYGADIYGGYAAYRYAQPTPATAAAYSDSYGRVYAADPYHHALAPAPTYGVGAMNAFAPLTDAKTRSHADDVGLVLSSLQASIYRGGYNRFAPY

SEQ ID NO: 62444 - protein, 466 aa, Homo sapiens
METGQRTHASGTYSFLDRTQHSDIKADCNTCVEIEDRKVSRQQMNCEREQLRGNQEAAAAPDTMAQPYASAQFAPPQNGIPAEYTAPHPHPAPEYTGQTTVPEHTLNLYPPAQTHSEQSPADTSAQTVSGTATQTDDAAPTDGQPQTQPSENTENKSQPKRLHVSNIPFRFRDPDLRQMFGQFGKILDVEIIFNERGSKGFGFVTFENSADADRAREKLHGTVVEGRKIEVNNATARVMTNKKTVNPYTNGWKLNPVVGAVYSPEFYAGTVLLCQANQEGSSMYSAPSSLVYTSAMPGFPYPAATAAAAYRGAHLRGRGRTVYNTFRAAAPPPPIPAYGGVVYQDGFYGADIYGGYAAYRYAQPTPATAAAYSDRNQFVFVAADEISCNTSAVTDEFMLPTPTTTHLLQPPPTALVPCPKVPAPAQTSEELSCTLPGLCCQAAENLTASPPLLQFMFKVIVAQERK

SEQ ID NO: 62445 - protein, 397 aa, Homo sapiens; identical to SEQ ID NO: 62443

SEQ ID NO: 62446 - protein, 263 aa, Homo sapiens
MNCEREQLRGNQEAAAAPDTMAQPYASAQFAPPQNGIPAEYTAPHPHPAPEYTGQTTVPEHTLNLYPPAQTHSEQSPADTSAQTVSGTATQTDDAAPTDGQPQTQPSENTENKSQPKRLHVSNIPFRFRDPDLRQMFGQFGKILDVEIIFNERGSKGFGFVTFENSADADRAREKLHGTVVEGRKIEVNNATARVMTNKKTVNPYTNGWKLNPVVGAVYSPEFYAGTVLLCQANQEGSSMYSAPSSLVYTSAMPGFPYPAATA

SEQ ID NO: 62447 - protein, 370 aa, Homo sapiens
MNCEREQLRGNQEAAAAPDTMAQPYASAQFAPPQNGIPAEYTAPHPHPAPEYTGQTTVPEHTLNLYPPAQTHSEQSPADTSAQTVSGTATQTDDAAPTDGQPQTQPSENTENKSQPKRLHVSNIPFRFRDPDLRQMFGQFGKILDVEIIFNERGSKGFGFVTFENSADADRAREKLHGTVVEGRKIEVNNATARVMTNKKTVNPYTNGWKLNPVVGAVYSPEFYAVPGFPYPAATAAAAYRGAHLRGRGRTVYNTFRAAAPPPPIPAYGGVVYQDGFYGADIYGGYAAYRYAQPTPATAAAYSDSYGRVYAADPYHHALAPAPTYGVGAMNAFAPLTDAKTRSHADDVGLVLSSLQASIYRGGYNRFAPY

SEQ ID NO: 62448 - protein, 574 aa, Homo sapiens
MAHNKIPPRWLNCPRRGQPVAGRFLPLKTMLGPRYDSQVAEENRFHPSMLSNYLKSLKVKMGLLVDLTNTSRFYDRNDIEKEGIKYIKLQCKGHGECPTTENTETFIRLCERFNERNPPELIGVHCTHGFNRTGFLICAFLVEKMDWSIEAAVATFAQARPPGIYKGDYLKELFRRYGDIEEAPPPPLLPDWCFEDDEDEDEDEDGKKESEPGSSASFGKRRKERLKLGAIFLEGVTVKGVTQVTTQPKLGEVQQKCHQFCGWEGSGFPGAQPVSMDKQNIKLLDLKPYKVSWKADGTRYMMLIDGTNEVFMIDRDNSVFHVSNLEFPFRKDLRMHLSNTLLDGEMIIDRVNGQAVPRYLIYDIIKFNSQPVGDCDFNVRLQCIEREIISPRHEKMKTGLIDKTQEPFSVRNKPFFDICTSRKKYKPGRCDDILKWKPPSLNSVDFRLKITRMGGEGLLPQNVGLLYVGGYERPFAQIKVTKELKQYDNKIIECKFENNSWVFMRQRTDKSFPNAYNTAMAVCNSISNPVTKEMLFEFIDRCTAASQGQKRKHHLDPDTELMPPPPPKRPRPLT

SEQ ID NO: 62449 - protein, 541 aa, Homo sapiens
MAHNKIPPRWLNCPRRGQPVAGRFLPLKTMLGPRYDSQVAEENRFHPSMLSNYLKSLKVKMGLLVDLTNTSRFYDRNDIEKEGIKYIKLQCKGHGECPTTENTETFIRLCERFNERNPPELIGVHCTHGFNRTGFLICAFLVEKMDWSIEAAVATFAQARPPGIYKGDYLKELFRRYGDIEEAPPPPLLPDWCFEDDEDEDEDEDGKKESEPGSSASFGKRRKERLKLGAIFLEGVTVKGVTQVTTQPKLGEVQQKCHQFCGWEGSGFPGAQPVSMDKQNIKLLDLKPYKVSWKADGTRYMMLIDGTNEVFMIDRDNSVFHVSNLEFPFRKDLRMHLSNTLLDGEMIIDRVNGQAVPRYLIYDIIKFNSQPVGDCDFNVRLQCIEREIISPRHEKMKTGLIDKTQEPFSVRNKPFFDICTSRKLLEGNFAKEVSHEMDGLIFQPTGKYKPGRCDDILKWKPPSLNSVDFRLKITRMGGEGLLPQNVGLLYVGGYERPFAQIKVCLFIFSVLFLDVLLSRIHQNLANNNQHIKISCSSTLGG

SEQ ID NO: 62450 - protein, 597 aa, Homo sapiens
MAHNKIPPRWLNCPRRGQPVAGRFLPLKTMLGPRYDSQVAEENRFHPSMLSNYLKSLKVKMGLLVDLTNTSRFYDRNDIEKEGIKYIKLQCKGHGECPTTENTETFIRLCERFNERNPPELIGVHCTHGFNRTGFLICAFLVEKMDWSIEAAVATFAQARPPGIYKGDYLKELFRRYGDIEEAPPPPLLPDWCFEDDEDEDEDEDGKKESEPGSSASFGKRRKERLKLGAIFLEGVTVKGVTQVTTQPKLGEVQQKCHQFCGWEGSGFPGAQPVSMDKQNIKLLDLKPYKVSWKADGTRYMMLIDGTNEVFMIDRDNSVFHVSNLEFPFRKDLRMHLSNTLLDGEMIIDRVNGQAVPRYLIYDIIKFNSQPVGDCDFNVRLQCIEREIISPRHEKMKTGLIDKTQEPFSVRNKPFFDICTSRKLLEGNFAKEVSHEMDGLIFQPTGKYKPGRCDDILKWKPPSLNSVDFRLKITRMGGEGLLPQNVGLLYVGGYERPFAQIKVTKELKQYDNKIIECKFENNSWVFMRQRTDKSFPNAYNTAMAVCNSISNPVTKEMLFEFIDRCTAASQGQKRKHHLDPDTELMPPPPPKRPRPLT

SEQ ID NO: 62451 - protein, 568 aa, Homo sapiens
MLGPRYDSQVAEENRFHPSMLSNYLKSLKVKMGLLVDLTNTSRFYDRNDIEKEGIKYIKLQCKGHGECPTTENTETFIRLCERFNERNPPELIGVHCTHGFNRTGFLICAFLVEKMDWSIEAAVATFAQARPPGIYKGDYLKELFRRYGDIEEAPPPPLLPDWCFEDDEDEDEDEDGKKESEPGSSASFGKRRKERLKLGAIFLEGVTVKGVTQVTTQPKLGEVQQKCHQFCGWEGSGFPGAQPVSMDKQNIKLLDLKPYKVSWKADGTRYMMLIDGTNEVFMIDRDNSVFHVSNLEFPFRKDLRMHLSNTLLDGEMIIDRVNGQAVPRYLIYDIIKFNSQPVGDCDFNVRLQCIEREIISPRHEKMKTGLIDKTQEPFSVRNKPFFDICTSRKLLEGNFAKEVSHEMDGLIFQPTGKYKPGRCDDILKWKPPSLNSVDFRLKITRMGGEGLLPQNVGLLYVGGYERPFAQIKVTKELKQYDNKIIECKFENNSWVFMRQRTDKSFPNAYNTAMAVCNSISNPVTKEMLFEFIDRCTAASQGQKRKHHLDPDTELMPPPPPKRPRPLT

SEQ ID NO: 62452 - protein, 514 aa, Homo sapiens
MGLLVDLTNTSRFYDRNDIEKEGIKYIKLQCKGHGECPTTENTETFIRLCERFNERNPPELIGVHCTHGFNRTGFLICAFLVEKMDWSIEAAVATFAQARPPGIYKGDYLKELFRRYGDIEEAPPPPLLPDWCFEDDEDEDEDEDGKKESEPGSSASFGKRRKERLKLGAIFLEGVTVKGVTQVTTQPKLGEVQQKCHQFCGWEGSGFPGAQPVSMDKQNIKLLDLKPYKVSWKADGTRYMMLIDGTNEVFMIDRDNSVFHVSNLEFPFRKDLRMHLSNTLLDGEMIIDRVNGQAVPRYLIYDIIKFNSQPVGDCDFNVRLQCIEREIISPRHEKMKTGLIDKTQEPFSVRNKPFFDICTSRKKYKPGRCDDILKWKPPSLNSVDFRLKITRMGGEGLLPQNVGLLYVGGYERPFAQIKVTKELKQYDNKIIECKFENNSWVFMRQRTDKSFPNAYNTAMAVCNSISNPVTKEMLFEFIDRCTAASQGQKRKHHLDPDTELMPPPPPKRPRPLT

SEQ ID NO: 62453 - protein, 420 aa, Homo sapiens
MAALVRPARFVVRPLLQVVQAWDLDARRWVRALRRSPVKVVFPSGEVVEQKRAPGKQPRKAPSEASAQEQREKQPLEESASRAPSTWEESGLRYDKAYPGDRRLSSVMTIVKSRPFREKQGKILLEGRRLISDALKAGAVPKMFFFSRLEYLKELPVDKLKGVSLIKVKFEDIKDWSDLVTPQGIMGIFAKPDHVKMTYPKTQLQHSLPLLLICDNLRDPGNLGTILRSAAGAGCSKVLLTKGCVDAWEPKVLRAGMGAHFRMPIINNLEWETVPNYLPPDTRVYVADNCGLYAQAEMSNKASDHGWVCDQRVMKFHKYEEEEDVETGASQDWLPHVEVQSYDSDWTEAPAAVVIGGETYGVSLESLQLAESTGGKRLLIPVVPGVDSLNSAMAASILLFEGKRQLRGRAEDLSRDRSYH

SEQ ID NO: 62454 - protein, 1393 aa, Homo sapiens
MLSRPKPGESEVDLLHFQSQFLAAGAAPAVQLVKKGNRGGGDANSDRPPLQDHRDVVMLDNLPDLPPALVPSPPKRARPSPGHCLPEDEDPEERLRRHDQHITAVLTKIIERDTSSVAVNLPVPSGVAFPAVFLRSRDTQGKSATSGKRSIFAQEIAARRIAEAKGPSVGEVVPNVGPPEGAVTCETPTPRNQGCQLPGSSHSFQGPNLVTGKGLRDQEAEQEAQTIHEENIARLQAMAPEEILQEQQRLLAQLDPSLVAFLRSHSHTQEQTGETASEEQRPGGPSANVTKEEPLMSAFASEPRKRDKLEPEAPALALPVTPQKEWLHMDTVELEKLHWTQDLPPVRRQQTQERMQARFSLQGELLAPDVDLPTHLGLHHHGEEAERAGYSLQELFHLTRSQVSQQRALALHVLAQVISRAQAGEFGDRLAGSVLSLLLDAGFLFLLRFSLDDRVDGVIATAIRALRALLVAPGDEELLDSTFSWYHGALTFPLMPSQEDKEDEDEDEECPAGKAKRKSPEEESRPPPDLARHDVIKGLLATSLLPRLRYVLEVTYPGPAVVLDILAVLIRLARHSLESATRVLECPRLIETIVREFLPTSWSPVGAGPTPSLYKVPCATAMKLLRVLASAGRNIAARLLSSFDLRSRLCRIIAEAPQELALPPEEAEMLSTEALRLWAVAASYGQGGYLYRELYPVLMRALQVVPRELSTHPPQPLSMQRIASLLTLLTQLTLAAGSTPAETISDSAEASLSATPSLVTWTQVSGLQPLVEPCLRQTLKLLSRPEMWRAVGPVPVACLLFLGAYYQAWSQQPSSCPEDWLQDMQRLSEELLLPLLSQPTLGSLWDSLRHCSLLCNPLSCVPALEAPPSLVSLGCSGGCPRLSLAGSASPFPFLTALLSLLNTLAQIHKGLCGQLAAILAAPGLQNYFLQCVAPGAAPHLTPFSAWALRHEYHLQYLALALAQKAAALQPLPATHAALYHGMALALLSRLLPGSEYLTHELLLSCVFRLEFLPERTSGGPEAADFSDQLSLGSSRVPRCGQGTLLAQACQDLPSIRNCYLTHCSPARASLLASQALHRGELQRVPTLLLPMPTEPLLPTDWPFLPLIRLYHRASDTPSGLSPTDTMGTAMRVLQWVLVLESWRPQALWAVPPAARLARLMCVFLVDSELFRESPVQHLVAALLAQLCQPQVLPNLNLDCRLPGLTSFPDLYANFLDHFEAVSFGDHLFGALVLLPLQRRFSVTLRLALFGEHVGALRALSLPLTQLPVSLECYTVPPEDNLALLQLYFRTLVTGALRPRWCPVLYAVAVAHVNSFIFSQDPQSSDEVKAARRSMLQKTWLLADEGLRQHLLHYKLPNSTLPEGFELYSQLPPLRQHYLQRLTSTVLQNGVSET

SEQ ID NO: 62455 - protein, 612 aa, Homo sapiens
MADFAGPSSAGRKAGAPRCSRKAAGTKQTSTLKQEDASKRKAELEAAVRKKIEFERKALHIVEQLLEENITEEFLMECGRFITPAHYSDVVDERSIVKLCGYPLCQKKLGIVPKQKYKISTKTNKVYDITERKSFCSNFCYQASKFFEAQIPKTPVWVREEERHPDFQLLKEEQSGHSGEEVQLCSKAIKTSDIDNPSHFEKQYESSSSSTHSDSSSDNEQDFVSSILPGNRPNSTNIRPQLHQKSIMKKKAGHKANSKHKDKEQTVVDVTEQLGDCKLDSQEKDATCELPLQKVNTQSSSNSTLPERLKASENSESEYSRSEITLVGISKKSAEHFKRKFAKSNQVSRSVSSSVQVCPEVGKRNLLKVLKETLIEWKTEETLRFLYGQNYASVCLKPEASLVKEELDEDDIISDPDSHFPAWRESQNSLDESLPFRGSGTAIKPLPSYENLKKETEKLNLRIREFYRGRYVLGEETTKSQDSEEHDSTFPLIDSSSQNQIRKRIVLEKLSKVLPGLLVPLQITLGDIYTQLKNLVRTFRLTNRNIIHKPAEWTLIAMVLLSLLTPILGIQKHSQEGMVFTRFLDTLLEELHLKNEDLESLTIIFRTSCLPE

SEQ ID NO: 62456 - protein, 584 aa, Homo sapiens
MADFAGPSSAGRKAGAPRCSRKAAGTKQTSTLKQEDASKRKAELEAAVRKKIEFERKALHIVEQLLEENITEEFLMECGRFITPAHYSDVVDERSIVKLCGYPLCQKKLGIVPKQKYKISTKTNKVYDITERKSFCSNFCYQASKFFEAQIPKTPVWVREEERHPDFQLLKEEQSGHSGEEVQLCSKAIKTSDIDNPSHFEKQYESSSSSTHSDSSSDNEQDFVSSILPGNRPNSTNIRPQLHQKSIMKKKAGHKANSKHKDKEQTVVDVTEQLGDCKLDSQEKDATCELPLQKVNTQSSSNSTLPERLKASENSESEYSRSEITLVGISKKSAEHFKRKFAKSNQVSRSVSSSVQVCPEVGKRNLLKVLKETLIEWKTEETLRFLYGQNYASVCLKPEASLVKEELDEDDIISDPDSHFPAWRESQNSLDESLPFRGSGTAIKPLPSYENLKKETEKLNLRIREFYRGRYVLGEETTKSQDSEEHDSTFPLIDSSSQNQIRKRIVLEKLSKVLPGLLVPLQITLGDIYTQLKNLVRTFRLTNRNIIHKPAEWTLIAMVLLSFLLNVKTRIKTFMMIYFHLMNS

SEQ ID NO: 62457 - protein, 665 aa, Homo sapiens
MTSANKAIELQLQVKQNAEELQDFMRDLENWEKDIKQKDMELRRQNGVPEENLPPIRNGNFRKKKKGKAKESSKKTREENTKNRIKSYDYEAWAKLDVDRILDELDKDDSTHESLSQESESEEDGIHVDSQKALVLKEKGNKYFKQGKYDEAIDCYTKGMDADPYNPVLPTNRASAYFRLKKFAVAESDCNLAVALNRSYTKAYSRRGAARFALQKLEEAKKDYERVLELEPNNFEATNELRKISQALASKENSYPKEADIVIKSTEGERKQIEAQQNKQQAISEKDRGNGFFKEGKYERAIECYTRGIAADGANALLPANRAMAYLKIQKYEEAEKDCTQAILLDGSYSKAFARRGTARTFLGKLNEAKQDFETVLLLEPGNKQAVTELSKIKKELIEKGHWDDVFLDSTQRQNVVKPIDNPPHPGSTKPLKKVIIEETGNLIQTIDVPDSTTAAAPENNPINLANVIAATGTTSKKNSSQDDLFPTSDTPRAKVLKIEEVSDTSSLQPQASLKQDVCQSYSEKMPIEIEQKPAQFATTVLPPIPANSFQLESDFRQLKSSPDMLYQYLKQIEPSLYPKLFQKNLDPDVFNQIVKILHDFYIEKEKPLLIFEILQRLSELKRFDMAVMFMSETEKKIARALFNHIDKSGLKDSSVEELKKRYGG

SEQ ID NO: 62458 - protein, 631 aa, Homo sapiens
MTSANKAIELQLQVKQNAEELQDFMRDLENWEKDIKQKDMELRRQNGVPEENLPPIRNGNFRKKKKGKAKESSKKTREENTKNRIKSYDYEAWAKLDVDRILDELDKDDSTHESLSQESESEEDGIHVDSQKALVLKEKGNKYFKQGKYDEAIDCYTKGMDADPYNPVLPTNRASAYFRLKKFAVAESDCNLAVALNRSYTKAYSRRGAARFALQKLEEAKKDYERVLELEPNNFEATNELRKISQALASKENSYPKEADIVIKSTEGERKQIEAQQNKQQAISEKDRGNGFFKEGKYERAIECYTRGIAADGANALLPANRAMAYLKIQKYEEAEKDCTQAILLDGSYSKAFARRGTARTFLGKLNEAKQDFETVLLLEPGNKQAVTELSKIKKKPLKKVIIEETGNLIQTIDVPDSTTAAAPENNPINLANVIAATGTTSKKNSSQDDLFPTSDTPRAKVLKIEEVSDTSSLQPQASLKQDVCQSYSEKMPIEIEQKPAQFATTVLPPIPANSFQLESDFRQLKSSPDMLYQYLKQIEPSLYPKLFQKNLDPDVFNQIVKILHDFYIEKEKPLLIFEILQRLSELKRFDMAVMFMSETEKKIARALFNHIDKSGLKDSSVEELKKRYGG

SEQ ID NO: 62459 - protein, 506 aa, Homo sapiens
MDADPYNPVLPTNRASAYFRLKKFAVAESDCNLAVALNRSYTKAYSRRGAARFALQKLEEAKKDYERVLELEPNNFEATNELRKISQALASKENSYPKEADIVIKSTEGERKQIEAQQNKQQAISEKDRGNGFFKEGKYERAIECYTRGIAADGANALLPANRAMAYLKIQKYEEAEKDCTQAILLDGSYSKAFARRGTARTFLGKLNEAKQDFETVLLLEPGNKQAVTELSKIKKELIEKGHWDDVFLDSTQRQNVVKPIDNPPHPGSTKPLKKVIIEETGNLIQTIDVPDSTTAAAPENNPINLANVIAATGTTSKKNSSQDDLFPTSDTPRAKVLKIEEVSDTSSLQPQASLKQDVCQSYSEKMPIEIEQKPAQFATTVLPPIPANSFQLESDFRQLKSSPDMLYQYLKQIEPSLYPKLFQKNLDPDVFNQIVKILHDFYIEKEKPLLIFEILQRLSELKRFDMAVMFMSETEKKIARALFNHIDKSGLKDSSVEELKKRYGG

SEQ ID NO: 62460 - protein, 1606 aa, Homo sapiens [sequence omitted]

SEQ ID NO: 62461 - protein, 1655 aa, Homo sapiens
MKWKHVPFLVMISLLSLSPNHLFLAQLIPDPEDVERGNDHGTPIPTSDNDDNSLGYTGSRLRQEDFPPRIVEHPSDLIVSKGEPATLNCKAEGRPTPTIEWYKGGERVETDKDDPRSHRMLLPSGSLFFLRIVHGRKSRPDEGVYVCVARNYLGEAVSHNASLEVAILRDDFRQNPSDVMVAVGEPAVMECQPPRGHPEPTISWKKDGSPLDDKDERITIRGGKLMITYTRKSDAGKYVCVGTNMVGERESEVAELTVLERPSFVKRPSNLAVTVDDSAEFKCEARGDPVPTVRWRKDDGELPKSRYEIRDDHTLKIRKVTAGDMGSYTCVAENMVGKAEASATLTVQEPPHFVVKPRDQVVALGRTVTFQCEATGNPQPAIFWRREGSQNLLFSYQPPQSSSRFSVSQTGDLTITNVQRSDVGYYICQTLNVAGSIITKAYLEVTDVIADRPPPVIRQGPVNQTVAVDGTFVLSCVATGSPVPTILWRKDGVLVSTQDSRIKQLENGVLQIRYAKLGDTGRYTCIASTPSGEATWSAYIEVQGKVNEFGVPVQPPRPTDPNLIPSAPSKPEVTDVSRNTVTLSWQPNLNSGATPTSYIIEAFSHASGSSWQTVAENVKTETSAIKGLKPNAIYLFLVRAANAYGISDPSQISDPVKTQDVLPTSQGVDHKQVQRELGNAVLHLHNPTVLSSSSIEVHWTVDQQSQYIQGYKILYRPSGANHGESDWLVFEVRTPAKNSVVIPDLRKGVNYEIKARPFFNEFQGADSEIKFAKTLEEAPSAPPQGVTVSKNDGNGTAILVSWQPPPEDTQNGMVQEYKVWCLGNETRYHINKTVDGSTFSVVIPFLVPGIRYSVEVAASTGAGSGVKSEPQFIQLDAHGNPVSPEDQVSLAQQISDVVKQPAFIAGIGAACWIILMVFSIWLYRHRKKRNGLTSTYAGIRKVPSFTFTPTVTYQRGGEAVSSGGRPGLLNISEPAAQPWLADTWPNTGNNHNDCSISCCTAGNGNSDSNLTTYSRPADCIANYNNQLDNKQTNLMLPESTVYGDVDLSNKINEMKTFNSPNLKDGRFVNPSGQPTPYATTQLIQSNLSNNMNNGSGDSGEKHWKPLGQQKQEVAPVQYNIVEQNKLNKDYRANDTVPPTIPYNQSYDQNTGGSYNSSDRGSSTSGSQGHKKGARTPKVPKQGGMNWADLLPPPPAHPPPHSNSEEYNISVDESYDQEMPCPVPPARMYLQQDELEEEEDERGPTPPVRGAASSPAAVSYSHQSTATLTPSPQEELQPMLQDCPEETGHMQHQPDRRRQPVSPPPPPRPISPPHTYGYISGPLVSDMDTDAPEEEEDEADMEVAKMQTRRLLLRGLEQTPASSVGDLESSVTGSMINGWGSASEEDNISSGRSSVSSSDGSFFTDADFAQAVAAAAEYAGLKVARRQMQDAAGRRHFHASQCPRPTSPVSTDSNMSAAVMQKTRPAKKLKHQPGHLRRETYTDDLPPPPVPPPAIKSPTAQSKTQLEVRPVVVPKLPSMDARTDRSSDRKGSSYKGREVLDGRQVVDMRTNPGDPREAQEQQNDGKGRGNKAAKRDLPPAKTHLIQEDILPYCRPTFPTSNNPRDPSSSSSMSSRGSGSRQREQANVGRRNIAEMQVLGGYERGEDNNEELEEPSS

SEQ ID NO: 62462 - protein, 1612 aa, Homo sapiens
MIAEPAHFYLFGLICLCSGSRLRQEDFPPRIVEHPSDLIVSKGEPATLNCKAEGRPTPTIEWYKGGERVETDKDDPRSHRMLLPSGSLFFLRIVHGRKSRPDEGVYVCVARNYLGEAVSHNASLEVAILRDDFRQNPSDVMVAVGEPAVMECQPPRGHPEPTISWKKDGSPLDDKDERITIRGGKLMITYTRKSDAGKYVCVGTNMVGERESEVAELTVLERPSFVKRPSNLAVTVDDSAEFKCEARGDPVPTVRWRKDDGELPKSRYEIRDDHTLKIRKVTAGDMGSYTCVAENMVGKAEASATLTVQEPPHFVVKPRDQVVALGRTVTFQCEATGNPQPAIFWRREGSQNLLFSYQPPQSSSRFSVSQTGDLTITNVQRSDVGYYICQTLNVAGSIITKAYLEVTDVIADRPPPVIRQGPVNQTVAVDGTFVLSCVATGSPVPTILWRKDGVLVSTQDSRIKQLENGVLQIRYAKLGDTGRYTCIASTPSGEATWSAYIEVQEFGVPVQPPRPTDPNLIPSAPSKPEVTDVSRNTVTLSWQPNLNSGATPTSYIIEAFSHASGSSWQTVAENVKTETSAIKGLKPNAIYLFLVRAANAYGISDPSQISDPVKTQDVLPTSQGVDHKQVQRELGNAVLHLHNPTVLSSSSIEVHWTVDQQSQYIQGYKILYRPSGANHGESDWLVFEVRTPAKNSVVIPDLRKGVNYEIKARPFFNEFQGADSEIKFAKTLEEAPSAPPQGVTVSKNDGNGTAILVSWQPPPEDTQNGMVQEYKVWCLGNETRYHINKTVDGSTFSVVIPFLVPGIRYSVEVAASTGAGSGVKSEPQFIQLDAHGNPVSPEDQVSLAQQISDVVKQPAFIAGIGAACWIILMVFSIWLYRHRKKRNGLTSTYAGIRKVPSFTFTPTVTYQRGGEAVSSGGRPGLLNISEPAAQPWLADTWPNTGNNHNDCSISCCTAGNGNSDSNLTTYSRPADCIANYNNQLDNKQTNLMLPESTVYGDVDLSNKINEMKTFNSPNLKDGRFVNPSGQPTPYATTQLIQSNLSNNMNNGSGDSGEKHWKPLGQQKQEVAPVQYNIVEQNKLNKDYRANDTVPPTIPYNQSYDQNTGGSYNSSDRGSSTSGSQGHKKGARTPKVPKQGGMNWADLLPPPPAHPPPHSNSEEYNISVDESYDQEMPCPVPPARMYLQQDELEEEEDERGPTPPVRGAASSPAAVSYSHQSTATLTPSPQEELQPMLQDCPEETGHMQHQPDRRRQPVSPPPPPRPISPPHTYGYISGPLVSDMDTDAPEEEEDEADMEVAKMQTRRLLLRGLEQTPASSVGDLESSVTGSMINGWGSASEEDNISSGRSSVSSSDGSFFTDADFAQAVAAAAEYAGLKVARRQMQDAAGRRHFHASQCPRPTSPVSTDSNMSAAVMQKTRPAKKLKHQPGHLRRETYTDDLPPPPVPPPAIKSPTAQSKTQLEVRPVVVPKLPSMDARTDRSSDRKGSSYKGREVLDGRQVVDMRTNPGDPREAQEQQNDGKGRGNKAAKRDLPPAKTHLIQEDILPYCRPTFPTSNNPRDPSSSSSMSSRGSGSRQREQANVGRRNIAEMQVLGGYERGEDNNEELEETES

SEQ ID NO: 62463 - protein, 1651 aa, Homo sapiens
MKWKHVPFLVMISLLSLSPNHLFLAQLIPDPEDVERGNDHGTPIPTSDNDDNSLGYTGSRLRQEDFPPRIVEHPSDLIVSKGEPATLNCKAEGRPTPTIEWYKGGERVETDKDDPRSHRMLLPSGSLFFLRIVHGRKSRPDEGVYVCVARNYLGEAVSHNASLEVAILRDDFRQNPSDVMVAVGEPAVMECQPPRGHPEPTISWKKDGSPLDDKDERITIRGGKLMITYTRKSDAGKYVCVGTNMVGERESEVAELTVLERPSFVKRPSNLAVTVDDSAEFKCEARGDPVPTVRWRKDDGELPKSRYEIRDDHTLKIRKVTAGDMGSYTCVAENMVGKAEASATLTVQEPPHFVVKPRDQVVALGRTVTFQCEATGNPQPAIFWRREGSQNLLFSYQPPQSSSRFSVSQTGDLTITNVQRSDVGYYICQTLNVAGSIITKAYLEVTDVIADRPPPVIRQGPVNQTVAVDGTFVLSCVATGSPVPTILWRKDGVLVSTQDSRIKQLENGVLQIRYAKLGDTGRYTCIASTPSGEATWSAYIEVQEFGVPVQPPRPTDPNLIPSAPSKPEVTDVSRNTVTLSWQPNLNSGATPTSYIIEAFSHASGSSWQTVAENVKTETSAIKGLKPNAIYLFLVRAANAYGISDPSQISDPVKTQDVLPTSQGVDHKQVQRELGNAVLHLHNPTVLSSSSIEVHWTVDQQSQYIQGYKILYRPSGANHGESDWLVFEVRTPAKNSVVIPDLRKGVNYEIKARPFFNEFQGADSEIKFAKTLEEAPSAPPQGVTVSKNDGNGTAILVSWQPPPEDTQNGMVQEYKVWCLGNETRYHINKTVDGSTFSVVIPFLVPGIRYSVEVAASTGAGSGVKSEPQFIQLDAHGNPVSPEDQVSLAQQISDVVKQPAFIAGIGAACWIILMVFSIWLYRHRKKRNGLTSTYAGIRKVPSFTFTPTVTYQRGGEAVSSGGRPGLLNISEPAAQPWLADTWPNTGNNHNDCSISCCTAGNGNSDSNLTTYSRPADCIANYNNQLDNKQTNLMLPESTVYGDVDLSNKINEMKTFNSPNLKDGRFVNPSGQPTPYATTQLIQSNLSNNMNNGSGDSGEKHWKPLGQQKQEVAPVQYNIVEQNKLNKDYRANDTVPPTIPYNQSYDQNTGGSYNSSDRGSSTSGSQGHKKGARTPKVPKQGGMNWADLLPPPPAHPPPHSNSEEYNISVDESYDQEMPCPVPPARMYLQQDELEEEEDERGPTPPVRGAASSPAAVSYSHQSTATLTPSPQEELQPMLQDCPEETGHMQHQPDRRRQPVSPPPPPRPISPPHTYGYISGPLVSDMDTDAPEEEEDEADMEVAKMQTRRLLLRGLEQTPASSVGDLESSVTGSMINGWGSASEEDNISSGRSSVSSSDGSFFTDADFAQAVAAAAEYAGLKVARRQMQDAAGRRHFHASQCPRPTSPVSTDSNMSAAVMQKTRPAKKLKHQPGHLRRETYTDDLPPPPVPPPAIKSPTAQSKTQLEVRPVVVPKLPSMDARTDRSSDRKGSSYKGREVLDGRQVVDMRTNPGDPREAQEQQNDGKGRGNKAAKRDLPPAKTHLIQEDILPYCRPTFPTSNNPRDPSSSSSMSSRGSGSRQREQANVGRRNIAEMQVLGGYERGEDNNEELEETES

SEQ ID NO: 62464 - protein, 1551 aa, Homo sapiens
MIAEPAHFYLFGLICLCSGSRLRQEDFPPRIVEHPSDLIVSKGEPATLNCKAEGRPTPTIEWYKGGERVETDKDDPRSHRMLLPSGSLFFLRIVHGRKSRPDEGVYVCVARNYLGEAVSHNASLEVAILRDDFRQNPSDVMVAVGEPAVMECQPPRGHPEPTISWKKDGSPLDDKDERITIRGGKLMITYTRKSDAGKYVCVGTNMVGERESEVAELTVLERPSFVKRPSNLAVTVDDSAEFKCEARGDPVPTVRWRKDDGELPKSRYEIRDDHTLKIRKVTAGDMGSYTCVAENMVGKAEASATLTVQVGSEPPHFVVKPRDQVVALGRTVTFQCEATGNPQPAIFWRREGSQNLLFSYQPPQSSSRFSVSQTGDLTITNVQRSDVGYYICQTLNVAGSIITKAYLEVTDVIADRPPPVIRQGPVNQTVAVDGTFVLSCVATGSPVPTILWRKDGVLVSTQDSRIKQLENGVLQIRYAKLGDTGRYTCIASTPSGEATWSAYIEVQEFGVPVQPPRPTDPNLIPSAPSKPEVTDVSRNTVTLSWQPNLNSGATPTSYIIEAFSHASGSSWQTVAENVKTETSAIKGLKPNAIYLFLVRAANAYGISDPSQISDPVKTQDVLPTSQGVDHKQVQRELGNAVLHLHNPTVLSSSSIEVHWTVDQQSQYIQGYKILYRPSGANHGESDWLVFEVRTPAKNSVVIPDLRKGVNYEIKARPFFNEFQGADSEIKFAKTLEEAPSAPPQGVTVSKNDGNGTAILVSWQPPPEDTQNGMVQEYKVWCLGNETRYHINKTVDGSTFSVVIPFLVPGIRYSVEVAASTGAGSGVKSEPQFIQLDAHGNPVSPEDQVSLAQQISDVVKQPAFIAGIGAACWIILMVFSIWLYRHRKKRNGLTSTYAGIRKVTYQRGGEAVSSGGRPGLLNISEPAAQPWLADTWPNTGNNHNDCSISCCTAGNGNSDSNLTTYSRPGQPTPYATTQLIQSNLSNNMNNGSGDSGEKHWKPLGQQKQEVAPVQYNIVEQNKLNKDYRANDTVPPTIPYNQSYDQNTGGSYNSSDRGSSTSGSQGHKKGARTPKVPKQGGMNWADLLPPPPAHPPPHSNSEEYNISVDESYDQEMPCPVPPARMYLQQDELEEEEDERGPTPPVRGAASSPAAVSYSHQSTATLTPSPQEELQPMLQDCPEETGHMQHQPDRRRQPVSPPPPPRPISPPHTYGYISGPLVSDMDTDAPEEEEDEADMEVAKMQTRRLLLRGLEQTPASSVGDLESSVTGSMINGWGSASEEDNISSGRSSVSSSDGSFFTDADFAQAVAAAAEYAGLKVARRQMQDAAGRRHFHASQCPRPTSPVSTDSNMSAAVMQKTRPAKKLKHQPGHLRRETYTDDLPPPPVPPPAIKSPTAQSKTQLEVRPVVVPKLPSMDARTDRSSDRKGSSYKGREVLDGRQVVDMRTNPGDPREAQEQQNDGKGRGNKAAKRDLPPAKTHLIQEDILPYCRPTFPTSNNPRDPSSSSSMSSRGSGSRQREQANVGRRNIAEMQVLGGYERGEDNNEELEETES

SEQ ID NO: 62465 - protein, 1606 aa, Homo sapiens
MIAEPAHFYLFGLICLCSGSRLRQEDFPPRIVEHPSDLIVSKGEPATLNCKAEGRPTPTIEWYKGGERVETDKDDPRSHRMLLPSGSLFFLRIVHGRKSRPDEGVYVCVARNYLGEAVSHNASLEVAILRDDFRQNPSDVMVAVGEPAVMECQPPRGHPEPTISWKKDGSPLDDKDERITIRGGKLMITYTRKSDAGKYVCVGTNMVGERESEVAELTVLERPSFVKRPSNLAVTVDDSAEFKCEARGDPVPTVRWRKDDGELPKSRYEIRDDHTLKIRKVTAGDMGSYTCVAENMVGKAEASATLTVQVGSEPPHFVVKPRDQVVALGRTVTFQCEATGNPQPAIFWRREGSQNLLFSYQPPQSSSRFSVSQTGDLTITNVQRSDVGYYICQTLNVAGSIITKAYLEVTDVIADRPPPVIRQGPVNQTVAVDGTFVLSCVATGSPVPTILWRKDGVLVSTQDSRIKQLENGVLQIRYAKLGDTGRYTCIASTPSGEATWSAYIEVQEFGVPVQPPRPTDPNLIPSAPSKPEVTDVSRNTVTLSWQPNLNSGATPTSYIIEAFSHASGSSWQTVAENVKTETSAIKGLKPNAIYLFLVRAANAYGISDPSQISDPVKTQDVLPTSQGVDHKQVQRELGNAVLHLHNPTVLSSSSIEVHWTVDQQSQYIQGYKILYRPSGANHGESDWLVFEVRTPAKNSVVIPDLRKGVNYEIKARPFFNEFQGADSEIKFAKTLEEAPSAPPQGVTVSKNDGNGTAILVSWQPPPEDTQNGMVQEYKVWCLGNETRYHINKTVDGSTFSVVIPFLVPGIRYSVEVAASTGAGSGVKSEPQFIQLDAHGNPVSPEDQVSLAQQISDVVKQPAFIAGIGAACWIILMVFSIWLYRHRKKRNGLTSTYAGIRKVTYQRGGEAVSSGGRPGLLNISEPAAQPWLADTWPNTGNNHNDCSISCCTAGNGNSDSNLTTYSRPADCIANYNNQLDNKQTNLMLPESTVYGDVDLSNKINEMKTFNSPNLKDGRFVNPSGQPTPYATTQLIQSNLSNNMNNGSGDSGEKHWKPLGQQKQEVAPVQYNIVEQNKLNKDYRANDTVPPTIPYNQSYDQNTGGSYNSSDRGSSTSGSQGHKKGARTPKVPKQGGMNWADLLPPPPAHPPPHSNSEEYNISVDESYDQEMPCPVPPARMYLQQDELEEEEDERGPTPPVRGAASSPAAVSYSHQSTATLTPSPQEELQPMLQDCPEETGHMQHQPDRRRQPVSPPPPPRPISPPHTYGYISGPLVSDMDTDAPEEEEDEADMEVAKMQTRRLLLRGLEQTPASSVGDLESSVTGSMINGWGSASEEDNISSGRSSVSSSDGSFFTDADFAQAVAAAAEYAGLKVARRQMQDAAGRRHFHASQCPRPTSPVSTDSNMSAAVMQKTRPAKKLKHQPGHLRRETYTDDLPPPPVPPPAIKSPTAQSKTQLEVRPVVVPKLPSMDARTDRSSDRKGSSYKGREVLDGRQVVDMRTNPGDPREAQEQQNDGKGRGNKAAKRDLPPAKTHLIQEDILPYCRPTFPTSNNPRDPSSSSSMSSRGSGSRQREQANVGRRNIAEMQVLGGYERGEDNNEELEETES

SEQ ID NO: 62466 - protein, 1070 aa, Homo sapiens
MARRHERVTRRMWTWAPGLLMMTVVFWGHQGNGQGQGSRLRQEDFPPRIVEHPSDVIVSKGEPTTLNCKAEGRPTPTIEWYKDGERVETDKDDPRSHRMLLPSGSLFFLRIVHGRRSKPDEGSYVCVARNYLGEAVSRNASLEVALLRDDFRQNPTDVVVAAGEPAILECQPPRGHPEPTIYWKKDKVRIDDKEERISIRGGKLMISNTRKSDAGMYTCVGTNMVGERDSDPAELTVFERPTFLRRPINQVVLEEEAVEFRCQVQGDPQPTVRWKKDDADLPRGRYDIKDDYTLRIKKTMSTDEGTYMCIAENRVGKMEASATLTVRGGVIAPPQFVVRPRDQIVAQGRTVTFPCETKGNPQPAVFWQKEGSQNLLFPNQPQQPNSRCSVSPTGDLTITNIQRSDAGYYICQALTVAGSILAKAQLEVTDVLTDRPPPIILQGPANQTLAVDGTALLKCKATGDPLPVISWLKEGFTFPGRDPRATIQEQGTLQIKNLRISDTGTYTCVATSSSGETSWSAVLDVTESGATISKNYDLSDLPGPPSKPQVTDVTKNSVTLSWQPGTPGTLPASAYIIEAFSQSVSNSWQTVANHVKTTLYTVRGLRPNTIYLFMVRAINPQGLSDPSPMSDPVRTQDISPPAQGVDHRQVQKELGDVLVRLHNPVVLTPTTVQVTWTVDRQPQFIQGYRVMYRQTSGLQATSSWQNLDAKVPTERSAVLVNLKKGVTYEIKVRPYFNEFQGMDSESKTVRTTEEAPSAPPQSVTVLTVGSYNSTSISVSWDPPPPDHQNGIIQEYKIWCLGNETRFHINKTVDAAIRSVIIGGLFPGIQYRVEVAASTSAGVGVKSEPQPIIIGRRNEVVITENNNSITEQITDVVKQPAFIAGIGGACWVILMGFSIWLYWRRKKRKGLSNYAVTFQRGDGGLMSNGSRPGLLNAGDPSYPWLADSWPATSLPVNNSNSGPNEIGNFGRGDVLPPVPGQGDKTATMLSDGAIYSSIDFTTKTSYNSSSQITQATPYATTQILHSNSIHELAVDLPDPQWKSSIQQKTDLMGFGYSLPDQNKGNNGESGS

SEQ ID NO: 62467 - protein, 570 aa, Homo sapiens
MSTDEGTYMCIAENRVGKMEASATLTVRGGVIAPPQFVVRPRDQIVAQGRTVTFPCETKGNPQPAVFWQKEGSQNLLFPNQPQQPNSRCSVSPTGDLTITNIQRSDAGYYICQALTVAGSILAKAQLEVTDVLTDRPPPIILQGPANQTLAVDGTALLKCKATGDPLPVISWLKEGFTFPGRDPRATIQEQGTLQIKNLRISDTGTYTCVATSSSGETSWSAVLDVTESGATISKNYDLSDLPGPPSKPQVTDVTKNSVTLSWQPGTPGTLPASAYIIEAFSQSVSNSWQTVANHVKTTLYTVRGLRPNTIYLFMVRAINPQGLSDPSPMSDPVRTQDISPPAQGVDHRQVQKELGDVLVRLHNPVVLTPTTVQVTWTVDRQPQFIQGYRVMYRQTSGLQATSSWQNLDAKVPTERSAVLVNLKKGVTYEIKVRPYFNEFQGMDSESKTVRTTEEAPSAPPQSVTVLTVGSYNSTSISVSWDPPPPDHQNGIIQEYKIWCLGNETRFHINKTVDAAIRSVIIGGLFPGIQYRVEVAASTSAGVGVKSEPQPNNTGYPICHDTDLAFQQHT

SEQ ID NO: 62468 - protein, 1394 aa, Homo sapiens
MARRHERVTRRMWTWAPGLLMMTVVFWGHQGNGQGQGSRLRQEDFPPRIVEHPSDVIVSKGEPTTLNCKAEGRPTPTIEWYKDGERVETDKDDPRSHRMLLPSGSLFFLRIVHGRRSKPDEGSYVCVARNYLGEAVSRNASLEVALLRDDFRQNPTDVVVAAGEPAILECQPPRGHPEPTIYWKKDKVRIDDKEERISIRGGKLMISNTRKSDAGMYTCVGTNMVGERDSDPAELTVFERPTFLRRPINQVVLEEEAVEFRCQVQGDPQPTVRWKKDDADLPRGRYDIKDDYTLRIKKTMSTDEGTYMCIAENRVGKMEASATLTVRAPPQFVVRPRDQIVAQGRTVTFPCETKGNPQPAVFWQKEGSQNLLFPNQPQQPNSRCSVSPTGDLTITNIQRSDAGYYICQALTVAGSILAKAQLEVTDVLTDRPPPIILQGPANQTLAVDGTALLKCKATGDPLPVISWLKEGFTFPGRDPRATIQEQGTLQIKNLRISDTGTYTCVATSSSGETSWSAVLDVTESGATISKNYDLSDLPGPPSKPQVTDVTKNSVTLSWQPGTPGTLPASAYIIEAFSQSVSNSWQTVANHVKTTLYTVRGLRPNTIYLFMVRAINPQGLSDPSPMSDPVRTQDISPPAQGVDHRQVQKELGDVLVRLHNPVVLTPTTVQVTWTVDRQPQFIQGYRVMYRQTSGLQATSSWQNLDAKVPTERSAVLVNLKKGVTYEIKVRPYFNEFQGMDSESKTVRTTEEAPSAPPQSVTVLTVGSYNSTSISVSWDPPPPDHQNGIIQEYKIWCLGNETRFHINKTVDAAIRSVIIGGLFPGIQYRVEVAASTSAGVGVKSEPQPIIIGRRNEVVITENNNSITEQITDVVKQPAFIAGIGGACWVILMGFSIWLYWRRKKRKGLSNYAVTFQRGDGGLMSNGSRPGLLNAGDPSYPWLADSWPATSLPVNNSNSGPNEIGNFGRGDVLPPVPGQGDKTATMLSDGAIYSSIDFTTKTSYNSSSQITQATPYATTQILHSNSIHELAVDLPDPQWKSSIQQKTDLMGFGYSLPDQNKGNNGGKGGKKKKNKNSSKPQKNNGSTWANVPLPPPPVQPLPGTELEHYAVEQQENGYDSDSWCPPLPVQTYLHQGLEDELEEDDDRVPTPPVRGVASSPAISFGQQSTATLTPSPREEMQPMLQAHLDELTRAYQFDIAKQTWHIQSNNQPPQPPVPPLGYVSGALISDLETDVADDDADDEEEALEIPRPLRALDQTPGSSMDNLDSSVTGKAFTSSQRPRPTSPFSTDSNTSAALSQSQRPRPTKKHKGGRMDQQPALPHRREGMTDEEALVPYSKPSFPSPGGHSSSGTASSKGSTGPRKTEVLRAGHQRNASDLLDIGYMGSNSQGQFTGEL

SEQ ID NO: 62469 - protein, 1378 aa, Homo sapiens
MSLLMFTQLLLCGFLYVRVDGSRLRQEDFPPRIVEHPSDVIVSKGEPTTLNCKAEGRPTPTIEWYKDGERVETDKDDPRSHRMLLPSGSLFFLRIVHGRRSKPDEGSYVCVARNYLGEAVSRNASLEVALLRDDFRQNPTDVVVAAGEPAILECQPPRGHPEPTIYWKKDKVRIDDKEERISIRGGKLMISNTRKSDAGMYTCVGTNMVGERDSDPAELTVFERPTFLRRPINQVVLEEEAVEFRCQVQGDPQPTVRWKKDDADLPRGRYDIKDDYTLRIKKTMSTDEGTYMCIAENRVGKMEASATLTVRAPPQFVVRPRDQIVAQGRTVTFPCETKGNPQPAVFWQKEGSQNLLFPNQPQQPNSRCSVSPTGDLTITNIQRSDAGYYICQALTVAGSILAKAQLEVTDVLTDRPPPIILQGPANQTLAVDGTALLKCKATGDPLPVISWLKEGFTFPGRDPRATIQEQGTLQIKNLRISDTGTYTCVATSSSGETSWSAVLDVTESGATISKNYDLSDLPGPPSKPQVTDVTKNSVTLSWQPGTPGTLPASAYIIEAFSQSVSNSWQTVANHVKTTLYTVRGLRPNTIYLFMVRAINPQGLSDPSPMSDPVRTQDISPPAQGVDHRQVQKELGDVLVRLHNPVVLTPTTVQVTWTVDRQPQFIQGYRVMYRQTSGLQATSSWQNLDAKVPTERSAVLVNLKKGVTYEIKVRPYFNEFQGMDSESKTVRTTEEAPSAPPQSVTVLTVGSYNSTSISVSWDPPPPDHQNGIIQEYKIWCLGNETRFHINKTVDAAIRSVIIGGLFPGIQYRVEVAASTSAGVGVKSEPQPIIIGRRNEVVITENNNSITEQITDVVKQPAFIAGIGGACWVILMGFSIWLYWRRKKRKGLSNYAVTFQRGDGGLMSNGSRPGLLNAGDPSYPWLADSWPATSLPVNNSNSGPNEIGNFGRGDVLPPVPGQGDKTATMLSDGAIYSSIDFTTKTSYNSSSQITQATPYATTQILHSNSIHELAVDLPDPQWKSSIQQKTDLMGFGYSLPDQNKGNNGGKGGKKKKNKNSSKPQKNNGSTWANVPLPPPPVQPLPGTELEHYAVEQQENGYDSDSWCPPLPVQTYLHQGLEDELEEDDDRVPTPPVRGVASSPAISFGQQSTATLTPSPREEMQPMLQAHLDELTRAYQFDIAKQTWHIQSNNQPPQPPVPPLGYVSGALISDLETDVADDDADDEEEALEIPRPLRALDQTPGSSMDNLDSSVTGKAFTSSQRPRPTSPFSTDSNTSAALSQSQRPRPTKKHKGGRMDQQPALPHRREGMTDEEALVPYSKPSFPSPGGHSSSGTASSKGSTGPRKTEVLRAGHQRNASDLLDIGYMGSNSQGQFTGEL

SEQ ID NO: 62470 - protein, 1394 aa, Homo sapiens; identical to SEQ ID NO: 62468

SEQ ID NO: 62471 - protein, 1386 aa, Homo sapiens
MLRYLLKTLLQMNLFADSLAGDISNSSELLLGFNSSLAALNHTLLPPGDPSLNGSRVGPEDAMPRIVEQPPDLLVSRGEPATLPCRAEGRPRPNIEWYKNGARVATVREDPRAHRLLLPSGALFFPRIVHGRRARPDEGVYTCVARNYLGAAASRNASLEVAVLRDDFRQSPGNVVVAVGEPAVLECVPPRGHPEPSVSWRKDGARLKEEEGRITIRGGKLMMSHTLKSDAGMYVCVASNMAGERESAAAEVMVLERPSFLRRPVNQVVLADAPVTFLCEVKGDPPPRLRWRKEDGELPTGRYEIRSDHSLWIGHVSAEDEGTYTCVAENSVGRAEASGSLSVHVPPQLVTQPQDQMAAPGESVAFQCETKGNPPPAIFWQKEGSQVLLFPSQSLQPTGRFSVSPRGQLNITAVQRGDAGYYVCQAVSVAGSILAKALLEIKGASLDGLPPVILQGPANQTLVLGSSVWLPCRVTGNPQPSVRWKKDGQWLQGDDLQFKTMANGTLYIANVQEMDMGFYSCVAKSSTGEATWSGWLKMREDWGVSPDPPTEPSSPPGAPSQPVVTEITKNSITLTWKPNPQTGAAVTSYVIEAFSPAAGNTWRTVADGVQLETHTVSGLQPNTIYLFLVRAVGAWGLSEPSPVSEPVRTQDSSPSRPVEDPWRGQQGLAEVAVRLQEPIVLGPRTLQVSWTVDGPVQLVQGFRVSWRVAGPEGGSWTMLDLQSPSQQSTVLRGLPPGTQIQIKVQAQGQEGLGAESLSVTRSIPEEAPSGPPQGVAVALGGDGNSSITVSWEPPLPSQQNGVITEYQIWCLGNESRFHLNRSAAGWARSAMLRGLVPGLLYRTLVAAATSAGVGVPSAPVLVQLPSPPDLEPGLEVGAGLAVRLARVLREPAFLAGSGAACGALLLGLCAALYWRRKQRKELSHYTASFAYTPAVSFPHSEGLSGASSRPPMGLGPAPYSWLADSWPHPSRSPSAQEPRGSCCPSNPDPDDRYYNEAGISLYLAQTARGTAAPGEGPVYSTIDPAGEELQTFHGGFPQHPSGDLGPWSQYAPPEWSQGDSGAKGGKVKLLGKPVQMPSLNWPEALPPPPPSCELSCLEGPEEELEGSSEPEEWCPPMPERSHLTEPSSSGGCLVTPSRRETPSPTPSYGQQSTATLTPSPPDPPQPPTDMPHLHQMPRRVPLGPSSPLSVSQPMLGIREARPAGLGAGPAASPHLSPSPAPSTASSAPGRTWQGNGEMTPPLQGPRARFRKKPKALPYRRENSPGDLPPPPLPPPEEEASWALELRAAGSMSSLERERSGERKAVQAVPLAAQRVLHPDEEAWLPYSRPSFLSRGQGTSTCSTAGSNSSRGSSSSRGSRGPGRSRSRSQSRSQSQRPGQKRREEPR

SEQ ID NO: 62472 - protein, 1364 aa, Homo sapiens
MERPEDSLSLWSLNLSPQFPCLNALRHPLSPGSRVGPEDAMPRIVEQPPDLLVSRGEPATLPCRAEGRPRPNIEWYKNGARVATVREDPRAHRLLLPSGALFFPRIVHGRRARPDEGVYTCVARNYLGAAASRNASLEVAVLRDDFRQSPGNVVVAVGEPAVLECVPPRGHPEPSVSWRKDGARLKEEEGRITIRGGKLMMSHTLKSDAGMYVCVASNMAGERESAAAEVMVLERPSFLRRPVNQVVLADAPVTFLCEVKGDPPPRLRWRKEDGELPTGRYEIRSDHSLWIGHVSAEDEGTYTCVAENSVGRAEASGSLSVHVPPQLVTQPQDQMAAPGESVAFQCETKGNPPPAIFWQKEGSQVLLFPSQSLQPTGRFSVSPRGQLNITAVQRGDAGYYVCQAVSVAGSILAKALLEIKGASLDGLPPVILQGPANQTLVLGSSVWLPCRVTGNPQPSVRWKKDGQWLQGDDLQFKTMANGTLYIANVQEMDMGFYSCVAKSSTGEATWSGWLKMREDWGVSPDPPTEPSSPPGAPSQPVVTEITKNSITLTWKPNPQTGAAVTSYVIEAFSPAAGNTWRTVADGVQLETHTVSGLQPNTIYLFLVRAVGAWGLSEPSPVSEPVRTQDSSPSRPVEDPWRGQQGLAEVAVRLQEPIVLGPRTLQVSWTVDGPVQLVQGFRVSWRVAGPEGGSWTMLDLQSPSQQSTVLRGLPPGTQIQIKVQAQGQEGLGAESLSVTRSIPEEAPSGPPQGVAVALGGDGNSSITVSWEPPLPSQQNGVITEYQIWCLGNESRFHLNRSAAGWARSAMLRGLVPGLLYRTLVAAATSAGVGVPSAPVLVQLPSPPDLEPGLEVGAGLAVRLARVLREPAFLAGSGAACGALLLGLCAALYWRRKQRKELSHYTASFAYTPAVSFPHSEGLSGASSRPPMGLGPAPYSWLADSWPHPSRSPSAQEPRGSCCPSNPDPDDRYYNEAGISLYLAQTARGTAAPGEGPVYSTIDPAGEELQTFHGGFPQHPSGDLGPWSQYAPPEWSQGDSGAKGGKVKLLGKPVQMPSLNWPEALPPPPPSCELSCLEGPEEELEGSSEPEEWCPPMPERSHLTEPSSSGGCLVTPSRRETPSPTPSYGQQSTATLTPSPPDPPQPPTDMPHLHQMPRRVPLGPSSPLSVSQPMLGIREARPAGLGAGPAASPHLSPSPAPSTASSAPGRTWQGNGEMTPPLQGPRARFRKKPKALPYRRENSPGDLPPPPLPPPEEEASWALELRAAGSMSSLERERSGERKAVQAVPLAAQRVLHPDEEAWLPYSRPSFLSRGQGTSTCSTAGSNSSRGSSSSRGSRGPGRSRSRSQSRSQSQRPGQKRREEPR

SEQ ID NO: 62473 - protein, 149 aa, Homo sapiens
MTPPLQGPRARFRKKPKALPYRRENSPGDLPPPPLPPPEEEASWALELRAAGSMSSLERERSGERKAVQAVPLAAQRVLHPDEEAWLPYSRPSFLSRGQGTSTCSTAGSNSSRGSSSSRGSRGPGRSRSRSQSRSQSQRPGQKRREEPR

SEQ ID NO: 62474 - protein, 1007 aa, Homo sapiens
MGSGGDSLLGGRGSLPLLLLLIMGGMAQDSPPQILVHPQDQLFQGPGPARMSCQASGQPPPTIRWLLNGQPLSMVPPDPHHLLPDGTLLLLQPPARGHAHDGQALSTDLGVYTCEASNRLGTAVSRGARLSVAVLREDFQIQPRDMVAVVGEQFTLECGPPWGHPEPTVSWWKDGKPLALQPGRHTVSGGSLLMARAEKSDEGTYMCVATNSAGHRESRAARVSIQEPQDYTEPVELLAVRIQLENVTLLNPDPAEGPKPRPAVWLSWKVSGPAAPAQSYTALFRTQTAPGGQGAPWAEELLAGWQSAELGGLHWGQDYEFKVRPSSGRARGPDSNVLLLRLPEKVPSAPPQEVTLKPGNGTVFVSWVPPPAENHNGIIRGYQVWSLGNTSLPPANWTVVGEQTQLEIATHMPGSYCVQVAAVTGAGAGEPSRPVCLLLEQAMERATQEPSEHGPWTLEQLRATLKRPEVIATCGVALWLLLLGTAVCIHRRRRARVHLGPGLYRYTSEDAILKHRMDHSDSQWLADTWRSTSGSRDLSSSSSLSSRLGADARDPLDCRRSLLSWDSRSPGVPLLPDTSTFYGSLIAELPSSTPARPSPQVPAVRRLPPQLAQLSSPCSSSDSLCSRRGLSSPRLSLAPAEAWKAKKKQELQHANSSPLLRGSHSLELRACELGNRGSKNLSQSPGAVPQALVAWRALGPKLLSSSNELVTRHLPPAPLFPHETPPTQSQQTQPPVAPQAPSSILLPAAPIPILSPCSPPSPQASSLSGPSPASSRLSSSSLSSLGEDQDSVLTPEEVALCLELSEGEETPRNSVSPMPRAPSPPTTYGYISVPTASEFTDMGRTGGGVGPKGGVLLCPPRPCLTPTPSEGSLANGWGSASEDNAASARASLVSSSDGSFLADAHFARALAVAVDSFGFGLEPREADCVFIDASSPPSPRDEIFLTPNLSLPLWEWRPDWLEDMEVSHTQRLGRGMPPWPPDSQISSQRSQLHCRMPKAGASPVDYS

SEQ ID NO: 62475 - protein, 701 aa, Homo sapiens
MGSGGDSLLGGRGSLPLLLLLIMVLREDFQIQPRDMVAVVGEQFTLECGPPWGHPEPTVSWWKDGKPLALQPGRHTVSGGSLLMARAEKSDEGTYMCVATNSAGHRESRAARVSIQEPQDYTEPVELLAVRIQLENVTLLNPDPAEGPKPRPAVWLSWKVSGPAAPAQSYTALFRTQTAPGGQGAPWAEELLAGWQSAELGGLHWGQDYEFKVRPSSGRARGPDSNVLLLRLPEKVPSAPPQEVTLKPGNGTVFVSWVPPPAENHNGIIRGYQVWSLGNTSLPPANWTVVGEQTQLEIATHMPGSYCVQVAAVTGAGAGEPSRPVCLLLEQAMERATQEPSEHGPWTLEQLRATLKRPEVIATCGVALWLLLLGTAVCIHRRRRARVHLGPGLYRYTSEDAILKHRMDHSDSQWLADTWRSTSGSRDLSSSSSLSSRLGADARDPLDCRRSLLSWDSRSPGVPLLPDTSTFYGSLIAELPSSTPARPSPQVPAVRRLPPQLAQLSSPCSSSDSLCSRRGLSSPRLSLAPAEAWKAKKKQELQHANSSPLLRGSHSLELRACELGNRGSKNLSQSPGAVPQALVAWRALGPKLLSSSNELVTRHLPPAPLFPHETPPTQSQQTQPPVAPQAPSSILLPAAPIPILSPCSPPSPQASSLSGPSPASSRLSSSSLSSLGEDQDSVLTPEEVALCLELSEGEETP

SEQ ID NO: 62476 - protein, 862 aa, Homo sapiens
MVAVVGEQFTLECGPPWGHPEPTVSWWKDGKPLALQPGRHTVSGGSLLMARAEKSDEGTYMCVATNSAGHRESRAARVSIQEPQDYTEPVELLAVRIQLENVTLLNPDPAEGPKPRPAVWLSWKVSGPAAPAQSYTALFRTQTAPGGQGAPWAEELLAGWQSAELGGLHWGQDYEFKVRPSSGRARGPDSNVLLLRLPEKVPSAPPQEVTLKPGNGTVFVSWVPPPAENHNGIIRGYQVWSLGNTSLPPANWTVVGEQTQLEIATHMPGSYCVQVAAVTGAGAGEPSRPVCLLLEQAMERATQEPSEHGPWTLEQLRATLKRPEVIATCGVALWLLLLGTAVCIHRRRRARVHLGPGLYRYTSEDAILKHRMDHSDSQWLADTWRSTSGSRDLSSSSSLSSRLGADARDPLDCRRSLLSWDSRSPGVPLLPDTSTFYGSLIAELPSSTPARPSPQVPAVRRLPPQLAQLSSPCSSSDSLCSRRGLSSPRLSLAPAEAWKAKKKQELQHANSSPLLRGSHSLELRACELGNRGSKNLSQSPGAVPQALVAWRALGPKLLSSSNELVTRHLPPAPLFPHETPPTQSQQTQPPVAPQAPSSILLPAAPIPILSPCSPPSPQASSLSGPSPASSRLSSSSLSSLGEDQDSVLTPEEVALCLELSEGEETPRNSVSPMPRAPSPPTTYGYISVPTASEFTDMGRTGGGVGPKGGVLLCPPRPCLTPTPSEGSLANGWGSASEDNAASARASLVSSSDGSFLADAHFARALAVAVDSFGFGLEPREADCVFIDASSPPSPRDEIFLTPNLSLPLWEWRPDWLEDMEVSHTQRLGRGMPPWPPDSQISSQRSQLHCRMPKAGASPVDYS

SEQ ID NO: 62477 - protein, 1235 aa, Homo sapiens
MSGPTDETAGDLPVKDTGLNLFGMGGLQETSTTRTMKSRQAVSRVSREELEDRFLRLHDENILLKQHARKQEDKIKRMATKLIRLVNDKKRYERVGGGPKRLGRDVEMEEMIEQLQEKVHELEKQNETLKNRLISAKQQLQTQGYRQTPYNNVQSRINTGRRKANENAGLQECPRKGIKFQDADVAETPHPMFTKYGNSLLEEARGEIRNLENVIQSQRGQIEELEHLAEILKTQLRRKENEIELSLLQLREQQATDQRSNIRDNVEMIKLHKQLVEKSNALSAMEGKFIQLQEKQRTLRISHDALMANGDELNMQLKEQRLKCCSLEKQLHSMKFSERRIEELQDRINDLEKERELLKENYDKLYDSAFSAAHEEQWKLKEQQLKVQIAQLETALKSDLTDKTEILDRLKTERDQNEKLVQENRELQLQYLEQKQQLDELKKRIKLYNQENDINADELSEALLLIKAQKEQKNGDLSFLVKVDSEINKDLERSMRELQATHAETVQELEKTRNMLIMQHKINKDYQMEVEAVTRKMENLQQDYELKVEQYVHLLDIRAARIHKLEAQLKDIAYGTKQYKFKPEIMPDDSVDEFDETIHLERGENLFEIHINKVTFSSEVLQASGDKEPVTFCTYAFYDFELQTTPVVRGLHPEYNFTSQYLVHVNDLFLQYIQKNTITLEVHQAYSTEYETIAACQLKFHEILEKSGRIFCTASLIGTKGDIPNFGTVEYWFRLRVPMDQAIRLYRERAKALGYITSNFKGPEHMQSLSQQAPKTAQLSSTDSTDGNLNELHITIRCCNHLQSRASHLQPHPYVVYKFFDFADHDTAIIPSSNDPQFDDHMYFPVPMNMDLDRYLKSESLSFYVFDDSDTQENIYIGKVNVPLISLAHDRCISGIFELTDHQKHPAGTIHVILKWKFAYLPPSGSITTEDLGNFIRSEEPEVVQRLPPASSVSTLVLAPRPKPRQRLTPVDKKVSFVDIMPHQSDVSQEGSVDEVKENTEKMQQGKDDVSLLSEGQLAEQSLASSEDETEITEDLEPEVEEDMSASDSDDCIIPGPISKNIKQPSEKIRIEIIALSLNDSQVTMDDTIQRLFVECRFYSLPAEETPVSLPKPKSGQWVYYNYSNVIYVDKENNKAKRDILKAILQKQEMPNRSLRFTVVSDPPEDEQDLECEDIGVAHVDLADMFQEGRDLIEQNIDVFDARADGEGIGKLRVTVEALHALQSVYKQYRDDLEA

SEQ ID NO: 62478 - protein, 1315 aa, Homo sapiens
MSGPTDETAGDLPVKDTGLNLFGMGGLQETSTTRTMKSRQAVSRVSREELEDRFLRLHDENILLKQHARKQEDKIKRMATKLIRLVNDKKRYERVGGGPKRLGRDVEMEEMIEQLQEKVHELEKQNETLKNRLISAKQQLQTQGYRQTPYNNVQSRINTGRRKANENAGLQECPRKGIKFQDADVAETPHPMFTKYGNSLLEEARGEIRNLENVIQSQRGQIEELEHLAEILKTQLRRKENEIELSLLQLREQQATDQRSNIRDNVEMIKLHKQLVEKSNALSAMEGKFIQLQEKQRTLRISHDALMANGDELNMQLKEQRLKCCSLEKQLHSMKFSERRIEELQDRINDLEKERELLKENYDKLYDSAFSAAHEEQWKLKEQQLKVQIAQLETALKSDLTDKTEILDRLKTERDQNEKLVQENRELQLQYLEQKQQLDELKKRIKLYNQENDINADELSEALLLIKAQKEQKNGDLSFLVKVDSEINKDLERSMRELQATHAETVQELEKTRNMLIMQHKINKDYQMEVEAVTRKMENLQQDYELKVEQYVHLLDIRAARIHKLEAQLKDIAYGTKQYKFKPEIMPDDSVDEFDETIHLERGENLFEIHINKVTFSSEVLQASGDKEPVTFCTYAFYDFELQTTPVVRGLHPEYNFTSQYLVHVNDLFLQYIQKNTITLEVHQAYSTEYETIAACQLKFHEILEKSGRIFCTASLIGTKGDIPNFGTVEYWFRLRVPMDQAIRLYRERAKALGYITSNFKGPEHMQSLSQQAPKTAQLSSTDSTDGNLNELHITIRCCNHLQSRASHLQPHPYVVYKFFDFADHDTAIIPSSNDPQFDDHMYFPVPMNMDLDRYLKSESLSFYVFDDSDTQENIYIGKVNVPLISLAHDRCISGIFELTDHQKHPAGTIHVILKWKFAYLPPSGSITTEDLGNFIRSEEPEVVQRLPPASSVSTLVLAPRPKPRQRLTPVDKKVSFVDIMPHQSDETSPPPEDRKEISPEVEHIPEIEINMLTVPHVPKVSQEGSVDEVKENTEKMQQGKDDVSLLSEGQLAEQSLASSEDETEITEDLEPEVEEDMSASDSDDCIIPGPISKNIKQSLALSPGLGCSSAISAHCNFRLPGSSDFPASASQVDGITGACHHTQPSEKIRIEIIALSLNDSQVTMDDTIQRLFVECRFYSLPAEETPVSLPKPKSGQWVYYNYSNVIYVDKENNKAKRDILKAILQKQEMPNRSLRFTVVSDPPEDEQDLECEDIGVAHVDLADMFQEGRDLIEQNIDVFDARADGEGIGKLRVTVEALHALQSVYKQYRDDLEA

SEQ ID NO: 62479 - protein, 651 aa, Homo sapiens
MAAPLLHTRLPGDAAASSSAVKKLGASRTGISNMRALENDFFNSPPRKTVRFGGTVTEVLLKYKKGETNDFELLKNQLLDPDIKDDQIINWLLEFRSSIMYLTKDFEQLISIILRLPWLNRSQTVVEEYLAFLGNLVSAQTVFLRPCLSMIASHFVPPRVIIKEGDVDVSDSDDEDDNLPANFDTCHRALQIIARYVPSTPWFLMPILVEKFPFVRKSERTLECYVHNLLRISVYFPTLRHEILELIIEKLLKLDVNASRQGIEDAEETATQTCGGTDSTEGLFNMDEDEETEHETKAGPERLDQMVHPVAERLDILMSLVLSYMKDVCYVDGKVDNGKTKDLYRDLINIFDKLLLPTHASCHVQFFMFYLCSFKLGFAEAFLEHLWKKLQDPSNPAIIRQAAGNYIGSFLARAKFIPLITVKSCLDLLVNWLHIYLNNQDSGTKAFCDVALHGPFYSACQAVFYTFVFRHKQLLSGNLKEGLQYLQSLNFERIVMSQLNPLKICLPSVVNFFAAITNKYQLVFCYTIIERNNRQMLPVIRSTAGGDSVQICTNPLDTFFPFDPCVLKRSKKFIDPIYQVWEDMSAEELQEFKKPMKKDIVEDEDDDFLKGEVPQNDTVIGITPSSFDTHFRSPSSSVGSPPVLYMQPSPL

SEQ ID NO: 62480 - protein, 618 aa, Homo sapiens
MRALENDFFNSPPRKTVRFGGTVTEVLLKYKKGETNDFELLKNQLLDPDIKDDQIINWLLEFRSSIMYLTKDFEQLISIILRLPWLNRSQTVVEEYLAFLGNLVSAQTVFLRPCLSMIASHFVPPRVIIKEGDVDVSDSDDEDDNLPANFDTCHRALQIIARYVPSTPWFLMPILVEKFPFVRKSERTLECYVHNLLRISVYFPTLRHEILELIIEKLLKLDVNASRQGIEDAEETATQTCGGTDSTEGLFNMDEDEETEHETKAGPERLDQMVHPVAERLDILMSLVLSYMKDVCYVDGKVDNGKTKDLYRDLINIFDKLLLPTHASCHVQFFMFYLCSFKLGFAEAFLEHLWKKLQDPSNPAIIRQAAGNYIGSFLARAKFIPLITVKSCLDLLVNWLHIYLNNQDSGTKAFCDVALHGPFYSACQAVFYTFVFRHKQLLSGNLKEGLQYLQSLNFERIVMSQLNPLKICLPSVVNFFAAITNKYQLVFCYTIIERNNRQMLPVIRSTAGGDSVQICTNPLDTFFPFDPCVLKRSKKFIDPIYQVWEDMSAEELQEFKKPMKKDIVEDEDDDFLKGEVPQNDTVIGITPSSFDTHFRSPSSSVGSPPVLYMQPSPL

SEQ ID NO: 62481 - protein, 621 aa, Homo sapiens
MAAPLLHTRLPGDAAASSSAVKKLGASRTGISNMRALENDFFNSPPRKTVRFGGTVTEVLLKYKKGETNDFELLKNQLLDPDIKRLPWLNRSQTVVEEYLAFLGNLVSAQTVFLRPCLSMIASHFVPPRVIIKEGDVDVSDSDDEDDNLPANFDTCHRALQIIARYVPSTPWFLMPILVEKFPFVRKSERTLECYVHNLLRISVYFPTLRHEILELIIEKLLKLDVNASRQGIEDAEETATQTCGGTDSTEGLFNMDEDEETEHETKAGPERLDQMVHPVAERLDILMSLVLSYMKDVCYVDGKVDNGKTKDLYRDLINIFDKLLLPTHASCHVQFFMFYLCSFKLGFAEAFLEHLWKKLQDPSNPAIIRQAAGNYIGSFLARAKFIPLITVKSCLDLLVNWLHIYLNNQDSGTKAFCDVALHGPFYSACQAVFYTFVFRHKQLLSGNLKEGLQYLQSLNFERIVMSQLNPLKICLPSVVNFFAAITNKYQLVFCYTIIERNNRQMLPVIRSTAGGDSVQICTNPLDTFFPFDPCVLKRSKKFIDPIYQVWEDMSAEELQEFKKPMKKDIVEDEDDDFLKGEVPQNDTVIGITPSSFDTHFRSPSSSVGSPPVLYMQPSPL

SEQ ID NO: 62482 - protein, 469 aa, Homo sapiens
MIASHFVPPRVIIKEGDVDVSDSDDEDDNLPANFDTCHRALQIIARYVPSTPWFLMPILVEKFPFVRKSERTLVNASRQGIEDAEETATQTCGGTDSTEGLFNMDEDEETEHETKAGPERLDQMVHPVAERLDILMSLVLSYMKDVCYVDGKVDNGKTKDLYRDLINIFDKLLLPTHASCHVQFFMFYLCSFKLGFAEAFLEHLWKKLQDPSNPAIIRQAAGNYIGSFLARAKFIPLITVKSCLDLLVNWLHIYLNNQDSGTKAFCDVALHGPFYSACQAVFYTFVFRHKQLLSGNLKEGLQYLQSLNFERIVMSQLNPLKICLPSVVNFFAAITNKYQLVFCYTIIERNNRQMLPVIRSTAGGDSVQICTNPLDTFFPFDPCVLKRSKKFIDPIYQVWEDMSAEELQEFKKPMKKDIVEDEDDDFLKGEVPQNDTVIGITPSSFDTHFRSPSSSVGSPPVLYMQPSPL

SEQ ID NO: 62483 - protein, 263 aa, Homo sapiens
MRLGLCVVALVLSWTHLTISSRGIKGKRQRRISAEGSQACAKGCELCSEVNGCLKCSPKLFILLERNDIRQVGVCLPSCPPGYFDARNPDMNKCIKCKIEHCEACFSHNFCTKCKEGLYLHKGRCYPACPEGSSAANGTMECSSPAQCEMSEWSPWGPCSKKQQLCGFRRGSEERTRRVLHAPVGDHAACSDTKETRRCTVRRVPCPEGQKRRKGGQGRRENANRNLARKESKEAGAGSRRRKGQQQQQQQGTVGPLTSAGPA

SEQ ID NO: 62484 - protein, 263 aa, Homo sapiens; identical to SEQ ID NO: 62483

SEQ ID NO: 62485 - protein, 263 aa, Homo sapiens; identical to SEQ ID NO: 62483

SEQ ID NO: 62486 - protein, 200 aa, Homo sapiens
MRLGLCVVALVLSWTHLTISSRGIKGKRQRRISAEGSQACAKGCELCSEVNGCLKCSPKLFILLERNDIRQVGVCLPSCPPGYFDARNPDMNKCIKCKIEHCEACFSHNFCTKCKEGLYLHKGRCYPACPEGSSAANGTMECSSPGQKRRKGGQGRRENANRNLARKESKEAGAGSRRRKGQQQQQQQGTVGPLTSAGPA

SEQ ID NO: 62487 - protein, 236 aa, Homo sapiens
MIFRVSAEGSQACAKGCELCSEVNGCLKCSPKLFILLERNDIRQVGVCLPSCPPGYFDARNPDMNKCIKCKIEHCEACFSHNFCTKCKEGLYLHKGRCYPACPEGSSAANGTMECSSPAQCEMSEWSPWGPCSKKQQLCGFRRGSEERTRRVLHAPVGDHAACSDTKETRRCTVRRVPCPEGQKRRKGGQGRRENANRNLARKESKEAGAGSRRRKGQQQQQQQGTVGPLTSAGPA

SEQ ID NO: 62488 - protein, 243 aa, Homo sapiens
MQFRLFSFALIILNCMDYSHCQGNRWRRSKRASYVSNPICKGCLSCSKDNGCSRCQQKLFFFLRREGMRQYGECLHSCPSGYYGHRAPDMNRCARCRIENCDSCFSKDFCTKCKVGFYLHRGRCFDECPDGFAPLEETMECVEGCEVGHWSEWGTCSRNNRTCGFKWGLETRTRQIVKKPVKDTILCPTIAESRRCKMTMRHCPGGKRTPKAKEKRNKKKKRKLIERAQEQHSVFLATDRANQ

SEQ ID NO: 62489 - protein, 179 aa, Homo sapiens
MQFRLFSFALIILNCMDYSHCQGNRWRRSKRGCRIENCDSCFSKDFCTKCKVGFYLHRGRCFDECPDGFAPLEETMECVGCEVGHWSEWGTCSRNNRTCGFKWGLETRTRQIVKKPVKDTILCPTIAESRRCKMTMRHCPGGKRTPKAKEKRNKKKKRKLIERAQEQHSVFLATDRANQ

SEQ ID NO: 62490 - protein, 179 aa, Homo sapiens; identical to SEQ ID NO: 62489

SEQ ID NO: 62491 - protein, 176 aa, Homo sapiens
MRQYGECLHSCPSGYYGHRAPDMNRCARCRIENCDSCFSKDFCTKCKVGFYLHRGRCFDECPDGFAPLEETMECVEGCEVGHWSEWGTCSRNNRTCGFKWGLETRTRQIVKKPVKDTILCPTIAESRRCKMTMRHCPGGKRTPKAKEKRNKKKKRKLIERAQEQHSVFLATDRANQ

SEQ ID NO: 62492 - protein, 168 aa, Homo sapiens
MRQYGECLHSCPSGYYGHRAPDMNRCARCRIENCDSCFSKDFCTKCKVGFYLHRGRCFDECPDGFAPLEETMECVEGCEVGHWSEWGTCSRNNRTCGFKWGLETRTRQIVKKPVKDTILCPTIAESRRCKMTMRHCPGGKRTPKAKEKRNKKKKRKLIERAQEQHSVF

SEQ ID NO: 62493 - protein, 89 aa, Homo sapiens
MRQYGECLHSCPSGYYGHRAPDMNRCARCRIENCDSCFSKDFCTKCKVGFYLHRGRCFDECPDGFAPLEETMECVEGCEVGHWSEWGTC

SEQ ID NO: 62494 - protein, 121 aa, Homo sapiens
MQFRLFSFALIILNCMDYSHCQGNRWRRSKRASYVSNPICKGCLSCSKDNGCSRCQQKLFFFLRREGMRQYGECLHSCPSGYYGHRAPDMNRCARCRIENCDSCFSKDFCTKCKVGFYLHR

SEQ ID NO: 62495 - protein, 77 aa, Homo sapiens
MQFRLFSFALIILNCMDYSHCQGNRWRRSKRASYVSNPICKGCLSCSKDNGCSRCQQKLFFFLRREGMRQYGECLHS

SEQ ID NO: 62496 - protein, 234 aa, Homo sapiens
MRAPLCLLLLVAHAVDMLALNRRKKQVGTGLGGNCTGCIICSEENGCSTCQQRLFLFIRREGIRQYGKCLHDCPPGYFGIRGQEVNRCKKCGATCESCFSQDFCIRCKRQFYLYKGKCLPTCPPGTLAHQNTRECQGECELGPWGGWSPCTHNGKTCGSAWGLESRVREAGRAGHEEAATCQVLSESRKCPIQRPCPGERSPGQKKGRKDRRPRKDRKLDRRLDVRPRQPGLQP

SEQ ID NO: 62497 - protein, 172 aa, Homo sapiens
MRAPLCLLLLVAHAVDMLALNRRKKQVGTGLGGNCTGCIICSEENGCSTCQQRLFLFIRREGIRQYGKCLHDCPPGYFGIRGQEVNRCKKCGATCESCFSQDFCIRCKRQFYLYKGKCLPTCPPGTLAHQNTRECQERSPGQKKGRKDRRPRKDRKLDRRLDVRPRQPGLQP

SEQ ID NO: 62498 - protein, 710 aa, Homo sapiens
MRGRLCVGRAAAAAAAVAVPLAGGQEGSPGGGRRGSRGTTMVKKRKGRVVIDSDTEDSGSDENLDQELLSLAKRKRSDSEEKEPPVSQPAASSDSETSDSDDEWTFGSNKNKKKGKARKIEKKGTMKKQANKTASSGSSDKDSSAESSAPEEGEVSDSDSNSSSSSSDSDSSSEDEEFHDGYGEDLMGDEEDRARLEQMTEKEREQELFNRIEKREVLKRRFEIKKKLKTAKKKEKKEKKKKQEEEQEKKKLTQIQESQVTSHNKERRSKRDEKLDKKSQAMEELKAEREKRKNRTAELLAKKQPLKTSEVYSDDEEEEEDDKSSEKSDRSSRTSSSDEEEEKEEIPPKSQPVSLPEELNRVRLSRHKLERWCHMPFFAKTVTGCFVRIGIGNHNSKPVYRVAEITGVVETAKVYQLGGTRTNKGLQLRHGNDQRVFRLEFVSNQEFTESEFMKWKEAMFSAGMQLPTLDEINKKELSIKEALNYKFNDQDIEEIVKEKERFRKAPPNYAMKKTQLLKEKAMAEDLGDQDKAKQIQDQLNELEERAEALDRQRTKNISAISYINQRNREWNIVESEKALVAESHNMKNQQMDPFTRRQCKPTIVSNSRDPAVQAAILAQLNAKYGSGVLPDAPKEMSKGQGKDKDLNSKSASDLSEDLFKVHDFDVKIDLQVPSSESKALAITSKAPPAKDGAPRRSLNLEDYKKRRGLI

SEQ ID NO: 62499 - protein, 1516 aa, Homo sapiens
MDSPPKLTGETLIVHHIPLVHCQVPDRQCCGGAGGGGGSTRPNPFCPPELGITQPDQDLGQADSLLFSSLHSTPGGTARSIDSTKSRSRDGRGPGAPKRHNPFLLQEGVGEPGLGDLYDDSIGDSATQQSFHLHGTGQPNFHLSSFQLPPSGPRVGRPWGTTRSRAGVVEGQEQEPVMTLDTQQCGTSHCCRPELEAETMELDECGGPGGSGSGGGASDTSGFSFDQEWKLSSDESPRNPGCSGSGDQHCRCSSTSSQSEAADQSMGYVSDSSCNSSDGVLVTFSTLYNKMHGTPRANLNSAPQSCSDSSFCSHSDPGAFYLDLQPSPFESKMSYESHHPESGGREGGYGCPHASSPELDANCNSYRPHCEPCPAVADLTACFQSQARLVVATQNYYKLVTCDLSSQSSPSPAGSSITSCSEEHTKISPPPGPGPDPGPSQPSEYYLFQKPEVQPEEQEAVSSSTQAAAAVGPTVLEGQVYTNTSPPNLSTGRQRSRSYDRSLQRSPPVRLGSLERMLSCPVRLSEGPAAMAGPGSPPRRVTSFAELAKGRKKTGGSGSPPLRVSVGDSSQEFSPIQEAQQDRGAPLDEGTCCSHSLPPMPLGPGMDLLGPDPSPPWSTQVCQGPHSSEMPPAGLRATGQGPLAQLMDPGPALPGSPANSHTQRDARARADGGGTESRPVLRYSKEQRPTTLPIQPFVFQHHFPKQLAKARALHSLSQLYSLSGCSRTQQPAPLAAPAAQVSVPAPSGEPQASTPRATGRGARKAGSEPETSRPSPLGSYSPIRSVGPFGPSTDSSASTSCSPPPEQPTATESLPPWSHSCPSAVRPATSQQPQKEDQKILTLTEYRLHGTGSLPPLGSWRSGLSRAESLARGGGEGSMATRPSNANHLSPQALKWREYRRKNPLGPPGLSGSLDRRSQEARLARRNPIFEFPGSLSAASHLNCRLNGQAVKPLPLTCPDFQDPFSLTEKPPAEFCLSPDGSSEAISIDLLQKKGLVKAVNIAVDLIVAHFGTSRDPGVKAKLGNSSVSPNVGHLVLKYLCPAVRAVLEDGLKAFVLDVIIGQRKNMPWSVVEASTQLGPSTKVLHGLYNKVSQFPELTSHTMRFNAFILGLLNIRSLEFWFNHLYNHEDIIQTHYQPWGFLSAAHTVCPGLFEELLLLLQPLALLPFSLDLLFQHRLLQSGQQQRQHKELLRVSQDLLLSAHSTLQLARARGQEGPGDVDRAAQGERVKGVGASEGGEEEEEEEETEEVAEAAGGSGRARWARGGQAGWWYQLMQSSQVYIDGSIEGSRFPRGSSNSSSEKKKGAGGGGPPQAPPPREGVVEGAEACPASEEALGRERGWPFWMGSPPDSVLAELRRSREREGPAASPAENEEGASEPSPGGIKWGHLFGSRKAQREARPTNRLPSDWLSLDKSMFQLVAQTVGSRREPEPKESLQEPHSPALPSSPPCEVQALCHHLATGPGQLSFHKGDILRVLGRAGGDWLRCSRGPDSGLVPLAYVTLTPTPSPTPGSSQN

SEQ ID NO: 62500 - protein, 1516 aa, Homo sapiens; identical to SEQ ID NO: 62499

SEQ ID NO: 62501 - protein, 924 aa, Homo sapiens
MDSPPKLTGETLIVHHIPLVHCQVPDRQCCGGAGGGGGSTRPNPFCPPELGITQPDQDLGQADSLLFSSLHSTPGGTARSIDSTKSRSRDGRGPGAPKRHNPFLLQEGVGEPGLGDLYDDSIGDSATQQSFHLHGTGQPNFHLSSFQLPPSGPRVGRPWGTTRSRAGVVEGQEQEPVMTLDTQQCGTSHCCRPELEAETMELDECGGPGGSGSGGGASDTSGFSFDQEWKLSSDESPRNPGCSGSGDQHCRCSSTSSQSEAADQSMGYVSDSSCNSSDGVLVTFSTLYNKMHGTPRANLNSAPQSCSDSSFCSHSDPGAFYLDLQPSPFESKMSYESHHPESGGREGGYGCPHASSPELDANCNSYRPHCEPCPAVADLTACFQSQARLVVATQNYYKLVTCDLSSQSSPSPAGSSITSCSEEHTKISPPPGPGPDPGPSQPSEYYLFQKPEVQPEEQEAVSSSTQAAAAVGPTVLEGQVYTNTSPPNLSTGRQRSRSYDRSLQRSPPVRLGSLERMLSCPVRLSEGPAAMAGPGSPPRRVTSFAELAKGRKKTGGSGSPPLRVSVGDSSQEFSPIQEAQQDRGAPLDEGTCCSHSLPPMPLGPGMDLLGPDPSPPWSTQVCQGPHSSEMPPAGLRATGQGPLAQLMDPGPALPGSPANSHTQRDARARADGGGTESRPVLRYSKEQRPTTLPIQPFVFQHHFPKQLAKARALHSLSQLYSLSGCSRTQQPAPLAAPAAQVSVPAPSGEPQASTPRATGRGARKAGSEPETSRPSPLGSYSPIRSVGPFGPSTDSSASTSCSPPPEQPTATESLPPWSHSCPSAVRPATSQQPQKEDQKILTLTEYRLHGTGSLPPLGSWRSGLSRAESLARGGGEGSMATRPSNANHLSPQALKWREYRRKNPLGPPGLSGSLDRRSQEARTG

SEQ ID NO: 62502 - protein, 405 aa, Homo sapiens
MEASFVQTTMALGLSSKKASSRNVAVERKNLITVCRFSVKTLLEKYTAEPIDDSSEEFVNFAAILEQILSHRFKACAPAGPVSWFSSDGQRGFWDYIRLACSKVPNNCVSSIENMENISTARAKGRAWIRVALMEKRMSEYITTALRDTRTTRRFYDSGAIMLRDEATILTGMLIGLSAIDFSFCLKGEVLDGKTPVVIDYTPYLKFTQSYDYLTDEEERHSAESSTSEDNSPEHPYLPLVTDEDSWYSKWHKMEQKFRIVYAQKGYLEELVRLRESQLKDLEAENRRLQLQLEEAAAQNQREKRELEGVILELQEQLTGLIPSDHAPLAQGSKELTTPLVNQWPSLGTLNGAEGASNSKLYRRHSFMSTEPLSAEASLSSDSQRLGEGTRDEEPWGPIGSSEPN

SEQ ID NO: 62503 - protein, 446 aa, Homo sapiens
MEASFVQTTMALGLSSKKASSRNVAVERKNLITVCRFSVKTLLEKYTAEPIDDSSEEFVNFAAILEQILSHRFKACAPAGPVSWFSSDGQRGFWDYIRLACSKVPNNCVSSIENMENISTARAKGRAWIRVALMEKRMSEYITTALRDTRTTRRFYDSGAIMLRDEATILTGMLIGLSAIDFSFCLKGEVLDGKTPVVIDYTPYLKFTQSYDYLTDEEERHSAESSTSEDNSPEHPYLPLVTDEDSWYSKWHKMEQKFRIVYAQKGYLEELVRLRESQLKDLEAENRRLQLQLEEAAAQNQREKRELEGVILELQEQLTGLIPSDHAPLAQGSKELTTPLVNQWPSLGTLNGAEGASNSKLYRRHSFMSTEPLSAEASLSSDSQRLGEGTRDEEPWGPIGKDPTPSMLGLCGSLASIPSCKSLASFKSNECLVSDSPEGSPALSPS

SEQ ID NO: 62504 - protein, 456 aa, Homo sapiens
MKIEEVKSTTKTQRIASHSHVKGLGLDESGLAKQAASGLVGQENAREACGVIVELIKSKKMAGRAVLLAGPPGTGKTALALAIAQELGSKVPFCPMVGSEVYSTEIKKTEVLMENFRRAIGLRIKETKEVYEGEVTELTPCETENPMGGYGKTISHVIIGLKTAKGTKQLKLDPSIFESLQKERVEAGDVIYIEANSGAVKRQGRCDTYATEFDLEAEEYVPLPKGDVHKKKEIIQDVTLHDLDVANARPQGGQDILSMMGQLMKPKKTEITDKLRGEINKVVNKYIDQGIAELVPGVLFVDEVHMLDIECFTYLHRALESSIAPIVIFASNRGNCVIRGTEDITSPHGIPLDLLDRVMIIRTMLYTPQEMKQIIKIRAQTEGINISEEALNHLGEIGTKTTLRYSVQLLTPANLLAKINGKDSIEKEHVEEISELFYDAKSSAKILADQQDKYMK

SEQ ID NO: 62505 - protein, 386 aa, Homo sapiens
MKIEEVKSTTKTQRIASHSHVKGLGLDESGLAKQAASGLVGQENAREACGVIVELIKSKKMAGRAVLLAGPPGTGKTALALAIAQELGSKVPFCPMVGSEVYSTEIKKTEVLMENFRRAIGLRIKETKEVYEGEVTELTPCETENPMGGYGKTISHVIIGLKTAKGTKQLKLDPSIFESLQKERVEAGDVIYIEANSGAVKRQGRCDTYATEFDLEAEEYVPLPKGDVHKKKEIIQDVTLHDLDVANARPQGGQDILSMMGQLMKPKKTEITDKLRGEINKVVNKYIDQGIAELVPGVLFVDEVHMLDIECFTYLHRALESSIAPIVIFASNRGNCVIRGTEDITSPHGIPLDLLDRVMIIRTMLYTPQEMKQVLSAAADPGQLAC

SEQ ID NO: 62506 - protein, 463 aa, Homo sapiens
MATVTATTKVPEIRDVTRIERIGAHSHIRGLGLDDALEPRQASQGMVGQLAARRAAGVVLEMIREGKIAGRAVLIAGQPGTGKTAIAMGMAQALGPDTPFTAIAGSEIFSLEMSKTEALTQAFRRSIGVRIKEETEIIEGEVVEIQIDRPATGTGSKVGKLTLKTTEMETIYDLGTKMIESLTKDKVQAGDVITIDKATGKISKLGRSFTRARDYDAMGSQTKFVQCPDGELQKRKEVVHTVSLHEIDVINSRTQGFLALFSGDTGEIKSEVREQINAKVAEWREEGKAEIIPGVLFIDEVHMLDIESFSFLNRALESDMAPVLIMATNRGITRIRGTSYQSPHGIPIDLLDRLLIVSTTPYSEKDTKQILRIRCEEEDVEMSEDAYTVLTRIGLETSLRYAIQLITAASLVCRKRKGTEVQVDDIKRVYSLFLDESRSTQYMKEYQDAFLFNELKGETMDTS

SEQ ID NO: 62507 - protein, 418 aa, Homo sapiens
MVGQLAARRAAGVVLEMIREGKIAGRAVLIAGQPGTGKTAIAMGMAQALGPDTPFTAIAGSEIFSLEMSKTEALTQAFRRSIGVRIKEETEIIEGEVVEIQIDRPATGTGSKVGKLTLKTTEMETIYDLGTKMIESLTKDKVQAGDVITIDKATGKISKLGRSFTRARDYDAMGSQTKFVQCPDGELQKRKEVVHTVSLHEIDVINSRTQGFLALFSGDTGEIKSEVREQINAKVAEWREEGKAEIIPGVLFIDEVHMLDIESFSFLNRALESDMAPVLIMATNRGITRIRGTSYQSPHGIPIDLLDRLLIVSTTPYSEKDTKQILRIRCEEEDVEMSEDAYTVLTRIGLETSLRYAIQLITAASLVCRKRKGTEVQVDDIKRVYSLFLDESRSTQYMKEYQDAFLFNELKGETMDTS

SEQ ID NO: 62508 - protein, 463 aa, Homo sapiens; identical to SEQ ID NO: 62506

SEQ ID NO: 62509 - protein, 5033 aa, Homo sapiens
MGDAEGEDEVQFLRTDDEVVLQCSATVLKEQLKLCLAAEGFGNRLCFLEPTSNAQNVPPDLAICCFVLEQSLSVRALQEMLANTVEAGVESSQGGGHRTLLYGHAILLRHAHSRMYLSCLTTSRSMTDKLAFDVGLQEDATGEACWWTMHPASKQRSEGEKVRVGDDIILVSVSSERYLHLSTASGELQVDASFMQTLWNMNPICSRCEEGFVTGGHVLRLFHGHMDECLTISPADSDDQRRLVYYEGGAVCTHARSLWRLEPLRISWSGSHLRWGQPLRVRHVTTGQYLALTEDQGLVVVDASKAHTKATSFCFRISKEKLDVAPKRDVEGMGPPEIKYGESLCFVQHVASGLWLTYAAPDPKALRLGVLKKKAMLHQEGHMDDALSLTRCQQEESQAARMIHSTNGLYNQFIKSLDSFSGKPRGSGPPAGTALPIEGVILSLQDLIIYFEPPSEDLQHEEKQSKLRSLRNRQSLFQEEGMLSMVLNCIDRLNVYTTAAHFAEFAGEEAAESWKEIVNLLYELLASLIRGNRSNCALFSTNLDWLVSKLDRLEASSGILEVLYCVLIESPEVLNIIQENHIKSIISLLDKHGRNHKVLDVLCSLCVCNGVAVRSNQDLITENLLPGRELLLQTNLINYVTSIRPNIFVGRAEGTTQYSKWYFEVMVDEVTPFLTAQATHLRVGWALTEGYTPYPGAGEGWGGNGVGDDLYSYGFDGLHLWTGHVARPVTSPGQHLLAPEDVISCCLDLSVPSISFRINGCPVQGVFESFNLDGLFFPVVSFSAGVKVRFLLGGRHGEFKFLPPPGYAPCHEAVLPRERLHLEPIKEYRREGPRGPHLVGPSRCLSHTDFVPCPVDTVQIVLPPHLERIREKLAENIHELWALTRIEQGWTYGPVRDDNKRLHPCLVDFHSLPEPERNYNLQMSGETLKTLLALGCHVGMADEKAEDNLKKTKLPKTYMMSNGYKPAPLDLSHVRLTPAQTTLVDRLAENGHNVWARDRVGQGWSYSAVQDIPARRNPRLVPYRLLDEATKRSNRDSLCQAVRTLLGYGYNIEPPDQEPSQVENQSRCDRVRIFRAEKSYTVQSGRWYFEFEAVTTGEMRVGWARPELRPDVELGADELAYVFNGHRGQRWHLGSEPFGRPWQPGDVVGCMIDLTENTIIFTLNGEVLMSDSGSETAFREIEIGDGFLPVCSLGPGQVGHLNLGQDVSSLRFFAICGLQEGFEPFAINMQRPVTTWFSKGLPQFEPVPLEHPHYEVSRVDGTVDTPPCLRLTHRTWGSQNSLVEMLFLRLSLPVQFHQHFRCTAGATPLAPPGLQPPAEDEARAAEPDPDYENLRRSAGGWSEAENGKEGTAKEGAPGGTPQAGGEAQPARAENEKDATTEKNKKRGFLFKAKKVAMMTQPPATPTLPRLPHDVVPADNRDDPEIILNTTTYYYSVRVFAGQEPSCVWAGWVTPDYHQHDMSFDLSKVRVVTVTMGDEQGNVHSSLKCSNCYMVWGGDFVSPGQQGRISHTDLVIGCLVDLATGLMTFTANGKESNTFFQVEPNTKLFPAVFVLPTHQNVIQFELGKQKNIMPLSAAMFQSERKNPAPQCPPRLEMQMLMPVSWSRMPNHFLQVETRRAGERLGWAVQCQEPLTMMALHIPEENRCMDILELSERLDLQRFHSHTLRLYRAVCALGNNRVAHALCSHVDQAQLLHALEDAHLPGPLRAGYYDLLISIHLESACRSRRSMLSEYIVPLTPETRAITLFPPGRSTENGHPRHGLPGVGVTTSLRPPHHFSPPCFVAALPAAGAAEAPARLSPAIPLEALRDKALRMLGEAVRDGGQHARDPVGGSVEFQFVPVLKLVSTLLVMGIFGDEDVKQILKMIEPEVFTEEEEEEDEEEEGEEEDEEEKEEDEEETAQEKEDEEKEEEEAAEGEKEEGLEEGLLQMKLPESVKLQMCHLLEYFCDQELQHRVESLAAFAERYVDKLQANQRSRYGLLIKAFSMTAAETARRTREFRSPPQEQINMLLQFKDGTDEEDCPLPEEIRQDLLDFHQDLLAHCGIQLDGEEEEPEEETTLGSRLMSLLEKVRLVKKKEEKPEEERSAEESKPRSLQELVSHMVVRWAQEDFVQSPELVRAMFSLLHRQYDGLGELLRALPRAYTISPSSVEDTMSLLECLGQIRSLLIVQMGPQEENLMIQSIGNIMNNKVFYQHPNLMRALGMHETVMEVMVNVLGGGESKEIRFPKMVTSCCRFLCYFCRISRQNQRSMFDHLSYLLENSGIGLGMQGSTPLDVAAASVIDNNELALALQEQDLEKVVSYLAGCGLQSCPMLVAKGYPDIGWNPCGGERYLDFLRFAVFVNGESVEENANVVVRLLIRKPECFGPALRGEGGSGLLAAIEEAIRISEDPARDGPGIRRDRRREHFGEEPPEENRVHLGHAIMSFYAALIDLLGRCAPEMHLIQAGKGEALRIRAILRSLVPLEDLVGIISLPLQIPTLGKDGALVQPKMSASFVPDHKASMVLFLDRVYGIENQDFLLHVLDVGFLPDMRAAASLDTATFSTTEMALALNRYLCLAVLPLITKCAPLFAGTEHRAIMVDSMLHTVYRLSRGRSLTKAQRDVIEDCLMSLCRYIRPSMLQHLLRRLVFDVPILNEFAKMPLKLLTNHYERCWKYYCLPTGWANFGVTSEEELHLTRKLFWGIFDSLAHKKYDPELYRMAMPCLCAIAGALPPDYVDASYSSKAEKKATVDAEGNFDPRPVETLNVIIPEKLDSFINKFAEYTHEKWAFDKIQNNWSYGENIDEELKTHPMLRPYKTFSEKDKEIYRWPIKESLKAMIAWEWTIEKAREGEEEKTEKKKTRKISQSAQTYDPREGYNPQPPDLSAVTLSRELQAMAEQLAENYHNTWGRKKKQELEAKGGGTHPLLVPYDTLTAKEKARDREKAQELLKFLQMNGYAVTRGLKDMELDSSSIEKRFAFGFLQQLLRWMDISQEFIAHLEAVVSSGRVEKSPHEQEIKFFAKILLPLINQYFTNHCLYFLSTPAKVLGSGGHASNKEKEMITSLFCKLAALVRHRVSLFGTDAPAVVNCLHILARSLDARTVMKSGPEIVKAGLRSFFESASEDIEKMVENLRLGKVSQARTQVKGVGQNLTYTTVALLPVLTTLFQHIAQHQFGDDVILDDVQVSCYRTLCSIYSLGTTKNTYVEKLRPALGECLARLAAAMPVAFLEPQLNEYNACSVYTTKSPRERAILGLPNSVEEMCPDIPVLERLMADIGGLAESGARYTEMPHVIEITLPMLCSYLPRWWERGPEAPPSALPAGAPPPCTAVTSDHLNSLLGNILRIIVNNLGIDEASWMKRLAVFAQPIVSRARPELLQSHFIPTIGRLRKRAGKVVSEEEQLRLEAKAEAQEGELLVRDEFSVLCRDLYALYPLLIRYVDNNRAQWLTEPNPSAEELFRMVGEIFIYWSKSHNFKREEQNFVVQNEINNMSFLTADNKSKMAKSGGSDQERTKKKRRGDRYSVQTSLIVATLKKMLPIGLNMCAPTDQDLITLAKTRYALKDTDEEVREFLHNNLHLQGKVEGSPSLRWQMALYRGVPGREEDADDPEKIVRRVQEVSAVLYYLDQTEHPYKSKKAVWHKLLSKQRRRAVVACFRMTPLYNLPTHRACNMFLESYKAAWILTEDHSFEDRMIDDLSKAGEQEEEEEEVEEKKPDPLHQLVLHFSRTALTEKSKLDEDYLYMAYADIMAKSCHLEEGGENGEAEEEVEVSFEEKQMEKQRLLYQQARLHTRGAAEMVLQMISACKGETGAMVSSTLKLGISILNGGNAEVQQKMLDYLKDKKEVGFFQSIQALMQTCSVLDLNAFERQNKAEGLGMVNEDGTVINRQNGEKVMADDEFTQDLFRFLQLLCEGHNNDFQNYLRTQTGNTTTINIIICTVDYLLRLQESISDFYWYYSGKDVIEEQGKRNFSKAMSVAKQVFNSLTEYIQGPCTGNQQSLAHSRLWDAVVGFLHVFAHMMMKLAQDSSQIELLKELLDLQKDMVVMLLSLLEGNVVNGMIARQMVDMLVESSSNVEMILKFFDMFLKLKDIVGSEAFQDYVTDPRGLISKKDFQKAMDSQKQFSGPEIQFLLSCSEADENEMINCEEFANRFQEPARDIGFNVAVLLTNLSEHVPHDPRLHNFLELAESILEYFRPYLGRIEIMGASRRIERIYFEISETNRAQWEMPQVKESKRQFIFDVVNEGGEAEKMELFVSFCEDTIFEMQIAAQISEPEGEPETDEDEGAGAAEAGAEGAEEGAAGLEGTAATAAAGATARVVAAAGRALRGLSYRSLRRRVRRLRRLTAREAATAVAALLWAAVTRAGAAGAGAAAGALGLLWGSLFGGGLVEGAKKVTVTELLAGMPDPTSDEVHGEQPAGPGGDADGEGASEGAGDAAEGAGDEEEAVHEAGPGGADGAVAVTDGGPFRPEGAGGLGDMGDTTPAEPPTPEGSPILKRKLGVDGVEEELPPEPEPEPEPELEPEKADAENGEKEEVPEPTPEPPKKQAPPSPPPKKEEAGGEFWGELEVQRVKFLNYLSRNFYTLRFLALFLAFAINFILLFYKVSDSPPGEDDMEGSAAGDVSGAGSGGSSGWGLGAGEEAEGDEDENMVYYFLEESTGYMEPALRCLSLLHTLVAFLCIIGYNCLKVPLVIFKREKELARKLEFDGLYITEQPEDDDVKGQWDRLVLNTPSFPSNYWDKFVKRKVLDKHGDIYGRERIAELLGMDLATLEITAHNERKPNPPPGLLTWLMSIDVKYQIWKFGVIFTDNSFLYLGWYMVMSLLGHYNNFFFAAHLLDIAMGVKTLRTILSSVTHNGKQLVMTVGLLAVVVYLYTVVAFNFFRKFYNKSEDEDEPDMKCDDMMTCYLFHMYVGVRAGGGIGDEIEDPAGDEYELYRVVFDITFFFFVIVILLAIIQGLIIDAFGELRDQQEQVKEDMETKCFICGIGSDYFDTTPHGFETHTLEEHNLANYMFFLMYLINKDETEHTGQESYVWKMYQERCWDFFPAGDCFRKQYEDQLS

SEQ ID NO: 62510 - protein, 5038 aa, Homo sapiens
MGDAEGEDEVQFLRTDDEVVLQCSATVLKEQLKLCLAAEGFGNRLCFLEPTSNAQNVPPDLAICCFVLEQSLSVRALQEMLANTVEAGVESSQGGGHRTLLYGHAILLRHAHSRMYLSCLTTSRSMTDKLAFDVGLQEDATGEACWWTMHPASKQRSEGEKVRVGDDIILVSVSSERYLHLSTASGELQVDASFMQTLWNMNPICSRCEEGFVTGGHVLRLFHGHMDECLTISPADSDDQRRLVYYEGGAVCTHARSLWRLEPLRISWSGSHLRWGQPLRVRHVTTGQYLALTEDQGLVVVDASKAHTKATSFCFRISKEKLDVAPKRDVEGMGPPEIKYGESLCFVQHVASGLWLTYAAPDPKALRLGVLKKKAMLHQEGHMDDALSLTRCQQEESQAARMIHSTNGLYNQFIKSLDSFSGKPRGSGPPAGTALPIEGVILSLQDLIIYFEPPSEDLQHEEKQSKLRSLRNRQSLFQEEGMLSMVLNCIDRLNVYTTAAHFAEFAGEEAAESWKEIVNLLYELLASLIRGNRSNCALFSTNLDWLVSKLDRLEASSGILEVLYCVLIESPEVLNIIQENHIKSIISLLDKHGRNHKVLDVLCSLCVCNGVAVRSNQDLITENLLPGRELLLQTNLINYVTSIRPNIFVGRAEGTTQYSKWYFEVMVDEVTPFLTAQATHLRVGWALTEGYTPYPGAGEGWGGNGVGDDLYSYGFDGLHLWTGHVARPVTSPGQHLLAPEDVISCCLDLSVPSISFRINGCPVQGVFESFNLDGLFFPVVSFSAGVKVRFLLGGRHGEFKFLPPPGYAPCHEAVLPRERLHLEPIKEYRREGPRGPHLVGPSRCLSHTDFVPCPVDTVQIVLPPHLERIREKLAENIHELWALTRIEQGWTYGPVRDDNKRLHPCLVDFHSLPEPERNYNLQMSGETLKTLLALGCHVGMADEKAEDNLKKTKLPKTYMMSNGYKPAPLDLSHVRLTPAQTTLVDRLAENGHNVWARDRVGQGWSYSAVQDIPARRNPRLVPYRLLDEATKRSNRDSLCQAVRTLLGYGYNIEPPDQEPSQVENQSRCDRVRIFRAEKSYTVQSGRWYFEFEAVTTGEMRVGWARPELRPDVELGADELAYVFNGHRGQRWHLGSEPFGRPWQPGDVVGCMIDLTENTIIFTLNGEVLMSDSGSETAFREIEIGDGFLPVCSLGPGQVGHLNLGQDVSSLRFFAICGLQEGFEPFAINMQRPVTTWFSKGLPQFEPVPLEHPHYEVSRVDGTVDTPPCLRLTHRTWGSQNSLVEMLFLRLSLPVQFHQHFRCTAGATPLAPPGLQPPAEDEARAAEPDPDYENLRRSAGGWSEAENGKEGTAKEGAPGGTPQAGGEAQPARAENEKDATTEKNKKRGFLFKAKKVAMMTQPPATPTLPRLPHDVVPADNRDDPEIILNTTTYYYSVRVFAGQEPSCVWAGWVTPDYHQHDMSFDLSKVRVVTVTMGDEQGNVHSSLKCSNCYMVWGGDFVSPGQQGRISHTDLVIGCLVDLATGLMTFTANGKESNTFFQVEPNTKLFPAVFVLPTHQNVIQFELGKQKNIMPLSAAMFQSERKNPAPQCPPRLEMQMLMPVSWSRMPNHFLQVETRRAGERLGWAVQCQEPLTMMALHIPEENRCMDILELSERLDLQRFHSHTLRLYRAVCALGNNRVAHALCSHVDQAQLLHALEDAHLPGPLRAGYYDLLISIHLESACRSRRSMLSEYIVPLTPETRAITLFPPGRSTENGHPRHGLPGVGVTTSLRPPHHFSPPCFVAALPAAGAAEAPARLSPAIPLEALRDKALRMLGEAVRDGGQHARDPVGGSVEFQFVPVLKLVSTLLVMGIFGDEDVKQILKMIEPEVFTEEEEEEDEEEEGEEEDEEEKEEDEEETAQEKEDEEKEEEEAAEGEKEEGLEEGLLQMKLPESVKLQMCHLLEYFCDQELQHRVESLAAFAERYVDKLQANQRSRYGLLIKAFSMTAAETARRTREFRSPPQEQINMLLQFKDGTDEEDCPLPEEIRQDLLDFHQDLLAHCGIQLDGEEEEPEEETTLGSRLMSLLEKVRLVKKKEEKPEEERSAEESKPRSLQELVSHMVVRWAQEDFVQSPELVRAMFSLLHRQYDGLGELLRALPRAYTISPSSVEDTMSLLECLGQIRSLLIVQMGPQEENLMIQSIGNIMNNKVFYQHPNLMRALGMHETVMEVMVNVLGGGESKEIRFPKMVTSCCRFLCYFCRISRQNQRSMFDHLSYLLENSGIGLGMQGSTPLDVAAASVIDNNELALALQEQDLEKVVSYLAGCGLQSCPMLVAKGYPDIGWNPCGGERYLDFLRFAVFVNGESVEENANVVVRLLIRKPECFGPALRGEGGSGLLAAIEEAIRISEDPARDGPGIRRDRRREHFGEEPPEENRVHLGHAIMSFYAALIDLLGRCAPEMHLIQAGKGEALRIRAILRSLVPLEDLVGIISLPLQIPTLGKDGALVQPKMSASFVPDHKASMVLFLDRVYGIENQDFLLHVLDVGFLPDMRAAASLDTATFSTTEMALALNRYLCLAVLPLITKCAPLFAGTEHRAIMVDSMLHTVYRLSRGRSLTKAQRDVIEDCLMSLCRYIRPSMLQHLLRRLVFDVPILNEFAKMPLKLLTNHYERCWKYYCLPTGWANFGVTSEEELHLTRKLFWGIFDSLAHKKYDPELYRMAMPCLCAIAGALPPDYVDASYSSKAEKKATVDAEGNFDPRPVETLNVIIPEKLDSFINKFAEYTHEKWAFDKIQNNWSYGENIDEELKTHPMLRPYKTFSEKDKEIYRWPIKESLKAMIAWEWTIEKAREGEEEKTEKKKTRKISQSAQTYDPREGYNPQPPDLSAVTLSRELQAMAEQLAENYHNTWGRKKKQELEAKGGGTHPLLVPYDTLTAKEKARDREKAQELLKFLQMNGYAVTRGLKDMELDSSSIEKRFAFGFLQQLLRWMDISQEFIAHLEAVVSSGRVEKSPHEQEIKFFAKILLPLINQYFTNHCLYFLSTPAKVLGSGGHASNKEKEMITSLFCKLAALVRHRVSLFGTDAPAVVNCLHILARSLDARTVMKSGPEIVKAGLRSFFESASEDIEKMVENLRLGKVSQARTQVKGVGQNLTYTTVALLPVLTTLFQHIAQHQFGDDVILDDVQVSCYRTLCSIYSLGTTKNTYVEKLRPALGECLARLAAAMPVAFLEPQLNEYNACSVYTTKSPRERAILGLPNSVEEMCPDIPVLERLMADIGGLAESGARYTEMPHVIEITLPMLCSYLPRWWERGPEAPPSALPAGAPPPCTAVTSDHLNSLLGNILRIIVNNLGIDEASWMKRLAVFAQPIVSRARPELLQSHFIPTIGRLRKRAGKVVSEEEQLRLEAKAEAQEGELLVRDEFSVLCRDLYALYPLLIRYVDNNRAQWLTEPNPSAEELFRMVGEIFIYWSKSHNFKREEQNFVVQNEINNMSFLTADNKSKMAKAGDIQSGGSDQERTKKKRRGDRYSVQTSLIVATLKKMLPIGLNMCAPTDQDLITLAKTRYALKDTDEEVREFLHNNLHLQGKVEGSPSLRWQMALYRGVPGREEDADDPEKIVRRVQEVSAVLYYLDQTEHPYKSKKAVWHKLLSKQRRRAVVACFRMTPLYNLPTHRACNMFLESYKAAWILTEDHSFEDRMIDDLSKAGEQEEEEEEVEEKKPDPLHQLVLHFSRTALTEKSKLDEDYLYMAYADIMAKSCHLEEGGENGEAEEEVEVSFEEKQMEKQRLLYQQARLHTRGAAEMVLQMISACKGETGAMVSSTLKLGISILNGGNAEVQQKMLDYLKDKKEVGFFQSIQALMQTCSVLDLNAFERQNKAEGLGMVNEDGTVINRQNGEKVMADDEFTQDLFRFLQLLCEGHNNDFQNYLRTQTGNTTTINIIICTVDYLLRLQESISDFYWYYSGKDVIEEQGKRNFSKAMSVAKQVFNSLTEYIQGPCTGNQQSLAHSRLWDAVVGFLHVFAHMMMKLAQDSSQIELLKELLDLQKDMVVMLLSLLEGNVVNGMIARQMVDMLVESSSNVEMILKFFDMFLKLKDIVGSEAFQDYVTDPRGLISKKDFQKAMDSQKQFSGPEIQFLLSCSEADENEMINCEEFANRFQEPARDIGFNVAVLLTNLSEHVPHDPRLHNFLELAESILEYFRPYLGRIEIMGASRRIERIYFEISETNRAQWEMPQVKESKRQFIFDVVNEGGEAEKMELFVSFCEDTIFEMQIAAQISEPEGEPETDEDEGAGAAEAGAEGAEEGAAGLEGTAATAAAGATARVVAAAGRALRGLSYRSLRRRVRRLRRLTAREAATAVAALLWAAVTRAGAAGAGAAAGALGLLWGSLFGGGLVEGAKKVTVTELLAGMPDPTSDEVHGEQPAGPGGDADGEGASEGAGDAAEGAGDEEEAVHEAGPGGADGAVAVTDGGPFRPEGAGGLGDMGDTTPAEPPTPEGSPILKRKLGVDGVEEELPPEPEPEPEPELEPEKADAENGEKEEVPEPTPEPPKKQAPPSPPPKKEEAGGEFWGELEVQRVKFLNYLSRNFYTLRFLALFLAFAINFILLFYKVSDSPPGEDDMEGSAAGDVSGAGSGGSSGWGLGAGEEAEGDEDENMVYYFLEESTGYMEPALRCLSLLHTLVAFLCIIGYNCLKVPLVIFKREKELARKLEFDGLYITEQPEDDDVKGQWDRLVLNTPSFPSNYWDKFVKRKVLDKHGDIYGRERIAELLGMDLATLEITAHNERKPNPPPGLLTWLMSIDVKYQIWKFGVIFTDNSFLYLGWYMVMSLLGHYNNFFFAAHLLDIAMGVKTLRTILSSVTHNGKQLVMTVGLLAVVVYLYTVVAFNFFRKFYNKSEDEDEPDMKCDDMMTCYLFHMYVGVRAGGGIGDEIEDPAGDEYELYRVVFDITFFFFVIVILLAIIQGLIIDAFGELRDQQEQVKEDMETKCFICGIGSDYFDTTPHGFETHTLEEHNLANYMFFLMYLINKDETEHTGQESYVWKMYQERCWDFFPAGDCFRKQYEDQLS

SEQ ID NO: 62511 - protein, 5033 aa, Homo sapiens
MGDAEGEDEVQFLRTDDEVVLQCSATVLKEQLKLCLAAEGFGNRLCFLEPTSNAQNVPPDLAICCFVLEQSLSVRALQEMLANTVEAGVESSQGGGHRTLLYGHAILLRHAHSRMYLSCLTTSRSMTDKLAFDVGLQEDATGEACWWTMHPASKQRSEGEKVRVGDDIILVSVSSERYLHLSTASGELQVDASFMQTLWNMNPICSRCEEGFVTGGHVLRLFHGHMDECLTISPADSDDQRRLVYYEGGAVCTHARSLWRLEPLRISWSGSHLRWGQPLRVRHVTTGQYLALTEDQGLVVVDASKAHTKATSFCFRISKEKLDVAPKRDVEGMGPPEIKYGESLCFVQHVASGLWLTYAAPDPKALRLGVLKKKAMLHQEGHMDDALSLTRCQQEESQAARMIHSTNGLYNQFIKSLDSFSGKPRGSGPPAGTALPIEGVILSLQDLIIYFEPPSEDLQHEEKQSKLRSLRNRQSLFQEEGMLSMVLNCIDRLNVYTTAAHFAEFAGEEAAESWKEIVNLLYELLASLIRGNRSNCALFSTNLDWLVSKLDRLEASSGILEVLYCVLIESPEVLNIIQENHIKSIISLLDKHGRNHKVLDVLCSLCVCNGVAVRSNQDLITENLLPGRELLLQTNLINYVTSIRPNIFVGRAEGTTQYSKWYFEVMVDEVTPFLTAQATHLRVGWALTEGYTPYPGAGEGWGGNGVGDDLYSYGFDGLHLWTGHVARPVTSPGQHLLAPEDVISCCLDLSVPSISFRINGCPVQGVFESFNLDGLFFPVVSFSAGVKVRFLLGGRHGEFKFLPPPGYAPCHEAVLPRERLHLEPIKEYRREGPRGPHLVGPSRCLSHTDFVPCPVDTVQIVLPPHLERIREKLAENIHELWALTRIEQGWTYGPVRDDNKRLHPCLVDFHSLPEPERNYNLQMSGETLKTLLALGCHVGMADEKAEDNLKKTKLPKTYMMSNGYKPAPLDLSHVRLTPAQTTLVDRLAENGHNVWARDRVGQGWSYSAVQDIPARRNPRLVPYRLLDEATKRSNRDSLCQAVRTLLGYGYNIEPPDQEPSQVENQSRCDRVRIFRAEKSYTVQSGRWYFEFEAVTTGEMRVGWARPELRPDVELGADELAYVFNGHRGQRWHLGSEPFGRPWQPGDVVGCMIDLTENTIIFTLNGEVLMSDSGSETAFREIEIGDGFLPVCSLGPGQVGHLNLGQDVSSLRFFAICGLQEGFEPFAINMQRPVTTWFSKGLPQFEPVPLEHPHYEVSRVDGTVDTPPCLRLTHRTWGSQNSLVEMLFLRLSLPVQFHQHFRCTAGATPLAPPGLQPPAEDEARAAEPDPDYENLRRSAGGWSEAENGKEGTAKEGAPGGTPQAGGEAQPARAENEKDATTEKNKKRGFLFKAKKVAMMTQPPATPTLPRLPHDVVPADNRDDPEIILNTTTYYYSVRVFAGQEPSCVWAGWVTPDYHQHDMSFDLSKVRVVTVTMGDEQGNVHSSLKCSNCYMVWGGDFVSPGQQGRISHTDLVIGCLVDLATGLMTFTANGKESNTFFQVEPNTKLFPAVFVLPTHQNVIQFELGKQKNIMPLSAAMFQSERKNPAPQCPPRLEMQMLMPVSWSRMPNHFLQVETRRAGERLGWAVQCQEPLTMMALHIPEENRCMDILELSERLDLQRFHSHTLRLYRAVCALGNNRVAHALCSHVDQAQLLHALEDAHLPGPLRAGYYDLLISIHLESACRSRRSMLSEYIVPLTPETRAITLFPPGRSTENGHPRHGLPGVGVTTSLRPPHHFSPPCFVAALPAAGAAEAPARLSPAIPLEALRDKALRMLGEAVRDGGQHARDPVGGSVEFQFVPVLKLVSTLLVMGIFGDEDVKQILKMIEPEVFTEEEEEEDEEEEGEEEDEEEKEEDEEETAQEKEDEEKEEEEAAEGEKEEGLEEGLLQMKLPESVKLQMCHLLEYFCDQELQHRVESLAAFAERYVDKLQANQRSRYGLLIKAFSMTAAETARRTREFRSPPQEQINMLLQFKDGTDEEDCPLPEEIRQDLLDFHQDLLAHCGIQLDGEEEEPEEETTLGSRLMSLLEKVRLVKKKEEKPEEERSAEESKPRSLQELVSHMVVRWAQEDFVQSPELVRAMFSLLHRQYDGLGELLRALPRAYTISPSSVEDTMSLLECLGQIRSLLIVQMGPQEENLMIQSIGNIMNNKVFYQHPNLMRALGMHETVMEVMVNVLGGGESKEIRFPKMVTSCCRFLCYFCRISRQNQRSMFDHLSYLLENSGIGLGMQGSTPLDVAAASVIDNNELALALQEQDLEKVVSYLAGCGLQSCPMLVAKGYPDIGWNPCGGERYLDFLRFAVFVNGESVEENANVVVRLLIRKPECFGPALRGEGGSGLLAAIEEAIRISEDPARDGPGIRRDRRREHFGEEPPEENRVHLGHAIMSFYAALIDLLGRCAPEMHLIQAGKGEALRIRAILRSLVPLEDLVGIISLPLQIPTLGKDGALVQPKMSASFVPDHKASMVLFLDRVYGIENQDFLLHVLDVGFLPDMRAAASLDTATFSTTEMALALNRYLCLAVLPLITKCAPLFAGTEHRAIMVDSMLHTVYRLSRGRSLTKAQRDVIEDCLMSLCRYIRPSMLQHLLRRLVFDVPILNEFAKMPLKLLTNHYERCWKYYCLPTGWANFGVTSEEELHLTRKLFWGIFDSLAHKKYDPELYRMAMPCLCAIAGALPPDYVDASYSSKAEKKATVDAEGNFDPRPVETLNVIIPEKLDSFINKFAEYTHEKWAFDKIQNNWSYGENIDEELKTHPMLRPYKTFSEKDKEIYRWPIKESLKAMIAWEWTIEKAREGEEEKTEKKKTRKISQSAQTYDPREGYNPQPPDLSAVTLSRELQAMAEQLAENYHNTWGRKKKQELEAKGGGTHPLLVPYDTLTAKEKARDREKAQELLKFLQMNGYAVTRGLKDMELDSSSIEKRFAFGFLQQLLRWMDISQEFIAHLEAVVSSGRVEKSPHEQEIKFFAKILLPLINQYFTNHCLYFLSTPAKVLGSGGHASNKEKEMITSLFCKLAALVRHRVSLFGTDAPAVVNCLHILARSLDARTVMKSGPEIVKAGLRSFFESASEDIEKMVENLRLGKVSQARTQVKGVGQNLTYTTVALLPVLTTLFQHIAQHQFGDDVILDDVQVSCYRTLCSIYSLGTTKNTYVEKLRPALGECLARLAAAMPVAFLEPQLNEYNACSVYTTKSPRERAILGLPNSVEEMCPDIPVLERLMADIGGLAESGARYTEMPHVIEITLPMLCSYLPRWWERGPEAPPSALPAGAPPPCTAVTSDHLNSLLGNILRIIVNNLGIDEASWMKRLAVFAQPIVSRARPELLQSHFIPTIGRLRKRAGKVVSEEEQLRLEAKAEAQEGELLVRDEFSVLCRDLYALYPLLIRYVDNNRAQWLTEPNPSAEELFRMVGEIFIYWSKSHNFKREEQNFVVQNEINNMSFLTADNKSKMAKAGDIQSGGSDQERTKKKRRGDRYSVQTSLIVATLKKMLPIGLNMCAPTDQDLITLAKTRYALKDTDEEVREFLHNNLHLQGKVEGSPSLRWQMALYRGVPGREEDADDPEKIVRRVQEVSAVLYYLDQTEHPYKSKKAVWHKLLSKQRRRAVVACFRMTPLYNLPTHRACNMFLESYKAAWILTEDHSFEDRMIDDLSKAGEQEEEEEEVEEKKPDPLHQLVLHFSRTALTEKSKLDEDYLYMAYADIMAKSCHLEEGGENGEAEEEVEVSFEEKQMEKQRLLYQQARLHTRGAAEMVLQMISACKGETGAMVSSTLKLGISILNGGNAEVQQKMLDYLKDKKEVGFFQSIQALMQTCSVLDLNAFERQNKAEGLGMVNEDGTVGEKVMADDEFTQDLFRFLQLLCEGHNNDFQNYLRTQTGNTTTINIIICTVDYLLRLQESISDFYWYYSGKDVIEEQGKRNFSKAMSVAKQVFNSLTEYIQGPCTGNQQSLAHSRLWDAVVGFLHVFAHMMMKLAQDSSQIELLKELLDLQKDMVVMLLSLLEGNVVNGMIARQMVDMLVESSSNVEMILKFFDMFLKLKDIVGSEAFQDYVTDPRGLISKKDFQKAMDSQKQFSGPEIQFLLSCSEADENEMINCEEFANRFQEPARDIGFNVAVLLTNLSEHVPHDPRLHNFLELAESILEYFRPYLGRIEIMGASRRIERIYFEISETNRAQWEMPQVKESKRQFIFDVVNEGGEAEKMELFVSFCEDTIFEMQIAAQISEPEGEPETDEDEGAGAAEAGAEGAEEGAAGLEGTAATAAAGATARVVAAAGRALRGLSYRSLRRRVRRLRRLTAREAATAVAALLWAAVTRAGAAGAGAAAGALGLLWGSLFGGGLVEGAKKVTVTELLAGMPDPTSDEVHGEQPAGPGGDADGEGASEGAGDAAEGAGDEEEAVHEAGPGGADGAVAVTDGGPFRPEGAGGLGDMGDTTPAEPPTPEGSPILKRKLGVDGVEEELPPEPEPEPEPELEPEKADAENGEKEEVPEPTPEPPKKQAPPSPPPKKEEAGGEFWGELEVQRVKFLNYLSRNFYTLRFLALFLAFAINFILLFYKVSDSPPGEDDMEGSAAGDVSGAGSGGSSGWGLGAGEEAEGDEDENMVYYFLEESTGYMEPALRCLSLLHTLVAFLCIIGYNCLKVPLVIFKREKELARKLEFDGLYITEQPEDDDVKGQWDRLVLNTPSFPSNYWDKFVKRKVLDKHGDIYGRERIAELLGMDLATLEITAHNERKPNPPPGLLTWLMSIDVKYQIWKFGVIFTDNSFLYLGWYMVMSLLGHYNNFFFAAHLLDIAMGVKTLRTILSSVTHNGKQLVMTVGLLAVVVYLYTVVAFNFFRKFYNKSEDEDEPDMKCDDMMTCYLFHMYVGVRAGGGIGDEIEDPAGDEYELYRVVFDITFFFFVIVILLAIIQGLIIDAFGELRDQQEQVKEDMETKCFICGIGSDYFDTTPHGFETHTLEEHNLANYMFFLMYLINKDETEHTGQESYVWKMYQERCWDFFPAGDCFRKQYEDQLS

SEQ ID NO: 62512 - protein, 676 aa, Homo sapiens
MKSGPEIVKAGLRSFFESASEDIEKMVENLRLGKVSQARTQVKGVGQNLTYTTVALLPVLTTLFQHIAQHQFGDDVILDDVQVSCYRTLCSIYSLGTTKNTYVEKLRPALGECLARLAAAMPVAFLEPQLNEYNACSVYTTKSPRERAILGLPNSVEEMCPDIPVLERLMADIGGLAESGARYTEMPHVIEITLPMLCSYLPRWWERGPEAPPSALPAGAPPPCTAVTSDHLNSLLGNILRIIVNNLGIDEASWMKRLAVFAQPIVSRARPELLQSHFIPTIGRLRKRAGKVVSEEEQLRLEAKAEAQEGELLVRDEFSVLCRDLYALYPLLIRYVDNNRAQWLTEPNPSAEELFRMVGEIFIYWSKSHNFKREEQNFVVQNEINNMSFLTADNKSKMAKAGDIQSGGSDQERTKKKRRGDRYSVQTSLIVATLKKMLPIGLNMCAPTDQDLITLAKTRYALKDTDEEVREFLHNNLHLQGKVEGSPSLRWQMALYRGVPGREEDADDPEKIVRRVQEVSAVLYYLDQTEHPYKSKKAVWHKLLSKQRRRAVVACFRMTPLYNLPTHRACNMFLESYKAAWILTEDHSFEDRMIDDLSKAGEQEEEEEEVEEKKPDPLHQLVLHFSRTALTEKSKLDEDYLYMAYADIMAKSCHLEEGGENGEAEEEVEVSFEEKQ

SEQ ID NO: 62513 - protein, 4973 aa, Homo sapiens
LGPRSSSNKLSNKKMMKWFCSAPQPSTKNNRSYAWQQKDLATDFVSWSPLPIPRMCPQTSPSAPLCWSSPSLSGRCRRCWLTPWRNQKGQLDIIKWSFGLKTAQGGGHRTLLYGHAILLRHSYSGMYLCCLSTSRSSTDKLAFDVGLQEDTTGEACWWTIHPASKQRSEGEKVRVGDDLILVSVSSERYLHLSYGNGSLHVDAAFQQTLWSVAPISSGSEAAQGYLIGGDVLRLLHGHMDECLTVPSGEHGEEQRRTVHYEGGAVSVHARSLWRLETLRVAWSGSHIRWGQPFRLRHVTTGKYLSLMEDKNLLLMDKEKADVKSTAFTFRSSKEKLDVGVRKEVDGMGTSEIKYGDSVCYIQHVDTGLWLTYQSVDVKSVRMGSIQRKAIMHHEGHMDDGISLSRSQHEESRTARVIRSTVFLFNRFIRGLDALSKKAKASTVDLPIESVSLSLQDLIGYFHPPDEHLEHEDKQNRLRALKNRQNLFQEEGMINLVLECIDRLHVYSSAAHFADVAGREAGESWKSILNSLYELLAALIRGNRKNCAQFSGSLDWLISRLERLEASSGILEVLHCVLVESPEALNIIKEGHIKSIISLLDKHGRNHKVLDVLCSLCVCHGVAVRSNQHLICDNLLPGRDLLLQTRLVNHVSSMRPNIFLGVSEGSAQYKKWYYELMVDHTEPFVTAEATHLRVGWASTEGYSPYPGGGEEWGGNGVGDDLFSYGFDGLHLWSGCIARTVSSPNQHLLRTDDVISCCLDLSAPSISFRINGQPVQGMFENFNIDGLFFPVVSFSAGIKVRFLLGGRHGEFKFLPPPGYAPCYEAVLPKEKLKVEHSREYKQERTYTRDLLGPTVSLTQAAFTPIPVDTSQIVLPPHLERIREKLAENIHELWVMNKIELGWQYGPVRDDNKRQHPCLVEFSKLPEQERNYNLQMSLETLKTLLALGCHVGISDEHAEDKVKKMKLPKNYQLTSGYKPAPMDLSFIKLTPSQEAMVDKLAENAHNVWARDRIRQGWTYGIQQDVKNRRNPRLVPYTLLDDRTKKSNKDSLREAVRTLLGYGYNLEAPDQDHAARAEVCSGTGERFRIFRAEKTYAVKAGRWYFEFETVTAGDMRVGWSRPGCQPDQELGSDERAFAFDGFKAQRWHQGNEHYGRSWQAGDVVGCMVDMNEHTMMFTLNGEILLDDSGSELAFKDFDVGDGFIPVCSLGVAQVGRMNFGKDVSTLKYFTICGLQEGYEPFAVNTNRDITMWLSKRLPQFLQVPSNHEHIEVTRIDGTIDSSPCLKVTQKSFGSQNSNTDIMFYRLSMPIECAEVFSKTVAGGLPGAGLFGPKNDLEDYDADSDFEVLMKTAHGHLVPDRVDKDKEATKPEFNNHKDYAQEKPSRLKQRFLLRRTKPDYSTSHSARLTEDVLADDRDDYDFLMQTSTYYYSVRIFPGQEPANVWVGWITSDFHQYDTGFDLDRVRTVTVTLGDEKGKVHESIKRSNCYMVCAGESMSPGQGRNNNGLEIGCVVDAASGLLTFIANGKELSTYYQVEPSTKLFPAVFAQATSPNVFQFELGRIKNVMPLSAGLFKSEHKNPVPQCPPRLHVQFLSHVLWSRMPNQFLKVDVSRISERQGWLVQCLDPLQFMSLHIPEENRSVDILELTEQEELLKFHYHTLRLYSAVCALGNHRVAHALCSHVDEPQLLYAIENKYMPGLLRAGYYDLLIDIHLSSYATARLMMNNEYIVPMTEETKSITLFPDENKKHGLPGIGLSTSLRPRMQFSSPSFVSISNECYQYSPEFPLDILKSKTIQMLTEAVKEGSLHARDPVGGTTEFLFVPLIKLFYTLLIMGIFHNEDLKHILQLIEPSVFKEAATPEEESDTLEKELSVDDAKLQGAGEEEAKGGKRPKEGLLQMKLPEPVKLQMCLLLQYLCDCQVRHRIEAIVAFSDDFVAKLQDNQRFRYNEVMQALNMSAALTARKTKEFRSPPQEQINMLLNFKDDKSECPCPEEIRDQLLDFHEDLMTHCGIELDEDGSLDGNSDLTIRGRLLSLVEKVTYLKKKQAEKPVESDSKKSSTLQQLISETMVRWAQESVIEDPELVRAMFVLLHRQYDGIGGLVRALPKTYTINGVSVEDTINLLASLGQIRSLLSVRMGKEEEKLMIRGLGDIMNNKVFYQHPNLMRALGMHETVMEVMVNVLGGGESKEITFPKMVANCCRFLCYFCRISRQNQKAMFDHLSYLLENSSVGLASPAMRGSTPLDVAAASVMDNNELALALREPDLEKVVRYLAGCGLQSCQMLVSKGYPDIGWNPVEGERYLDFLRFAVFCNGESVEENANVVVRLLIRRPECFGPALRGEGGNGLLAAMEEAIKIAEDPSRDGPSPNSGSSKTLDTEEEEDDTIHMGNAIMTFYSALIDLLGRCAPEMHLIHAGKGEAIRIRSILRSLIPLGDLVGVISIAFQMPTIAKDGNVVEPDMSAGFCPDHKAAMVLFLDRVYGIEVQDFLLHLLEVGFLPDLRAAASLDTAALSATDMALALNRYLCTAVLPLLTRCAPLFAGTEHHASLIDSLLHTVYRLSKGCSLTKAQRDSIEVCLLSICGQLRPSMMQHLLRRLVFDVPLLNEHAKMPLKLLTNHYERCWKYYCLPGGWGNFGAASEEELHLSRKLFWGIFDALSQKKYEQELFKLALPCLSAVAGALPPDYMESNYVSMMEKQSSMDSEGNFNPQPVDTSNITIPEKLEYFINKYAEHSHDKWSMDKLANGWIYGEIYSDSSKVQPLMKPYKLLSEKEKEIYRWPIKESLKTMLAWGWRIERTREGDSMALYNRTRRISQTSQVSVDAAHGYSPRAIDMSNVTLSRDLHAMAEMMAENYHNIWAKKKKMELESKGGGNHPLLVPYDTLTAKEKAKDREKAQDILKFLQINGYAVSRGFKDLELDTPSIEKRFAYSFLQQLIRYVDEAHQYILEFDGGSRGKGEHFPYEQEIKFFAKVVLPLIDQYFKNHRLYFLSAASRPLCSGGHASNKEKEMVTSLFCKLGVLVRHRISLFGNDATSIVNCLHILGQTLDARTVMKTGLESVKSALRAFLDNAAEDLEKTMENLKQGQFTHTRNQPKGVTQIINYTTVALLPMLSSLFEHIGQHQFGEDLILEDVQVSCYRILTSLYALGTSKSIYVERQRSALGECLAAFAGAFPVAFLETHLDKHNIYSIYNTKSSRERAALSLPTNVEDVCPNIPSLEKLMEEIVELAESGIRYTQMPHVMEVILPMLCSYMSRWWEHGPENNPERAEMCCTALNSEHMNTLLGNILKIIYNNLGIDEGAWMKRLAVFSQPIINKVKPQLLKTHFLPLMEKLKKKAATVVSEEDHLKAEARGDMSEAELLILDEFTTLARDLYAFYPLLIRFVDYNRAKWLKEPNPEAEELFRMVAEVFIYWSKSHNFKREEQNFVVQNEINNMSFLITDTKSKMSKAAVSDQERKKMKRKGDRYSMQTSLIVAALKRLLPIGLNICAPGDQELIALAKNRFSLKDTEDEVRDIIRSNIHLQGKLEDPAIRWQMALYKDLPNRTDDTSDPEKTVERVLDIANVLFHLEQKSKRVGRRHYCLVEHPQRSKKAVWHKLLSKQRKRAVVACFRMAPLYNLPRHRAVNLFLQGYEKSWIETEEHYFEDKLIEDLAKPGAEPPEEDEGTKRVDPLHQLILLFSRTALTEKCKLEEDFLYMAYADIMAKSCHDEEDDDGEEEVKSFEVTGSQRSKEKEMEKQKLLYQQARLHDRGAAEMVLQTISASKGETGPMVAATLKLGIAILNGGNSTVQQKMLDYLKEKKDVGFFQSLAGLMQSCSVLDLNAFERQNKAEGLGMVTEEGSGEKVLQDDEFTCDLFRFLQLLCEGHNSDFQNYLRTQTGNNTTVNIIISTVDYLLRVQESISDFYWYYSGKDVIDEQGQRNFSKAIQVAKQVFNTLTEYIQGPCTGNQQSLAHSRLWDAVVGFLHVFAHMQMKLSQDSSQIELLKELMDLQKDMVVMLLSMLEGNVVNGTIGKQMVDMLVESSNNVEMILKFFDMFLKLKDLTSSDTFKEYDPDGKGVISKRDFHKAMESHKHYTQSETEFLLSCAETDENETLDYEEFVKRFHEPAKDIGFNVAVLLTNLSEHMPNDTRLQTFLELAESVLNYFQPFLGRIEIMGSAKRIERVYFEISESSRTQWEKPQVKESKRQFIFDVVNEGGEKEKMELFVNFCEDTIFEMQLAAQISESDLNERSANKEESEKERPEEQGPRMAFFSILTVRSALFALRYNILTLMRMLSLKSLKKQMKKVKKMTVKDMVTAFFSSYWSIFMTLLHFVASVFRGFFRIICSLLLGGSLVEGAKKIKVAELLANMPDPTQDEVRGDGEEGERKPLEAALPSEDLTDLKELTEESDLLSDIFGLDLKREGGQYKLIPHNPNAGLSDLMSNPVPMPEVQEKFQEQKAKEEEKEEKEETKSEPEKAEGEDGEKEEKAKEDKGKQKLRQLHTHRYGEPEVPESAFWKKIIAYQQKLLNYFARNFYNMRMLALFVAFAINFILLFYKVSTSSVVEGKELPTRSSSENAKVTSLDSSSHRIIAVHYVLEESSGYMEPTLRILAILHTVISFFCIIGYYCLKVPLVIFKREKEVARKLEFDGLYITEQPSEDDIKGQWDRLVINTQSFPNNYWDKFVKRKVMDKYGEFYGRDRISELLGMDKAALDFSDAREKKKPKKDSSLSAVLNSIDVKYQMWKLGVVFTDNSFLYLAWYMTMSVLGHYNNFFFAAHLLDIAMGFKTLRTILSSVTHNGKQLVLTVGLLAVVVYLYTVVAFNFFRKFYNKSEDGDTPDMKCDDMLTCYMFHMYVGVRAGGGIGDEIEDPAGDEYEIYRIIFDITFFFFVIVILLAIIQGLIIDAFGELRDQQEQVKEDMETKCFICGIGNDYFDTVPHGFETHTLQEHNLANYLFFLMYLINKDETEHTGQESYVWKMYQERCWEFFPAGDCFRKQYEDQLN

SEQ ID NO: 62514 - protein, 4967 aa, Homo sapiens
MADGGEGEDEIQFLRTDDEVVLQCTATIHKEQQKLCLAAEGFGNRLCFLESTSNSKNVPPDLSICTFVLEQSLSVRALQEMLANTVEKSEGQVDVEKWKFMMKTAQGGGHRTLLYGHAILLRHSYSGMYLCCLSTSRSSTDKLAFDVGLQEDTTGEACWWTIHPASKQRSEGEKVRVGDDLILVSVSSERYLHLSYGNGSLHVDAAFQQTLWSVAPISSGSEAAQGYLIGGDVLRLLHGHMDECLTVPSGEHGEEQRRTVHYEGGAVSVHARSLWRLETLRVAWSGSHIRWGQPFRLRHVTTGKYLSLMEDKNLLLMDKEKADVKSTAFTFRSSKEKLDVGVRKEVDGMGTSEIKYGDSVCYIQHVDTGLWLTYQSVDVKSVRMGSIQRKAIMHHEGHMDDGISLSRSQHEESRTARVIRSTVFLFNRFIRGLDALSKKAKASTVDLPIESVSLSLQDLIGYFHPPDEHLEHEDKQNRLRALKNRQNLFQEEGMINLVLECIDRLHVYSSAAHFADVAGREAGESWKSILNSLYELLAALIRGNRKNCAQFSGSLDWLISRLERLEASSGILEVLHCVLVESPEALNIIKEGHIKSIISLLDKHGRNHKVLDVLCSLCVCHGVAVRSNQHLICDNLLPGRDLLLQTRLVNHVSSMRPNIFLGVSEGSAQYKKWYYELMVDHTEPFVTAEATHLRVGWASTEGYSPYPGGGEEWGGNGVGDDLFSYGFDGLHLWSGCIARTVSSPNQHLLRTDDVISCCLDLSAPSISFRINGQPVQGMFENFNIDGLFFPVVSFSAGIKVRFLLGGRHGEFKFLPPPGYAPCYEAVLPKEKLKVEHSREYKQERTYTRDLLGPTVSLTQAAFTPIPVDTSQIVLPPHLERIREKLAENIHELWVMNKIELGWQYGPVRDDNKRQHPCLVEFSKLPEQERNYNLQMSLETLKTLLALGCHVGISDEHAEDKVKKMKLPKNYQLTSGYKPAPMDLSFIKLTPSQEAMVDKLAENAHNVWARDRIRQGWTYGIQQDVKNRRNPRLVPYTLLDDRTKKSNKDSLREAVRTLLGYGYNLEAPDQDHAARAEVCSGTGERFRIFRAEKTYAVKAGRWYFEFETVTAGDMRVGWSRPGCQPDQELGSDERAFAFDGFKAQRWHQGNEHYGRSWQAGDVVGCMVDMNEHTMMFTLNGEILLDDSGSELAFKDFDVGDGFIPVCSLGVAQVGRMNFGKDVSTLKYFTICGLQEGYEPFAVNTNRDITMWLSKRLPQFLQVPSNHEHIEVTRIDGTIDSSPCLKVTQKSFGSQNSNTDIMFYRLSMPIECAEVFSKTVAGGLPGAGLFGPKNDLEDYDADSDFEVLMKTAHGHLVPDRVDKDKEATKPEFNNHKDYAQEKPSRLKQRFLLRRTKPDYSTSHSARLTEDVLADDRDDYDFLMQTSTYYYSVRIFPGQEPANVWVGWITSDFHQYDTGFDLDRVRTVTVTLGDEKGKVHESIKRSNCYMVCAGESMSPGQGRNNNGLEIGCVVDAASGLLTFIANGKELSTYYQVEPSTKLFPAVFAQATSPNVFQFELGRIKNVMPLSAGLFKSEHKNPVPQCPPRLHVQFLSHVLWSRMPNQFLKVDVSRISERQGWLVQCLDPLQFMSLHIPEENRSVDILELTEQEELLKFHYHTLRLYSAVCALGNHRVAHALCSHVDEPQLLYAIENKYMPGLLRAGYYDLLIDIHLSSYATARLMMNNEYIVPMTEETKSITLFPDENKKHGLPGIGLSTSLRPRMQFSSPSFVSISNECYQYSPEFPLDILKSKTIQMLTEAVKEGSLHARDPVGGTTEFLFVPLIKLFYTLLIMGIFHNEDLKHILQLIEPSVFKEAATPEEESDTLEKELSVDDAKLQGAGEEEAKGGKRPKEGLLQMKLPEPVKLQMCLLLQYLCDCQVRHRIEAIVAFSDDFVAKLQDNQRFRYNEVMQALNMSAALTARKTKEFRSPPQEQINMLLNFKDDKSECPCPEEIRDQLLDFHEDLMTHCGIELDEDGSLDGNSDLTIRGRLLSLVEKVTYLKKKQAEKPVESDSKKSSTLQQLISETMVRWAQESVIEDPELVRAMFVLLHRQYDGIGGLVRALPKTYTINGVSVEDTINLLASLGQIRSLLSVRMGKEEEKLMIRGLGDIMNNKVFYQHPNLMRALGMHETVMEVMVNVLGGGESKEITFPKMVANCCRFLCYFCRISRQNQKAMFDHLSYLLENSSVGLASPAMRGSTPLDVAAASVMDNNELALALREPDLEKVVRYLAGCGLQSCQMLVSKGYPDIGWNPVEGERYLDFLRFAVFCNGESVEENANVVVRLLIRRPECFGPALRGEGGNGLLAAMEEAIKIAEDPSRDGPSPNSGSSKTLDTEEEEDDTIHMGNAIMTFYSALIDLLGRCAPEMHLIHAGKGEAIRIRSILRSLIPLGDLVGVISIAFQMPTIAKDGNVVEPDMSAGFCPDHKAAMVLFLDRVYGIEVQDFLLHLLEVGFLPDLRAAASLDTAALSATDMALALNRYLCTAVLPLLTRCAPLFAGTEHHASLIDSLLHTVYRLSKGCSLTKAQRDSIEVCLLSICGQLRPSMMQHLLRRLVFDVPLLNEHAKMPLKLLTNHYERCWKYYCLPGGWGNFGAASEEELHLSRKLFWGIFDALSQKKYEQELFKLALPCLSAVAGALPPDYMESNYVSMMEKQSSMDSEGNFNPQPVDTSNITIPEKLEYFINKYAEHSHDKWSMDKLANGWIYGEIYSDSSKVQPLMKPYKLLSEKEKEIYRWPIKESLKTMLAWGWRIERTREGDSMALYNRTRRISQTSQVSVDAAHGYSPRAIDMSNVTLSRDLHAMAEMMAENYHNIWAKKKKMELESKGGGNHPLLVPYDTLTAKEKAKDREKAQDILKFLQINGYAVSRGFKDLELDTPSIEKRFAYSFLQQLIRYVDEAHQYILEFDGGSRGKGEHFPYEQEIKFFAKVVLPLIDQYFKNHRLYFLSAASRPLCSGGHASNKEKEMVTSLFCKLGVLVRHRISLFGNDATSIVNCLHILGQTLDARTVMKTGLESVKSALRAFLDNAAEDLEKTMENLKQGQFTHTRNQPKGVTQIINYTTVALLPMLSSLFEHIGQHQFGEDLILEDVQVSCYRILTSLYALGTSKSIYVERQRSALGECLAAFAGAFPVAFLETHLDKHNIYSIYNTKSSRERAALSLPTNVEDVCPNIPSLEKLMEEIVELAESGIRYTQMPHVMEVILPMLCSYMSRWWEHGPENNPERAEMCCTALNSEHMNTLLGNILKIIYNNLGIDEGAWMKRLAVFSQPIINKVKPQLLKTHFLPLMEKLKKKAATVVSEEDHLKAEARGDMSEAELLILDEFTTLARDLYAFYPLLIRFVDYNRAKWLKEPNPEAEELFRMVAEVFIYWSKSHNFKREEQNFVVQNEINNMSFLITDTKSKMSKAAVSDQERKKMKRKGDRYSMQTSLIVAALKRLLPIGLNICAPGDQELIALAKNRFSLKDTEDEVRDIIRSNIHLQGKLEDPAIRWQMALYKDLPNRTDDTSDPEKTVERVLDIANVLFHLEQKSKRVGRRHYCLVEHPQRSKKAVWHKLLSKQRKRAVVACFRMAPLYNLPRHRAVNLFLQGYEKSWIETEEHYFEDKLIEDLAKPGAEPPEEDEGTKRVDPLHQLILLFSRTALTEKCKLEEDFLYMAYADIMAKSCHDEEDDDGEEEVKSFEEKEMEKQKLLYQQARLHDRGAAEMVLQTISASKGETGPMVAATLKLGIAILNGGNSTVQQKMLDYLKEKKDVGFFQSLAGLMQSCSVLDLNAFERQNKAEGLGMVTEEGSGEKVLQDDEFTCDLFRFLQLLCEGHNSDFQNYLRTQTGNNTTVNIIISTVDYLLRVQESISDFYWYYSGKDVIDEQGQRNFSKAIQVAKQVFNTLTEYIQGPCTGNQQSLAHSRLWDAVVGFLHVFAHMQMKLSQDSSQIELLKELMDLQKDMVVMLLSMLEGNVVNGTIGKQMVDMLVESSNNVEMILKFFDMFLKLKDLTSSDTFKEYDPDGKGVISKRDFHKAMESHKHYTQSETEFLLSCAETDENETLDYEEFVKRFHEPAKDIGFNVAVLLTNLSEHMPNDTRLQTFLELAESVLNYFQPFLGRIEIMGSAKRIERVYFEISESSRTQWEKPQVKESKRQFIFDVVNEGGEKEKMELFVNFCEDTIFEMQLAAQISESDLNERSANKEESEKERPEEQGPRMAFFSILTVRSALFALRYNILTLMRMLSLKSLKKQMKKVKKMTVKDMVTAFFSSYWSIFMTLLHFVASVFRGFFRIICSLLLGGSLVEGAKKIKVAELLANMPDPTQDEVRGDGEEGERKPLEAALPSEDLTDLKELTEESDLLSDIFGLDLKREGGQYKLIPHNPNAGLSDLMSNPVPMPEVQEKFQEQKAKEEEKEEKEETKSEPEKAEGEDGEKEEKAKEDKGKQKLRQLHTHRYGEPEVPESAFWKKIIAYQQKLLNYFARNFYNMRMLALFVAFAINFILLFYKVSTSSVVEGKELPTRSSSENAKVTSLDSSSHRIIAVHYVLEESSGYMEPTLRILAILHTVISFFCIIGYYCLKVPLVIFKREKEVARKLEFDGLYITEQPSEDDIKGQWDRLVINTQSFPNNYWDKFVKRKVMDKYGEFYGRDRISELLGMDKAALDFSDAREKKKPKKDSSLSAVLNSIDVKYQMWKLGVVFTDNSFLYLAWYMTMSVLGHYNNFFFAAHLLDIAMGFKTLRTILSSVTHNGKQLVLTVGLLAVVVYLYTVVAFNFFRKFYNKSEDGDTPDMKCDDMLTCYMFHMYVGVRAGGGIGDEIEDPAGDEYEIYRIIFDITFFFFVIVILLAIIQGLIIDAFGELRDQQEQVKEDMETKCFICGIGNDYFDTVPHGFETHTLQEHNLANYLFFLMYLINKDETEHTGQESYVWKMYQERCWEFFPAGDCFRKQYEDQLN

SEQ ID NO: 62515 - protein, 328 aa, Homo sapiens
MEPTLRILAILHTVISFFCIIGYYCLKVPLVIFKREKEVARKLEFDGLYITEQPSEDDIKGQWDRLVINTQSFPNNYWDKFVKRKVMDKYGEFYGRDRISELLGMDKAALDFSDAREKKKPKKDSSLSAVLNSIDVKYQMWKLGVVFTDNSFLYLAWYMTMSVLGHYNNFFFAAHLLDIAMGFKTLRTILSSVTHNGKQLVLTVGLLAVVVYLYTVVAFNFFRKFYNKSEDGDTPDMKCDDMLTCYMFHMYVGVRAGGGIGDEIEDPAGDEYEIYRIIFDITFFFFVIVILLAIIQGLIIDAFGELRDQQEQVKEDMEVFSDVSYKQR

SEQ ID NO: 62516 - protein, 214 aa, Homo sapiens
SLFCKLGVLVRHRISLFGNDATSIVNCLHILGQTLDARTVMKTGLESVKSALRAFLDNAAEDLEKTMENLKQGQFTHTRNQPKGVTQIINYTTVALLPMLSSLFEHIGQHQFGEDLILEDVQVSCYRILTSLYALGTSKSIYVERQRSALGECLAAFAGAFPVAFLETHLDKHNIYSIYNTKSSRERAALSLPTNVEDVCPNIPSLEKLMEEIV

SEQ ID NO: 62517 - protein, 1421 aa, Homo sapiens
MKTGLESVKSALRAFLDNAAEDLEKTMENLKQGQFTHTRNQPKGVTQIINYTTVALLPMLSSLFEHIGQHQFGEDLILEDVQVSCYRILTSLYALGTSKSIYVERQRSALGECLAAFAGAFPVAFLETHLDKHNIYSIYNTKSSRERAALSLPTNVEDVCPNIPSLEKLMEEIVELAESGIRYTQMPHVMEVILPMLCSYMSRWWEHGPENNPERAEMCCTALNSEHMNTLLGNILKIIYNNLGIDEGAWMKRLAVFSQPIINKVKPQLLKTHFLPLMEKLKKKAATVVSEEDHLKAEARGDMSEAELLILDEFTTLARDLYAFYPLLIRFVDYNRAKWLKEPNPEAEELFRMVAEVFIYWSKSHNFKREEQNFVVQNEINNMSFLITDTKSKMSKAAVSDQERKKMKRKGDRYSMQTSLIVAALKRLLPIGLNICAPGDQELIALAKNRFSLKDTEDEVRDIIRSNIHLQGKLEDPAIRWQMALYKDLPNRTDDTSDPEKTVERVLDIANVLFHLEQKSKRVGRRHYCLVEHPQRSKKAVWHKLLSKQRKRAVVACFRMAPLYNLPRHRAVNLFLQGYEKSWIETEEHYFEDKLIEDLAKPGAEPPEEDEGTKRVDPLHQLILLFSRTALTEKCKLEEDFLYMAYADIMAKSCHDEEDDDGEEEVKSFEHDIIKDLRNKFASLGENSLEKEMEKQKLLYQQARLHDRGAAEMVLQTISASKGETGPMVAATLKLGIAILNGGNSTVQQKMLDYLKEKKDVGFFQSLAGLMQSCSVLDLNAFERQNKAEGLGMVTEEGSGEKVLQDDEFTCDLFRFLQLLCEGHNSDFQNYLRTQTGNNTTVNIIISTVDYLLRVQESISDFYWYYSGKDVIDEQGQRNFSKAIQVAKQVFNTLTEYIQGPCTGNQQSLAHSRLWDAVVGFLHVFAHMQMKLSQDSSQIELLKELMDLQKDMVVMLLSMLEGNVVNGTIGKQMVDMLVESSNNVEMILKFFDMFLKLKDLTSSDTFKEYDPDGKGVISKRDFHKAMESHKHYTQSETEFLLSCAETDENETLDYEEFVKRFHEPAKDIGFNVAVLLTNLSEHMPNDTRLQTFLELAESVLNYFQPFLGRIEIMGSAKRIERVYFEISESSRTQWEKPQVKESKRQFIFDVVNEGGEKEKMELFVNFCEDTIFEMQLAAQISESDLNERSANKEESEKERPEEQGPRMAFFSILTVRSALFALRYNILTLMRMLSLKSLKKQMKKVKKMTVKDMVTAFFSSYWSIFMTLLHFVASVFRGFFRIICSLLLGGSLVEGAKKIKVAELLANMPDPTQDEVRGDGEEGERKPLEAALPSEDLTDLKELTEESDLLSDIFGLDLKREGGQYKLIPHNPNAGLSDLMSNPVPMPEVQEKFQEQKAKEEEKEEKEETKSEPEKAEGEDG

SEQ ID NO: 62518 - protein, 4951 aa, Homo sapiens
DDEVVLQCTATIHKEQQKLCLAAEGFGNRLCFLESTSNSKNVPPDLSICTFVLEQSLSVRALQEMLANTVEKSEGQVDVEKWKFMMKTAQGGGHRTLLYGHAILLRHSYSGMYLCCLSTSRSSTDKLAFDVGLQEDTTGEACWWTIHPASKQRSEGEKVRVGDDLILVSVSSERYLHLSYGNGSLHVDAAFQQTLWSVAPISSGSEAAQGYLIGGDVLRLLHGHMDECLTVPSGEHGEEQRRTVHYEGGAVSVHARSLWRLETLRVAWSGSHIRWGQPFRLRHVTTGKYLSLMEDKNLLLMDKEKADVKSTAFTFRSSKEKLDVGVRKEVDGMGTSEIKYGDSVCYIQHVDTGLWLTYQSVDVKSVRMGSIQRKAIMHHEGHMDDGISLSRSQHEESRTARVIRSTVFLFNRFIRGLDALSKKAKASTVDLPIESVSLSLQDLIGYFHPPDEHLEHEDKQNRLRALKNRQNLFQEEGMINLVLECIDRLHVYSSAAHFADVAGREAGESWKSILNSLYELLAALIRGNRKNCAQFSGSLDWLISRLERLEASSGILEVLHCVLVESPEALNIIKEGHIKSIISLLDKHGRNHKVLDVLCSLCVCHGVAVRSNQHLICDNLLPGRDLLLQTRLVNHVSSMRPNIFLGVSEGSAQYKKWYYELMVDHTEPFVTAEATHLRVGWASTEGYSPYPGGGEEWGGNGVGDDLFSYGFDGLHLWSGCIARTVSSPNQHLLRTDDVISCCLDLSAPSISFRINGQPVQGMFENFNIDGLFFPVVSFSAGIKVRFLLGGRHGEFKFLPPPGYAPCYEAVLPKEKLKVEHSREYKQERTYTRDLLGPTVSLTQAAFTPIPVDTSQIVLPPHLERIREKLAENIHELWVMNKIELGWQYGPVRDDNKRQHPCLVEFSKLPEQERNYNLQMSLETLKTLLALGCHVGISDEHAEDKVKKMKLPKNYQLTSGYKPAPMDLSFIKLTPSQEAMVDKLAENAHNVWARDRIRQGWTYGIQQDVKNRRNPRLVPYTLLDDRTKKSNKDSLREAVRTLLGYGYNLEAPDQDHAARAEVCSGTGERFRIFRAEKTYAVKAGRWYFEFETVTAGDMRVGWSRPGCQPDQELGSDERAFAFDGFKAQRWHQGNEHYGRSWQAGDVVGCMVDMNEHTMMFTLNGEILLDDSGSELAFKDFDVGDGFIPVCSLGVAQVGRMNFGKDVSTLKYFTICGLQEGYEPFAVNTNRDITMWLSKRLPQFLQVPSNHEHIEVTRIDGTIDSSPCLKVTQKSFGSQNSNTDIMFYRLSMPIECAEVFSKTVAGGLPGAGLFGPKNDLEDYDADSDFEVLMKTAHGHLVPDRVDKDKEATKPEFNNHKDYAQEKPSRLKQRFLLRRTKPDYSTSHSARLTEDVLADDRDDYDFLMQTSTYYYSVRIFPGQEPANVWVGWITSDFHQYDTGFDLDRVRTVTVTLGDEKGKVHESIKRSNCYMVCAGESMSPGQGRNNNGLEIGCVVDAASGLLTFIANGKELSTYYQVEPSTKLFPAVFAQATSPNVFQFELGRIKNVMPLSAGLFKSEHKNPVPQCPPRLHVQFLSHVLWSRMPNQFLKVDVSRISERQGWLVQCLDPLQFMSLHIPEENRSVDILELTEQEELLKFHYHTLRLYSAVCALGNHRVAHALCSHVDEPQLLYAIENKYMPGLLRAGYYDLLIDIHLSSYATARLMMNNEYIVPMTEETKSITLFPDENKKHGLPGIGLSTSLRPRMQFSSPSFVSISNECYQYSPEFPLDILKSKTIQMLTEAVKEGSLHARDPVGGTTEFLFVPLIKLFYTLLIMGIFHNEDLKHILQLIEPSVFKEAATPEEESDTLEKELSVDDAKLQGAGEEEAKGGKRPKEGLLQMKLPEPVKLQMCLLLQYLCDCQVRHRIEAIVAFSDDFVAKLQDNQRFRYNEVMQALNMSAALTARKTKEFRSPPQEQINMLLNFKDDKSECPCPEEIRDQLLDFHEDLMTHCGIELDEDGSLDGNSDLTIRGRLLSLVEKVTYLKKKQAEKPVESDSKKSSTLQQLISETMVRWAQESVIEDPELVRAMFVLLHRQYDGIGGLVRALPKTYTINGVSVEDTINLLASLGQIRSLLSVRMGKEEEKLMIRGLGDIMNNKVFYQHPNLMRALGMHETVMEVMVNVLGGGESKEITFPKMVANCCRFLCYFCRISRQNQKAMFDHLSYLLENSSVGLASPAMRGSTPLDVAAASVMDNNELALALREPDLEKVVRYLAGCGLQSCQMLVSKGYPDIGWNPVEGERYLDFLRFAVFCNGESVEENANVVVRLLIRRPECFGPALRGEGGNGLLAAMEEAIKIAEDPSRDGPSPNSGSSKTLDTEEEEDDTIHMGNAIMTFYSALIDLLGRCAPEMHLIHAGKGEAIRIRSILRSLIPLGDLVGVISIAFQMPTIAKDGNVVEPDMSAGFCPDHKAAMVLFLDRVYGIEVQDFLLHLLEVGFLPDLRAAASLDTAALSATDMALALNRYLCTAVLPLLTRCAPLFAGTEHHASLIDSLLHTVYRLSKGCSLTKAQRDSIEVCLLSICGQLRPSMMQHLLRRLVFDVPLLNEHAKMPLKLLTNHYERCWKYYCLPGGWGNFGAASEEELHLSRKLFWGIFDALSQKKYEQELFKLALPCLSAVAGALPPDYMESNYVSMMEKQSSMDSEGNFNPQPVDTSNITIPEKLEYFINKYAEHSHDKWSMDKLANGWIYGEIYSDSSKVQPLMKPYKLLSEKEKEIYRWPIKESLKTMLAWGWRIERTREGDSMALYNRTRRISQTSQVSVDAAHGYSPRAIDMSNVTLSRDLHAMAEMMAENYHNIWAKKKKMELESKGGGNHPLLVPYDTLTAKEKAKDREKAQDILKFLQINGYAVSRGFKDLELDTPSIEKRFAYSFLQQLIRYVDEAHQYILEFDGGSRGKGEHFPYEQEIKFFAKVVLPLIDQYFKNHRLYFLSAASRPLCSGGHASNKEKEMVTSLFCKLGVLVRHRISLFGNDATSIVNCLHILGQTLDARTVMKTGLESVKSALRAFLDNAAEDLEKTMENLKQGQFTHTRNQPKGVTQIINYTTVALLPMLSSLFEHIGQHQFGEDLILEDVQVSCYRILTSLYALGTSKSIYVERQRSALGECLAAFAGAFPVAFLETHLDKHNIYSIYNTKSSRERAALSLPTNVEDVCPNIPSLEKLMEEIVELAESGIRYTQMPHVMEVILPMLCSYMSRWWEHGPENNPERAEMCCTALNSEHMNTLLGNILKIIYNNLGIDEGAWMKRLAVFSQPIINKVKPQLLKTHFLPLMEKLKKKAATVVSEEDHLKAEARGDMSEAELLILDEFTTLARDLYAFYPLLIRFVDYNRAKWLKEPNPEAEELFRMVAEVFIYWSKSHNFKREEQNFVVQNEINNMSFLITDTKSKMSKAAVSDQERKKMKRKGDRYSMQTSLIVAALKRLLPIGLNICAPGDQELIALAKNRFSLKDTEDEVRDIIRSNIHLQGKLEDPAIRWQMALYKDLPNRTDDTSDPEKTVERVLDIANVLFHLEQKSKRVGRRHYCLVEHPQRSKKAVWHKLLSKQRKRAVVACFRMAPLYNLPRHRAVNLFLQGYEKSWIETEEHYFEDKLIEDLAKPGAEPPEEDEGTKRVDPLHQLILLFSRTALTEKCKLEEDFLYMAYADIMAKSCHDEEDDDGEEEVKSFEEKEMEKQKLLYQQARLHDRGAAEMVLQTISASKGETGPMVAATLKLGIAILNGGNSTVQQKMLDYLKEKKDVGFFQSLAGLMQSCSVLDLNAFERQNKAEGLGMVTEEGSGEKVLQDDEFTCDLFRFLQLLCEGHNSDFQNYLRTQTGNNTTVNIIISTVDYLLRVQESISDFYWYYSGKDVIDEQGQRNFSKAIQVAKQVFNTLTEYIQGPCTGNQQSLAHSRLWDAVVGFLHVFAHMQMKLSQDSSQIELLKELMDLQKDMVVMLLSMLEGNVVNGTIGKQMVDMLVESSNNVEMILKFFDMFLKLKDLTSSDTFKEYDPDGKGVISKRDFHKAMESHKHYTQSETEFLLSCAETDENETLDYEEFVKRFHEPAKDIGFNVAVLLTNLSEHMPNDTRLQTFLELAESVLNYFQPFLGRIEIMGSAKRIERVYFEISESSRTQWEKPQVKESKRQFIFDVVNEGGEKEKMELFVNFCEDTIFEMQLAAQISESDLNERSANKEESEKERPEEQGPRMAFFSILTVRSALFALRYNILTLMRMLSLKSLKKQMKKVKKMTVKDMVTAFFSSYWSIFMTLLHFVASVFRGFFRIICSLLLGGSLVEGAKKIKVAELLANMPDPTQDEVRGDGEEGERKPLEAALPSEDLTDLKELTEESDLLSDIFGLDLKREGGQYKLIPHNPNAGLSDLMSNPVPMPEVQEKFQEQKAKEEEKEEKEETKSEPEKAEGEDGEKEEKAKEDKGKQKLRQLHTHRYGEPEVPESAFWKKIIAYQQKLLNYFARNFYNMRMLALFVAFAINFILLFYKVSTSSVVEGKELPTRSSSENAKVTSLDSSSHRIIAVHYVLEESSGYMEPTLRILAILHTVISFFCIIGYYCLKVPLVIFKREKEVARKLEFDGLYITEQPSEDDIKGQWDRLVINTQSFPNNYWDKFVKRKVMDKYGEFYGRDRISELLGMDKAALDFSDAREKKKPKKDSSLSAVLNSIDVKYQMWKLGVVFTDNSFLYLAWYMTMSVLGHYNNFFFAAHLLDIAMGFKTLRTILSSVTHNGKQLVLTVGLLAVVVYLYTVVAFNFFRKFYNKSEDGDTPDMKCDDMLTCYMFHMYVGVRAGGGIGDEIEDPAGDEYEIYRIIFDITFFFFVIVILLAIIQGLIIDAFGELRDQQEQVKEDMETKCFICGIGNDYFDTVPHGFETHTLQEHNLANYLFFLMYLINKDETEHTGQESYVWKMYQERCWEFFPAGDCFRKQYEDQLN

SEQ ID NO: 62519 - protein, 4866 aa, Homo sapiens
MAELGGGGEEDARWYRKEDEVVLQCIATIHKEQRKFCLAAEGLGNRLCFLEPTSEAKYIPPDLCVCNFVLEQSLSVRALQEMLANTGENGGEGAAQGGGHRTLLYGHAVLLRHSFSGMYLTCLTTSRSQTDKLAFDVGLREHATGEACWWTIHPASKQRSEGEKVRIGDDLILVSVSSERYLHLSVSNGNIQVDASFMQTLWNVHPTCSGSSIEEGYLLGGHVVRLFHGHDECLTIPSTDQNDSQHRRIFYEAGGAGTRARSLWRVEPLRISWSGSNIRWGQAFRLRHLTTGHYLALTEDQGLILQDRAKSDTKSTAFSFRASKELKEKLDSSHKRDIEGMGVPEIKYGDSVCFVQHIASGLWVTYKAQDAKTSRLGPLKRKVILHQEGHMDDGLTLQRCQREESQAARIIRNTTALFSQFVSGNNRTAAPITLPIEEVLQTLQDLIAYFQPPEEEMRHEDKQNKLRSLKNRQNLFKEEGMLALVLNCIDRLNVYNSVAHFAGIAREESGMAWKEILNLLYKLLAALIRGNRNNCAQFSNNLDWLISKLDRLESSSGILEVLHCILTESPEALNLIAEGHIKSIISLLDKHGRNHKVLDILCSLCLCNGVAVRANQNLICDNLLPRRNLLLQTRLINDVTSIRPNIFLGVAEGSAQYKKWYFELIIDQVDPFLTAEPTHLRVGWASSSGYAPYPGGGEGWGGNGVGDDLYSYGFDGLHLWSGRIPRAVASINQHLLRSDDVVSCCLDLGVPSISFRINGQPVQGMFENFNTDGLFFPVMSFSAGVKVRFLMGGRHGEFKFLPPSGYAPCYEALLPKEKMRLEPVKEYKRDADGIRDLLGTTQFLSQASFIPCPVDTSQVILPPHLEKIRDRLAENIHELWGMNKIELGWTFGKIRDDNKRQHPCLVEFSKLPETEKNYNLQMSTETLKTLLALGCHIAHVNPAAEEDLKKVKLPKNYMMSNGYKPAPLDLSDVKLLPPQEILVDKLAENAHNVWAKDRIKQGWTYGIQQDLKNKRNPRLVPYALLDERTKKSNRDSLREAVRTFVGYGYNIEPSDQELADSAVEKVSIDKIRFFRVERSYAVRSGKWYFEFEVVTGGDMRVGWARPGCRPDVELGADDQAFVFEGNRGQRWHQGSGYFGRTWQPGDVVGCMINLDDASMIFTLNGELLITNKGSELAFADYEIENGFVPICCLGLSQIGRMNLGTDASTFKFYTMCGLQEGFEPFAVNMNRDVAMWFSKRLPTFVNVPKDHPHIEVMRIDGTMDSPPCLKVTHKTFGTQNSNADMIYCRLSMPVECHSSFSHSPCLDSEAFQKRKQMQEILSHTTTQCYYAIRIFAGQDPSCVWVGWVTPDYHLYSEKFDLNKNCTVTVTLGDERGRVHESVKRSNCYMVWGGDIVASSQRSNRSNVDLEIGCLVDLAMGMLSFSANGKELGTCYQVEPNTKVFPAVFLQPTSTSLFQFELGKLKNAMPLSAAIFRSEEKNPVPQCPPRLDVQTIQPVLWSRMPNSFLKVETERVSERHGWVVQCLEPLQMMALHIPEENRCVDILELCEQEDLMRFHYHTLRLYSAVCALGNSRVAYALCSHVDLSQLFYAIDNKYLPGLLRSGFYDLLISIHLASAKERKLMMKNEYIIPITSTTRNIRLFPDESKRHGLPGVGLRTCLKPGFRFSTPCFVVTGEDHQKQSPEIPLESLRTKALSMLTEAVQCSGAHIRDPVGGSVEFQFVPVLKLIGTLLVMGVFDDDDVRQILLLIDPSVFGEHSAGTEEGAEKEEVTQVEEKAVEAGEKAGKEAPVKGLLQTRLPESVKLQMCELLSYLCDCELQHRVEAIVAFGDIYVSKLQANQKFRYNELMQALNMSAALTARKTKEFRSPPQEQINMLLNFQLGENCPCPEEIREELYDFHEDLLLHCGVPLEEEEEEEEDTSWTGKLCALVYKIKGPPKPEKEQPTEEEERCPTTLKELISQTMICWAQEDQIQDSELVRMMFNLLRRQYDSIGELLQALRKTYTISHTSVSDTINLLAALGQIRSLLSVRMGKEEELLMINGLGDIMNNKVFYQHPNLMRVLGMHETVMEVMVNVLGTEKSQIAFPKMVASCCRFLCYFCRISRQNQKAMFEHLSYLLENSSVGLASPSMRGSTPLDVAASSVMDNNELALSLEEPDLEKVVTYLAGCGLQSCPMLLAKGYPDVGWNPIEGERYLSFLRFAVFVNSESVEENASVVVKLLIRRPECFGPALRGEGGNGLLAAMQGAIKISENPALDLPSQGYKREVSTGDDEEEEEIVHMGNAIMSFYSALIDLLGRCAPEMHLIQTGKGEAIRIRSILRSLVPTEDLVGIISIPLKLPSLNKDGSVSEPDMAANFCPDHKAPMVLFLDRVYGIKDQTFLLHLLEVGFLPDLRASASLDTVSLSTTEAALALNRYICSAVLPLLTRCAPLFAGTEHCTSLIDSTLQTIYRLSKGRSLTKAQRDTIEECLLAICNHLRPSMLQQLLRRLVFDVPQLNEYCKMPLKLLTNHYEQCWKYYCLPSGWGSYGLAVEEELHLTEKLFWGIFDSLSHKKYDPDLFRMALPCLSAIAGALPPDYLDTRITATLEKQISVDADGNFDPKPINTMNFSLPEKLEYIVTKYAEHSHDKWACDKSQSGWKYGISLDENVKTHPLIRPFKTLTEKEKEIYRWPARESLKTMLAVGWTVERTKEGEALVQQRENEKLRSVSQANQGNSYSPAPLDLSNVVLSRELQGMVEVVAENYHNIWAKKKKLELESKGGGSHPLLVPYDTLTAKEKFKDREKAQDLFKFLQVNGIIVSRGMKDMELDASSMEKRFAYKFLKKILKYVDSAQEFIAHLEAIVSSGKTEKSPRDQEIKFFAKVLLPLVDQYFTSHCLYFLSSPLKPLSSSGYASHKEKEMVAGLFCKLAALVRHRISLFGSDSTTMVSCLHILAQTLDTRTVMKSGSELVKAGLRAFFENAAEDLEKTSENLKLGKFTHSRTQIKGVSQNINYTTVALLPILTSIFEHVTQHQFGMDLLLGDVQISCYHILCSLYSLGTGKNIYVERQRPALGECLASLAAAIPVAFLEPTLNRYNPLSVFNTKTPRERSILGMPDTVEDMCPDIPQLEGLMKEINDLAESGARYTEMPHVIEVILPMLCNYLSYWWERGPENLPPSTGPCCTKVTSEHLSLILGNILKIINNNLGIDEASWMKRIAVYAQPIISKARPDLLRSHFIPTLEKLKKKAVKTVQEEEQLKADGKGDTQEAELLILDEFAVLCRDLYAFYPMLIRYVDNNRSNWLKSPDADSDQLFRMVAEVFILWCKSHNFKREEQNFVIQNEINNLAFLTGDSKSKMSKSGGQDQERKKTKRRGDLYSIQTSLIVAALKKMLPIGLNMCTPGDQELISLAKSRYSHRDTDEEVREHLRNNLHLQEKSDDPAVKWQLNLYKDVLKSEEPFNPEKTVERVQRISAAVFHLEQVEQPLRSKKAVWHKLLSKQRKRAVVACFRMAPLYNLPRHRSINLFLHGYQRFWIETEEYSFEEKLVQDLAKSPKVEEEEEEETEKQPDPLHQIILYFSRNALTERSKLEDDPLYTSYSSMMAKSCQSGEDEEEDEDKEKTFEEKEMEKQKTLYQQARLHERGAAEMVLQMISASKGEMSPMVVETLKLGIAILNGGNAGVQQKMLDYLKEKKDAGFFQSLSGLMQSCRSVLDLNAFERQNKAEGLGMVTEEGTLIVRERGEKVLQNDEFTRDLFRFLQLLCEGHNSDFQNFLRTQMGNTTTVNVIISTVDYLLRLQESISDFYWYYSGKDIIDESGQHNFSKALAVTKQIFNSLTEYIQGPCIGNQQSLAHSRLWDAVVGFLHVFANMQMKLSQDSSQIELLKELLDLLQDMVVMLLSLLEGNVVNGTIGKQMVDTLVESSTNVEMILKFFDMFLKLKDLTSSDTFKEYDPDGKGIISKKEFQKAMEGQKQYTQSEIDFLLSCAEADENDMFNYVDFVDRFHEPAKDIGFNVAVLLTNLSEHMPNDSRLKCLLDPAESVLNYFEPYLGRIEIMGGAKKIERVYFEISESSRTQWEKPQVKESKRQFIFDVVNEGGEQEKMELFVNFCEDTIFEMQLASQISESDSADRPEEEEEDEDSSYVLEIAGEEEEDGSLEPASAFAMACASVKRNVTDFLKRATLKNLRKQYRNVKKMTAKELVKVLFSFFWMLFVGLFQLLFTILGGIFQILWSTVFGGGLVEGAKNIRVTKILGDMPDPTQFGIHDDTMEAERAEVMEPGITTELVHFIKGEKGDTDIMSDLFGLHPKKEGSLKHGPEVGLGDLSEIIGKDEPPTLESTVQKKRKAQAAEMKAANEAEGKVESEKADMEDGEKEDKDKEEEQAEYLWTEVTKKKKRRCGQKVEKPEAFTANFFKGLEIYQTKLLHYLARNFYNLRFLALFVAFAINFILLFYKVTEEPLEEETEDVANLWNSFNDEEEEEAMVFFVLQESTGYMAPTLRALAIIHTIISLVCVVGYYCLKVPLVVFKREKEIARKLEFDGLYITEQPSEDDIKGQWDRLVINTPSFPNNYWDKFVKRKVINKYGDLYGAERIAELLGLDKNALDFSPVEETKAEAASLVSWLSSIDMKYHIWKLGVVFTDNSFLYLAWYTTMSVLGHYNNFFFAAHLLDIAMGFKTLRTILSSVTHNGKQLVLTVGLLAVVVYLYTVVAFNFFRKFYNKSEDDDEPDMKCDDMMTCYLFHMYVGVRAGGGIGDEIEDPAGDPYEMYRIVFDITFFFFVIVILLAIIQGLIIDAFGELRDQQEQVREDMETKCFICGIGNDYFDTTPHGFETHTLQEHNLANYLFFLMYLINKDETEHTGQESYVWKMYQERCWDFFPAGDCFRKQYEDQLG

SEQ ID NO: 62520 - protein, 4870 aa, Homo sapiens
MAEGGEGGEDEIQFLRTEDEVVLQCIATIHKEQRKFCLAAEGLGNRLCFLEPTSEAKYIPPDLCVCNFVLEQSLSVRALQEMLANTGENGGEGAAQGGGHRTLLYGHAVLLRHSFSGMYLTCLTTSRSQTDKLAFDVGLREHATGEACWWTIHPASKQRSEGEKVRIGDDLILVSVSSERYLHLSVSNGNIQVDASFMQTLWNVHPTCSGSSIEEGYLLGGHVVRLFHGHDECLTIPSTDQNDSQHRRIFYEAGGAGTRARSLWRVEPLRISWSGSNIRWGQAFRLRHLTTGHYLALTEDQGLILQDRAKSDTKSTAFSFRASKELKEKLDSSHKRDIEGMGVPEIKYGDSVCFVQHIASGLWVTYKAQDAKTSRLGPLKRKVILHQEGHMDDGLTLQRCQREESQAARIIRNTTALFSQFVSGNNRTAAPITLPIEEVLQTLQDLIAYFQPPEEEMRHEDKQNKLRSLKNRQNLFKEEGMLALVLNCIDRLNVYNSVAHFAGIAREESGMAWKEILNLLYKLLAALIRGNRNNCAQFSNNLDWLISKLDRLESSSGILEVLHCILTESPEALNLIAEGHIKSIISLLDKHGRNHKVLDILCSLCLCNGVAVRANQNLICDNLLPRRNLLLQTRLINDVTSIRPNIFLGVAEGSAQYKKWYFELIIDQVDPFLTAEPTHLRVGWASSSGYAPYPGGGEGWGGNGVGDDLYSYGFDGLHLWSGRIPRAVASINQHLLRSDDVVSCCLDLGVPSISFRINGQPVQGMFENFNTDGLFFPVMSFSAGVKVRFLMGGRHGEFKFLPPSGYAPCYEALLPKEKMRLEPVKEYKRDADGIRDLLGTTQFLSQASFIPCPVDTSQVILPPHLEKIRDRLAENIHELWGMNKIELGWTFGKIRDDNKRQHPCLVEFSKLPETEKNYNLQMSTETLKTLLALGCHIAHVNPAAEEDLKKVKLPKNYMMSNGYKPAPLDLSDVKLLPPQEILVDKLAENAHNVWAKDRIKQGWTYGIQQDLKNKRNPRLVPYALLDERTKKSNRDSLREAVRTFVGYGYNIEPSDQELADSAVEKVSIDKIRFFRVERSYAVRSGKWYFEFEVVTGGDMRVGWARPGCRPDVELGADDQAFVFEGNRGQRWHQGSGYFGRTWQPGDVVGCMINLDDASMIFTLNGELLITNKGSELAFADYEIENGFVPICCLGLSQIGRMNLGTDASTFKFYTMCGLQEGFEPFAVNMNRDVAMWFSKRLPTFVNVPKDHPHIEVMRIDGTMDSPPCLKVTHKTFGTQNSNADMIYCRLSMPVECHSSFSHSPCLDSEAFQKRKQMQEILSHTTTQCYYAIRIFAGQDPSCVWVGWVTPDYHLYSEKFDLNKNCTVTVTLGDERGRVHESVKRSNCYMVWGGDIVASSQRSNRSNVDLEIGCLVDLAMGMLSFSANGKELGTCYQVEPNTKVFPAVFLQPTSTSLFQFELGKLKNAMPLSAAIFRSEEKNPVPQCPPRLDVQTIQPVLWSRMPNSFLKVETERVSERHGWVVQCLEPLQMMALHIPEENRCVDILELCEQEDLMRFHYHTLRLYSAVCALGNSRVAYALCSHVDLSQLFYAIDNKYLPGLLRSGFYDLLISIHLASAKERKLMMKNEYIIPITSTTRNIRLFPDESKRHGLPGVGLRTCLKPGFRFSTPCFVVTGEDHQKQSPEIPLESLRTKALSMLTEAVQCSGAHIRDPVGGSVEFQFVPVLKLIGTLLVMGVFDDDDVRQILLLIDPSVFGEHSAGTEEGAEKEEVTQVEEKAVEAGEKAGKEAPVKGLLQTRLPESVKLQMCELLSYLCDCELQHRVEAIVAFGDIYVSKLQANQKFRYNELMQALNMSAALTARKTKEFRSPPQEQINMLLNFQLGENCPCPEEIREELYDFHEDLLLHCGVPLEEEEEEEEDTSWTGKLCALVYKIKGPPKPEKEQPTEEEERCPTTLKELISQTMICWAQEDQIQDSELVRMMFNLLRRQYDSIGELLQALRKTYTISHTSVSDTINLLAALGQIRSLLSVRMGKEEELLMINGLGDIMNNKVFYQHPNLMRVLGMHETVMEVMVNVLGTEKSQIAFPKMVASCCRFLCYFCRISRQNQKAMFEHLSYLLENSSVGLASPSMRGSTPLDVAASSVMDNNELALSLEEPDLEKVVTYLAGCGLQSCPMLLAKGYPDVGWNPIEGERYLSFLRFAVFVNSESVEENASVVVKLLIRRPECFGPALRGEGGNGLLAAMQGAIKISENPALDLPSQGYKREVSTGDDEEEEEIVHMGNAIMSFYSALIDLLGRCAPEMHLIQTGKGEAIRIRSILRSLVPTEDLVGIISIPLKLPSLNKDGSVSEPDMAANFCPDHKAPMVLFLDRVYGIKDQTFLLHLLEVGFLPDLRASASLDTVSLSTTEAALALNRYICSAVLPLLTRCAPLFAGTEHCTSLIDSTLQTIYRLSKGRSLTKAQRDTIEECLLAICNHLRPSMLQQLLRRLVFDVPQLNEYCKMPLKLLTNHYEQCWKYYCLPSGWGSYGLAVEEELHLTEKLFWGIFDSLSHKKYDPDLFRMALPCLSAIAGALPPDYLDTRITATLEKQISVDADGNFDPKPINTMNFSLPEKLEYIVTKYAEHSHDKWACDKSQSGWKYGISLDENVKTHPLIRPFKTLTEKEKEIYRWPARESLKTMLAVGWTVERTKEGEALVQQRENEKLRSVSQANQGNSYSPAPLDLSNVVLSRELQGMVEVVAENYHNIWAKKKKLELESKGGGSHPLLVPYDTLTAKEKFKDREKAQDLFKFLQVNGIIVSRGMKDMELDASSMEKRFAYKFLKKILKYVDSAQEFIAHLEAIVSSGKTEKSPRDQEIKFFAKVLLPLVDQYFTSHCLYFLSSPLKPLSSSGYASHKEKEMVAGLFCKLAALVRHRISLFGSDSTTMVSCLHILAQTLDTRTVMKSGSELVKAGLRAFFENAAEDLEKTSENLKLGKFTHSRTQIKGVSQNINYTTVALLPILTSIFEHVTQHQFGMDLLLGDVQISCYHILCSLYSLGTGKNIYVERQRPALGECLASLAAAIPVAFLEPTLNRYNPLSVFNTKTPRERSILGMPDTVEDMCPDIPQLEGLMKEINDLAESGARYTEMPHVIEVILPMLCNYLSYWWERGPENLPPSTGPCCTKVTSEHLSLILGNILKIINNNLGIDEASWMKRIAVYAQPIISKARPDLLRSHFIPTLEKLKKKAVKTVQEEEQLKADGKGDTQEAELLILDEFAVLCRDLYAFYPMLIRYVDNNRSNWLKSPDADSDQLFRMVAEVFILWCKSHNFKREEQNFVIQNEINNLAFLTGDSKSKMSKAMQVKSGGQDQERKKTKRRGDLYSIQTSLIVAALKKMLPIGLNMCTPGDQELISLAKSRYSHRDTDEEVREHLRNNLHLQEKSDDPAVKWQLNLYKDVLKSEEPFNPEKTVERVQRISAAVFHLEQVEQPLRSKKAVWHKLLSKQRKRAVVACFRMAPLYNLPRHRSINLFLHGYQRFWIETEEYSFEEKLVQDLAKSPKVEEEEEEETEKQPDPLHQIILYFSRNALTERSKLEDDPLYTSYSSMMAKSCQSGEDEEEDEDKEKTFEEKEMEKQKTLYQQARLHERGAAEMVLQMISASKGEMSPMVVETLKLGIAILNGGNAGVQQKMLDYLKEKKDAGFFQSLSGLMQSCSVLDLNAFERQNKAEGLGMVTEEGTLIVRERGEKVLQNDEFTRDLFRFLQLLCEGHNSDFQNFLRTQMGNTTTVNVIISTVDYLLRLQESISDFYWYYSGKDIIDESGQHNFSKALAVTKQIFNSLTEYIQGPCIGNQQSLAHSRLWDAVVGFLHVFANMQMKLSQDSSQIELLKELLDLLQDMVVMLLSLLEGNVVNGTIGKQMVDTLVESSTNVEMILKFFDMFLKLKDLTSSDTFKEYDPDGKGIISKKEFQKAMEGQKQYTQSEIDFLLSCAEADENDMFNYVDFVDRFHEPAKDIGFNVAVLLTNLSEHMPNDSRLKCLLDPAESVLNYFEPYLGRIEIMGGAKKIERVYFEISESSRTQWEKPQVKESKRQFIFDVVNEGGEQEKMELFVNFCEDTIFEMQLASQISESDSADRPEEEEEDEDSSYVLEIAGEEEEDGSLEPASAFAMACASVKRNVTDFLKRATLKNLRKQYRNVKKMTAKELVKVLFSFFWMLFVGLFQLLFTILGGIFQILWSTVFGGGLVEGAKNIRVTKILGDMPDPTQFGIHDDTMEAERAEVMEPGITTELVHFIKGEKGDTDIMSDLFGLHPKKEGSLKHGPEVGLGDLSEIIGKDEPPTLESTVQKKRKAQAAEMKAANEAEGKVESEKADMEDGEKEDKDKEEEQAEYLWTEVTKKKKRRCGQKVEKPEAFTANFFKGLEIYQTKLLHYLARNFYNLRFLALFVAFAINFILLFYKVTEEPLEEETEDVANLWNSFNDEEEEEAMVFFVLQESTGYMAPTLRALAIIHTIISLVCVVGYYCLKVPLVVFKREKEIARKLEFDGLYITEQPSEDDIKGQWDRLVINTPSFPNNYWDKFVKRKVINKYGDLYGAERIAELLGLDKNALDFSPVEETKAEAASLVSWLSSIDMKYHIWKLGVVFTDNSFLYLAWYTTMSVLGHYNNFFFAAHLLDIAMGFKTLRTILSSVTHNGKQLVLTVGLLAVVVYLYTVVAFNFFRKFYNKSEDDDEPDMKCDDMMTCYLFHMYVGVRAGGGIGDEIEDPAGDPYEMYRIVFDITFFFFVIVILLAIIQGLIIDAFGELRDQQEQVREDMETKCFICGIGNDYFDTTPHGFETHTLQEHNLANYLFFLMYLINKDETEHTGQESYVWKMYQERCWDFFPAGDCFRKQYEDQLG

SEQ ID NO: 62521 - protein, 4865 aa, Homo sapiens
MAEGGEGGEDEIQFLRTEDEVVLQCIATIHKEQRKFCLAAEGLGNRLCFLEPTSEAKYIPPDLCVCNFVLEQSLSVRALQEMLANTGENGGEGAAQGGGHRTLLYGHAVLLRHSFSGMYLTCLTTSRSQTDKLAFDVGLREHATGEACWWTIHPASKQRSEGEKVRIGDDLILVSVSSERYLHLSVSNGNIQVDASFMQTLWNVHPTCSGSSIEEGYLLGGHVVRLFHGHDECLTIPSTDQNDSQHRRIFYEAGGAGTRARSLWRVEPLRISWSGSNIRWGQAFRLRHLTTGHYLALTEDQGLILQDRAKSDTKSTAFSFRASKELKEKLDSSHKRDIEGMGVPEIKYGDSVCFVQHIASGLWVTYKAQDAKTSRLGPLKRKVILHQEGHMDDGLTLQRCQREESQAARIIRNTTALFSQFVSGNNRTAAPITLPIEEVLQTLQDLIAYFQPPEEEMRHEDKQNKLRSLKNRQNLFKEEGMLALVLNCIDRLNVYNSVAHFAGIAREESGMAWKEILNLLYKLLAALIRGNRNNCAQFSNNLDWLISKLDRLESSSGILEVLHCILTESPEALNLIAEGHIKSIISLLDKHGRNHKVLDILCSLCLCNGVAVRANQNLICDNLLPRRNLLLQTRLINDVTSIRPNIFLGVAEGSAQYKKWYFELIIDQVDPFLTAEPTHLRVGWASSSGYAPYPGGGEGWGGNGVGDDLYSYGFDGLHLWSGRIPRAVASINQHLLRSDDVVSCCLDLGVPSISFRINGQPVQGMFENFNTDGLFFPVMSFSAGVKVRFLMGGRHGEFKFLPPSGYAPCYEALLPKEKMRLEPVKEYKRDADGIRDLLGTTQFLSQASFIPCPVDTSQVILPPHLEKIRDRLAENIHELWGMNKIELGWTFGKIRDDNKRQHPCLVEFSKLPETEKNYNLQMSTETLKTLLALGCHIAHVNPAAEEDLKKVKLPKNYMMSNGYKPAPLDLSDVKLLPPQEILVDKLAENAHNVWAKDRIKQGWTYGIQQDLKNKRNPRLVPYALLDERTKKSNRDSLREAVRTFVGYGYNIEPSDQELADSAVEKVSIDKIRFFRVERSYAVRSGKWYFEFEVVTGGDMRVGWARPGCRPDVELGADDQAFVFEGNRGQRWHQGSGYFGRTWQPGDVVGCMINLDDASMIFTLNGELLITNKGSELAFADYEIENGFVPICCLGLSQIGRMNLGTDASTFKFYTMCGLQEGFEPFAVNMNRDVAMWFSKRLPTFVNVPKDHPHIEVMRIDGTMDSPPCLKVTHKTFGTQNSNADMIYCRLSMPVECHSSFSHSPCLDSEAFQKRKQMQEILSHTTTQCYYAIRIFAGQDPSCVWVGWVTPDYHLYSEKFDLNKNCTVTVTLGDERGRVHESVKRSNCYMVWGGDIVASSQRSNRSNVDLEIGCLVDLAMGMLSFSANGKELGTCYQVEPNTKVFPAVFLQPTSTSLFQFELGKLKNAMPLSAAIFRSEEKNPVPQCPPRLDVQTIQPVLWSRMPNSFLKVETERVSERHGWVVQCLEPLQMMALHIPEENRCVDILELCEQEDLMRFHYHTLRLYSAVCALGNSRVAYALCSHVDLSQLFYAIDNKYLPGLLRSGFYDLLISIHLASAKERKLMMKNEYIIPITSTTRNIRLFPDESKRHGLPGVGLRTCLKPGFRFSTPCFVVTGEDHQKQSPEIPLESLRTKALSMLTEAVQCSGAHIRDPVGGSVEFQFVPVLKLIGTLLVMGVFDDDDVRQILLLIDPSVFGEHSAGTEEGAEKEEVTQVEEKAVEAGEKAGKEAPVKGLLQTRLPESVKLQMCELLSYLCDCELQHRVEAIVAFGDIYVSKLQANQKFRYNELMQALNMSAALTARKTKEFRSPPQEQINMLLNFQLGENCPCPEEIREELYDFHEDLLLHCGVPLEEEEEEEEDTSWTGKLCALVYKIKGPPKPEKEQPTEEEERCPTTLKELISQTMICWAQEDQIQDSELVRMMFNLLRRQYDSIGELLQALRKTYTISHTSVSDTINLLAALGQIRSLLSVRMGKEEELLMINGLGDIMNNKVFYQHPNLMRVLGMHETVMEVMVNVLGTEKSQIAFPKMVASCCRFLCYFCRISRQNQKAMFEHLSYLLENSSVGLASPSMRGSTPLDVAASSVMDNNELALSLEEPDLEKVVTYLAGCGLQSCPMLLAKGYPDVGWNPIEGERYLSFLRFAVFVNSESVEENASVVVKLLIRRPECFGPALRGEGGNGLLAAMQGAIKISENPALDLPSQGYKREVSTGDDEEEEEIVHMGNAIMSFYSALIDLLGRCAPEMHLIQTGKGEAIRIRSILRSLVPTEDLVGIISIPLKLPSLNKDGSVSEPDMAANFCPDHKAPMVLFLDRVYGIKDQTFLLHLLEVGFLPDLRASASLDTVSLSTTEAALALNRYICSAVLPLLTRCAPLFAGTEHCTSLIDSTLQTIYRLSKGRSLTKAQRDTIEECLLAICNHLRPSMLQQLLRRLVFDVPQLNEYCKMPLKLLTNHYEQCWKYYCLPSGWGSYGLAVEEELHLTEKLFWGIFDSLSHKKYDPDLFRMALPCLSAIAGALPPDYLDTRITATLEKQISVDADGNFDPKPINTMNFSLPEKLEYIVTKYAEHSHDKWACDKSQSGWKYGISLDENVKTHPLIRPFKTLTEKEKEIYRWPARESLKTMLAVGWTVERTKEGEALVQQRENEKLRSVSQANQGNSYSPAPLDLSNVVLSRELQGMVEVVAENYHNIWAKKKKLELESKGGGSHPLLVPYDTLTAKEKFKDREKAQDLFKFLQVNGIIVSRGMKDMELDASSMEKRFAYKFLKKILKYVDSAQEFIAHLEAIVSSGKTEKSPRDQEIKFFAKVLLPLVDQYFTSHCLYFLSSPLKPLSSSGYASHKEKEMVAGLFCKLAALVRHRISLFGSDSTTMVSCLHILAQTLDTRTVMKSGSELVKAGLRAFFENAAEDLEKTSENLKLGKFTHSRTQIKGVSQNINYTTVALLPILTSIFEHVTQHQFGMDLLLGDVQISCYHILCSLYSLGTGKNIYVERQRPALGECLASLAAAIPVAFLEPTLNRYNPLSVFNTKTPRERSILGMPDTVEDMCPDIPQLEGLMKEINDLAESGARYTEMPHVIEVILPMLCNYLSYWWERGPENLPPSTGPCCTKVTSEHLSLILGNILKIINNNLGIDEASWMKRIAVYAQPIISKARPDLLRSHFIPTLEKLKKKAVKTVQEEEQLKADGKGDTQEAELLILDEFAVLCRDLYAFYPMLIRYVDNNRSNWLKSPDADSDQLFRMVAEVFILWCKSHNFKREEQNFVIQNEINNLAFLTGDSKSKMSKSGGQDQERKKTKRRGDLYSIQTSLIVAALKKMLPIGLNMCTPGDQELISLAKSRYSHRDTDEEVREHLRNNLHLQEKSDDPAVKWQLNLYKDVLKSEEPFNPEKTVERVQRISAAVFHLEQVEQPLRSKKAVWHKLLSKQRKRAVVACFRMAPLYNLPRHRSINLFLHGYQRFWIETEEYSFEEKLVQDLAKSPKVEEEEEEETEKQPDPLHQIILYFSRNALTERSKLEDDPLYTSYSSMMAKSCQSGEDEEEDEDKEKTFEEKEMEKQKTLYQQARLHERGAAEMVLQMISASKGEMSPMVVETLKLGIAILNGGNAGVQQKMLDYLKEKKDAGFFQSLSGLMQSCSVLDLNAFERQNKAEGLGMVTEEGTLIVRERGEKVLQNDEFTRDLFRFLQLLCEGHNSDFQNFLRTQMGNTTTVNVIISTVDYLLRLQESISDFYWYYSGKDIIDESGQHNFSKALAVTKQIFNSLTEYIQGPCIGNQQSLAHSRLWDAVVGFLHVFANMQMKLSQDSSQIELLKELLDLLQDMVVMLLSLLEGNVVNGTIGKQMVDTLVESSTNVEMILKFFDMFLKLKDLTSSDTFKEYDPDGKGIISKKEFQKAMEGQKQYTQSEIDFLLSCAEADENDMFNYVDFVDRFHEPAKDIGFNVAVLLTNLSEHMPNDSRLKCLLDPAESVLNYFEPYLGRIEIMGGAKKIERVYFEISESSRTQWEKPQVKESKRQFIFDVVNEGGEQEKMELFVNFCEDTIFEMQLASQISESDSADRPEEEEEDEDSSYVLEIAGEEEEDGSLEPASAFAMACASVKRNVTDFLKRATLKNLRKQYRNVKKMTAKELVKVLFSFFWMLFVGLFQLLFTILGGIFQILWSTVFGGGLVEGAKNIRVTKILGDMPDPTQFGIHDDTMEAERAEVMEPGITTELVHFIKGEKGDTDIMSDLFGLHPKKEGSLKHGPEVGLGDLSEIIGKDEPPTLESTVQKKRKAQAAEMKAANEAEGKVESEKADMEDGEKEDKDKEEEQAEYLWTEVTKKKKRRCGQKVEKPEAFTANFFKGLEIYQTKLLHYLARNFYNLRFLALFVAFAINFILLFYKVTEEPLEEETEDVANLWNSFNDEEEEEAMVFFVLQESTGYMAPTLRALAIIHTIISLVCVVGYYCLKVPLVVFKREKEIARKLEFDGLYITEQPSEDDIKGQWDRLVINTPSFPNNYWDKFVKRKVINKYGDLYGAERIAELLGLDKNALDFSPVEETKAEAASLVSWLSSIDMKYHIWKLGVVFTDNSFLYLAWYTTMSVLGHYNNFFFAAHLLDIAMGFKTLRTILSSVTHNGKQLVLTVGLLAVVVYLYTVVAFNFFRKFYNKSEDDDEPDMKCDDMMTCYLFHMYVGVRAGGGIGDEIEDPAGDPYEMYRIVFDITFFFFVIVILLAIIQGLIIDAFGELRDQQEQVREDMETKCFICGIGNDYFDTTPHGFETHTLQEHNLANYLFFLMYLINKDETEHTGQESYVWKMYQERCWDFFPAGDCFRKQYEDQLG

SEQ ID NO: 62522 - protein, 94 aa, Homo sapiens
MGSELETAMETLINVFHAHSGKEGDKYKLSKKELKELLQTELSGFLDAQKDVDAVDKVMKELDENGDGEVDFQEYVVLVAALTVACNNFFWENS

SEQ ID NO: 62523 - protein, 53 aa, Homo sapiens
MGSELETAMETLINVFHAHSGKEGDKYKLSKKELKELLQTELSGFLDVKELML

SEQ ID NO: 62524 - protein, 147 aa, Homo sapiens
MEEPQTKTPSAEFPPYRAQPAQPATAPAATFATLAICPEPAPTSGPGQPCTAAMGSELETAMETLINVFHAHSGKEGDKYKLSKKELKELLQTELSGFLDAQKDVDAVDKVMKELDENGDGEVDFQEYVVLVAALTVACNNFFWENS

SEQ ID NO: 62525 - protein, 34 aa, Homo sapiens
MGSELETAMETLINVFHAHSGKEGDKYKLSKKEL

SEQ ID NO: 62526 - protein, 97 aa, Homo sapiens
MPSQMEHAMETMMFTFHKFAGDKGYLTKEDLRVLMEKEFPGFLENQKDPLAVDKIMKDLDQCRDGKVGFQSFFSLIAGLTIACNDYFVVHMKQKGKK

SEQ ID NO: 62527 - protein, 97 aa, Homo sapiens; identical to SEQ ID NO: 62526

SEQ ID NO: 62528 - protein, 105 aa, Homo sapiens
MAKISSPTETERCIESLIAVFQKYAGKDGYNYTLSKTEFLSFMNTELAAFTKNQKDPGVLDRMMKKLDTNSDGQLDFSEFLNLIGGLAMACHDSFLKAVPSQKRT

SEQ ID NO: 62529 - protein, 83 aa, Homo sapiens
AGKMTKLEEHLEGIVNIFHQYSVRKGHFDTLSKGELKQLLTKELANTIKRPKKGSSVIDEIFQGLDANQDEQVDFQEFISLVA

SEQ ID NO: 62530 - protein, 92 aa, Homo sapiens
MTKLEEHLEGIVNIFHQYSVRKGHFDTLSKGELKQLLTKELANTIKNIKDKAVIDEIFQGLDANQDEQVDFQEFISLVAIALKAAHYHTHKE

SEQ ID NO: 62531 - protein, 98 aa, Homo sapiens
MAAEPLTELEESIETVVTTFFTFARQEGRKDSLSVNEFKELVTQQLPHLLKDVGSLDEKMKSLDVNQDSELKFNEYWRLIGELAKEIRKKKDLKIRKK

SEQ ID NO: 62532 - protein, 98 aa, Homo sapiens; identical to SEQ ID NO: 62531

SEQ ID NO: 62533 - protein, 98 aa, Homo sapiens; identical to SEQ ID NO: 62531

SEQ ID NO: 62534 - protein, 98 aa, Homo sapiens; identical to SEQ ID NO: 62531

SEQ ID NO: 62535 - protein, 98 aa, Homo sapiens; identical to SEQ ID NO: 62531

SEQ ID NO: 62536 - protein, 104 aa, Homo sapiens
MGQCRSANAEDAQEFSDVERAIETLIKNFHQYSVEGGKETLTPSELRDLVTQQLPHLMPSNCGLEEKIANLGSCNDSKLEFRSFWELIGEAAKSVKLERPVRGH

SEQ ID NO: 62537 - protein, 104 aa, Homo sapiens; identical to SEQ ID NO: 62536

SEQ ID NO: 62538 - protein, 104 aa, Homo sapiens; identical to SEQ ID NO: 62536

SEQ ID NO: 62539 - protein, 104 aa, Homo sapiens; identical to SEQ ID NO: 62536

SEQ ID NO: 62540 - protein, 138 aa, Homo sapiens
MCSSLEQALAVLVTTFHKYSCQEGDKFKLSKGEMKELLHKELPSFVGHSREPCAVRAFRVHLFNPVIGDLRNQSPEGKSDCPKITQHWEKVDEEGLKKLMGSLDENSDQQVDFQEYAVFLALITVMCNDFFQGCPDRP

SEQ ID NO: 62541 - protein, 97 aa, Homo sapiens
MCSSLEQALAVLVTTFHKYSCQEGDKFKLSKGEMKELLHKELPSFVGEKVDEEGLKKLMGSLDENSDQQVDFQEYAVFLALITVMCNDFFQGCPDRP

SEQ ID NO: 62542 - protein, 97 aa, Homo sapiens; identical to SEQ ID NO: 62541

SEQ ID NO: 62543 - protein, 97 aa, Homo sapiens; identical to SEQ ID NO: 62541

SEQ ID NO: 62544 - protein, 101 aa, Homo sapiens
MARPLEQAVAAIVCTFQEYAGRCGDKYKLCQAELKELLQKELATWTPTEFRECDYNKFMSVLDTNKDCEVDFVEYVRSLACLCLYCHEYFKDCPSEPPCSQ

SEQ ID NO: 62545 - protein, 101 aa, Homo sapiens; identical to SEQ ID NO: 62544

SEQ ID NO: 62546 - protein, 101 aa, Homo sapiens
MACPLEKALDVMVSTFHKYSGKEGDKFKLNKSELKELLTRELPSFLGKRTDEAAFQKLMSNLDSNRDNEVDFQEYCVFLSCIAMMCNEFFEGFPDKQPRKK

SEQ ID NO: 62547 - protein, 101 aa, Homo sapiens; identical to SEQ ID NO: 62546

SEQ ID NO: 62548 - protein, 101 aa, Homo sapiens; identical to SEQ ID NO: 62546

SEQ ID NO: 62549 - protein, 101 aa, Homo sapiens; identical to SEQ ID NO: 62546

SEQ ID NO: 62550 - protein, 90 aa, Homo sapiens [sequence omitted]

SEQ ID NO: 62551 - protein, 110 aa, Homo sapiens
MPAAWILWAHSHSELHTVMETPLEKALTTMVTTFHKYSGREGSKLTLSRKELKELIKKELCLGEMKESSIDDLMKSLDKNSDQEIDFKEYSVFLTMLCMAYNDFFLEDNK

SEQ ID NO: 62552 - protein, 92 aa, Homo sapiens
METPLEKALTTMVTTFHKYSGREGSKLTLSRKELKELIKKELCLGEMKESSIDDLMKSLDKNSDQEIDFKEYSVFLTMLCMAYNDFFLEDNK

SEQ ID NO: 62553 - protein, 92 aa, Homo sapiens; identical to SEQ ID NO: 62552

SEQ ID NO: 62554 - protein, 90 aa, Homo sapiens
MACPLDQAIGLLVAIFHKYSGREGDKHTLSKKELKELIQKELTIGSKLQDAEIARLMEDLDRNKDQEVNFQEYVTFLGALALIYNEALKG

SEQ ID NO: 62555 - protein, 90 aa, Homo sapiens; identical to SEQ ID NO: 62554

SEQ ID NO: 62556 - protein, 101 aa, Homo sapiens
MSNTQAERSIIGMIDMFHKYTRRDDKIEKPSLLTMMKENFPNFLSACDKKGTNYLADVFEKKDKNEDKKIDFSEFLSLLGDIATDYHKQSHGAAPCSGGSQ

SEQ ID NO: 62557 - protein, 101 aa, Homo sapiens; identical to SEQ ID NO: 62556

SEQ ID NO: 62558 - protein, 93 aa, Homo sapiens
MLTELEKALNSIIDVYHKYSLIKGNFHAVYRDDLKKLLETECPQYIRKKGADVWFKELDINTDGAVNFQEFLILVIKMGVAAHKKSHEESHKE

SEQ ID NO: 62559 - protein, 93 aa, Homo sapiens; identical to SEQ ID NO: 62558

SEQ ID NO: 62560 - protein, 114 aa, Homo sapiens
MTCKMSQLERNIETIINTFHQYSVKLGHPDTLNQGEFKELVRKDLQNFLKKENKNEKVIEHIMEDLDTNADKQLSFEEFIMLMARLTWASHEKMHEGDEGPGHHHKPGLGEGTP

SEQ ID NO: 62561 - protein, 92 aa, Homo sapiens
MSELEKAMVALIDVFHQYSGREGDKHKLKKSELKELINNELSHFLEEIKEQEVVDKVMETLDNDGDGECDFQEFMAFVAMVTTACHEFFEHE

SEQ ID NO: 62562 - protein, 92 aa, Homo sapiens; identical to SEQ ID NO: 62561

SEQ ID NO: 62563 - protein, 95 aa, Homo sapiens
MTELETAMGMIIDVFSRYSGSEGSTQTLTKGELKVLMEKELPGFLQSGKDKDAVDKLLKDLDANGDAQVDFSEFIVFVAAITSACHKYFEKAGLK

SEQ ID NO: 62564 - protein, 99 aa, Homo sapiens
MPTQLEMAMDTMIRIFHRYSGKERKRFKLSKGELKLLLQRELTEFLSCQKETQLVDKIVQDLDANKDNEVDFNEFVVMVAALTVACNDYFVEQLKKKGK

SEQ ID NO: 62565 - protein, 99 aa, Homo sapiens; identical to SEQ ID NO: 62564

SEQ ID NO: 62566 - protein, 342 aa, Homo sapiens
MMCSRVPSEQSSGTSLLPKDGAPFSWDSLDEDGLDDSLLELSEGEEDDGDVNYTEEEIDALLKEDDPSYEQSSGEDDGGHVEKGERGSQILLDTPREKNSSYSLGPVAETPDLFKLPQLSTSSGHGPAHTKPLNRRSVLEKNLIKVTVAPFNPTVCDALLDKDETDSSKDTEKLSSLGEEMREDGLSPNESKLCTESEGISPNNSAWNGPQLSSSNNNFQQTVSDKNMPDSENPTSVFSRISDHSETPNMELSCRNGGSHKSSCEMRSLVVSTSSNKQDVLNKDSGKMKGHERRLGKVIPVLQTKTRTNVPTFSQSNLEQQKQLYLRSVIAHIEDPEDTNQG

SEQ ID NO: 62567 - protein, 408 aa, Homo sapiens
MMCSRVPSEQSSGTSLLPKDGAPFSWDSLDEDGLDDSLLELSEGEEDDGDVNYTEEEIDALLKEDDPSYEQSSGEDDGGHVEKGERGSQILLDTPREKNSSYSLGPVAETPDLFKLPQLSTSSGHGPAHTKPLNRRSVLEKNLIKVTVAPFNPTVCDALLDKDETDSSKDTEKLSSLGEEMREDGLSPNESKLCTESEGISPNNSAWNGPQLSSSNNNFQQTVSDKNMPDSENPTSVFSRISDHSETPNMELSCRNGGSHKSSCEMRSLVVSTSSNKQDVLNKDSGKMKGHERRLGKVIPVLQTKTRTNVPTFSQSNLEQQKQLYLRSVIAHIEDPEDTNQGISGELCALMDQVHHMQHSKWQHPSDLTTRNYARRQKHLQRYSLTQWVDRNMRSHHRFQRLPDFSYS

SEQ ID NO: 62568 - protein, 408 aa, Homo sapiens; identical to SEQ ID NO: 62567

SEQ ID NO: 62569 - protein, 341 aa, Homo sapiens
MMCSRVPSEQSSGTSLLPKDGAPFSWDSLDEDGLDDSLLELSEGEEDDGDVNYTEEEIDALLKEDDPSYEQSSGEDDGGHVEKGERGSQILLDTPREKNSSYSLGPVAETPDLFKLPQLSTSSGHGPAHTKPLNRRSVLEKNLIKVTVAPFNPTVCDALLDKDETDSSKDTEKLSSLGEEMREDGLSPNESKLCTESEGISPNNSAWNGPQLSSSNNNFQQTVSDKNMPDSENPTSVFSRISDHSETPNMELSCRNGGSHKSSCEMRSLVVSTSSNKDVLNKDSGKMKGHERRLGKVIPVLQTKTRTNVPTFSQSNLEQQKQLYLRSVIAHIEDPEDTNQG

SEQ ID NO: 62570 - protein, 146 aa, Homo sapiens
MMCSRVPSEQSSGTSLLPKDGAPFSWDSLDEDGLDDSLLELSEGEEDDGDVNYTEEEIDALLKEDDPSYEQSSGEDDGGHVEKGERGSQILLDTPREKNSSYSLGPVAETPDLFKLPQLSTSSGHGPAHTKPLNRRSVLEKNLIKV

SEQ ID NO: 62571 - protein, 120 aa, Homo sapiens
MMCSRVPSEQSSGTSLLPKDGAPFSWDSLDEDGLDDSLLELSEGEEDDGDVNYTEEEIDALLKEDDPSYEQSSGEDDGGHVEKGERGSQILLDTPREKNSSYSLGPVAETPDLFKLPQLS

SEQ ID NO: 62572 - protein, 41 aa, Homo sapiens
MMCSRVPSEQSSGTSLLPKDGAPFSWDSLDEDGLDDSLLEL

SEQ ID NO: 62573 - protein, 5 aa, Homo sapiens
MMCSR

SEQ ID NO: 62574 - protein, 130 aa, Homo sapiens
MMCSRVPSEQSSGTSLLPKDGAPFSWDSLDEDGLDDSLLELSEGEEDDGDVNYTEEEIDALLKEDDPSYEQSSGEDDGGHVEKGERGSQILLDTPREKNSSYSLGPVAETPDLFKLPQLSTSSGHGPAHT

SEQ ID NO: 62575 - protein, 341 aa, Homo sapiens; identical to SEQ ID NO: 62569

SEQ ID NO: 62576 - protein, 171 aa, Homo sapiens
MMCSRVPSEQSSGTSLLPKDGAPFSWDSLDEDGLDDSLLELSEGEEDDGDVNYTEEEIDALLKEDDPSYEQSSGEDDGGHVEKGERGSQILLDTPREKNSSYSLGPVAETPDLFKLPQLSTSSGHGPAHTKPLNRRSVLEKNLIKVTVAPFNPTVCDALLDKDETDSSKDT

SEQ ID NO: 62577 - protein, 587 aa, Homo sapiens
MATAAYEQLKLHITPEKFYVEACDDGADDVLTIDRVSTEVTLAVKKDVPPSAVTRPIFGILGTIHLVAGNYLIVITKKIKVGEFFSHVVWKATDFDVLSYKKTMLHLTDIQLQDNKTFLAMLNHVLNVDGFYFSTTYDLTHTLQRLSNTSPEFQEMSLLERADQRFVWNGHLLRELSAQPEVHRFALPVLHGFITMHSCSINGKYFDWILISRRSCFRAGVRYYVRGIDSEGHAANFVETEQIVHYNGSKASFVQTRGSIPVFWSQRPNLKYKPLPQISKVANHMDGFQRHFDSQVIIYGKQVIINLINQKGSEKPLEQTFATMVSSLGSGMMRYIAFDFHKECKNMRWDRLSILLDQVAEMQDELSYFLVDSAGQVVANQEGVFRSNCMDCLDRTNVIQSLLARRSLQAQLQRLGVLHVGQKLEEQDEFEKIYKNAWADNANACAKQYAGTGALKTDFTRTGKRTHLGLIMDGWNSMIRYYKNNFSDGFRQDSIDLFLGNYSVDELESHSPLSVPRDWKFLALPIIMVVAFSMCIICLLMAGDTWTETLAYVLFWGVASIGTFFIILYNGKDFVDAPRLVQKEKID

SEQ ID NO: 62578 - protein, 526 aa, Homo sapiens
MWKLVMMEQMTYLPLTVCPQRLPLQSRKMFLLQLSQDQYLVYWAQSIWWQLQDNKTFLAMLNHVLNVDGFYFSTTYDLTHTLQRLSNTSPEFQEMSLLERADQRFVWNGHLLRELSAQPEVHRFALPVLHGFITMHSCSINGKYFDWILISRRSCFRAGVRYYVRGIDSEGHAANFVETEQIVHYNGSKASFVQTRGSIPVFWSQRPNLKYKPLPQISKVANHMDGFQRHFDSQVIIYGKQVIINLINQKGSEKPLEQTFATMVSSLGSGMMRYIAFDFHKECKNMRWDRLSILLDQVAEMQDELSYFLVDSAGQVVANQEGVFRSNCMDCLDRTNVIQSLLARRSLQAQLQRLGVLHVGQKLEEQDEFEKIYKNAWADNANACAKQYAGTGALKTDFTRTGKRTHLGLIMDGWNSMIRYYKNNFSDGFRQDSIDLFLGNYSVDELESHSPLSVPRDWKFLALPIIMVVAFSMCIICLLMAGDTWTETLAYVLFWGVASIGTFFIILYNGKDFVDAPRLVQKEKID

SEQ ID NO: 62579 - protein, 717 aa, Homo sapiens
MSRRSQRLTRYSQGDDDGSSSSGGSSVAGSQSTLFKDSPLRTLKRKSSNMKRLSPAPQLGPSSDAHTSYYSESLVHESWFPPRSSLEELHGDANWGEDLRVRRRRGTGGSESSRASGLVGRKATEDFLGSSSGYSSEDDYVGYSDVDQQSSSSRLRSAVSRAGSLLWMVATSPGRLFRLLYWWAGTTWYRLTTAASLLDVFVLTRRFSSLKTFLWFLLPLLLLTCLTYGAWYFYPYGLQTFHPALVSWWAAKDSRRPDEGWEARDSSPHFQAEQRVMSRVHSLERRLEALAAEFSSNWQKEAMRLERLELRQGAPGQGGGGGLSHEDTLALLEGLVSRREAALKEDFRRETAARIQEELSALRAEHQQDSEDLFKKIVRASQESEARIQQLKSEWQSMTQESFQESSVKELRRLEDQLAGLQQELAALALKQSSVAEEVGLLPQQIQAVRDDVESQFPAWISQFLARGGGGRVGLLQREEMQAQLRELESKILTHVAEMQGKSAREAAASLSLTLQKEGVIGVTEEQVHHIVKQALQRYSEDRIGLADYALESGGASVISTRCSETYETKTALLSLFGIPLWYHSQSPRVILQPDVHPGNCWAFQGPQGFAVVRLSARIRPTAVTLEHVPKALSPNSTISSAPKDFAIFGFDEDLQQEGTLLGKFTYDQDGEPIQTFHFQAPTMATYQVVELRILTNWGHPEYTCIYRFRVHGEPAH

SEQ ID NO: 62580 - protein, 738 aa, Homo sapiens
MSRRSQRLTRYSQGDDDGSSSSGGSSVAGSQSTLFKDSPLRTLKRKSSNMKRLSPAPQLGPSSDAHTSYYSESLVHESWFPPRSSLEELHGDANWGEDLRVRRRRGTGGSESSRASGLVGRKATEDFLGSSSGYSSEDDYVEDSEGRGSKVTETEPVSSFPAGYSDVDQQSSSSRLRSAVSRAGSLLWMVATSPGRLFRLLYWWAGTTWYRLTTAASLLDVFVLTRRFSSLKTFLWFLLPLLLLTCLTYGAWYFYPYGLQTFHPALVSWWAAKDSRRPDEGWEARDSSPHFQAEQRVMSRVHSLERRLEALAAEFSSNWQKEAMRLERLELRQGAPGQGGGGGLSHEDTLALLEGLVSRREAALKEDFRRETAARIQEELSALRAEHQQDSEDLFKKIVRASQESEARIQQLKSEWQSMTQESFQESSVKELRRLEDQLAGLQQELAALALKQSSVAEEVGLLPQQIQAVRDDVESQFPAWISQFLARGGGGRVGLLQREEMQAQLRELESKILTHVAEMQGKSAREAAASLSLTLQKEGVIGVTEEQVHHIVKQALQRYSEDRIGLADYALESGGASVISTRCSETYETKTALLSLFGIPLWYHSQSPRVILQPDVHPGNCWAFQGPQGFAVVRLSARIRPTAVTLEHVPKALSPNSTISSAPKDFAIFGFDEDLQQEGTLLGKFTYDQDGEPIQTFHFQAPTMATYQVVELRILTNWGHPEYTCIYRFRVHGEPAH

SEQ ID NO: 62581 - protein, 717 aa, Homo sapiens; identical to SEQ ID NO: 62579

SEQ ID NO: 62582 - protein, 717 aa, Homo sapiens; identical to SEQ ID NO: 62579

SEQ ID NO: 62583 - protein, 706 aa, Homo sapiens
MVSPPSAGQRLRGVPVWAAGAFRFSSGEESTSHLIMSRRSQRLTRYSQGDDDGSSSSGGSSVAGSQSTLFKDSPLRTLKRKSSNMKRLSPAPQLGPSSDAHTSYYSESLVHESWFPPRSSLEELHGDANWGYSDVDQQSSSSRLRSAVSRAGSLLWMVATSPGRLFRLLYWWAGTTWYRLTTAASLLDVFVLTRRFSSLKTFLWFLLPLLLLTCLTYGAWYFYPYGLQTFHPALVSWWAAKDSRRPDEGWEARDSSPHFQAEQRVMSRVHSLERRLEALAAEFSSNWQKEAMRLERLELRQGAPGQGGGGGLSHEDTLALLEGLVSRREAALKEDFRRETAARIQEELSALRAEHQQDSEDLFKKIVRASQESEARIQQLKSEWQSMTQESFQESSVKELRRLEDQLAGLQQELAALALKQSSVAEEVGLLPQQIQAVRDDVESQFPAWISQFLARGGGGRVGLLQREEMQAQLRELESKILTHVAEMQGKSAREAAASLSLTLQKEGVIGVTEEQVHHIVKQALQRYSEDRIGLADYALESGGASVISTRCSETYETKTALLSLFGIPLWYHSQSPRVILQPDVHPGNCWAFQGPQGFAVVRLSARIRPTAVTLEHVPKALSPNSTISSAPKDFAIFGFDEDLQQEGTLLGKFTYDQDGEPIQTFHFQAPTMATYQVVELRILTNWGHPEYTCIYRFRVHGEPAH

SEQ ID NO: 62584 - protein, 124 aa, Homo sapiens
MSRRSQRLTRYSQGDDDGSSSSGGSSVAGSQSTLFKDSPLRTLKRKSSNMKRLSPAPQLGPSSDAHTSYYSESLVHESWFPPRSSLEELHGDANWDPTFQKLLEAQKSPWFFPAQVRTCGCGGG

SEQ ID NO: 62585 - protein, 127 aa, Homo sapiens
MSRRSQRLTRYSQGDDDGSSSSGGSSVAGSQSTLFKDSPLRTLKRKSSNMKRLSPAPQLGPSSDAHTSYYSESLVHESWFPPRSSLEELHGDANWGYSDVDQQSSSSRLRSAVSRAGSLLWMVATSP

SEQ ID NO: 62586 - protein, 110 aa, Homo sapiens
MSRRSQRLTRYSQGDDDGSSSSGGSSVAGSQSTLFKDSPLRTLKRKSSNMKRLSPAPQLGPSSDAHTSYYSESLVHESWFPPRSSLEELHGDANWGEDLRVRRRRGTGGS

SEQ ID NO: 62587 - protein, 224 aa, Homo sapiens
MSRRSQRLTRYSQGDDDGSSSSGGSSVAGSQSTLFKDSPLRTLKRKSSNMKRLSPAPQLGPSSDAHTSYYSESLVHESWFPPRSSLEELHGDANWGYSDVDQQSSSSRLRSAVSRAGSLLWMVATSPGRLFRLLYWWAGTTWYRLTTAASLLDVFVLTRRFSSLKTFLWFLLPLLLLTCLTYGAWYFYPYGLQTFHPALVSWWAAKDSRRPDEGWEARDSSPHF

SEQ ID NO: 62588 - protein, 101 aa, Homo sapiens
MSRRSQRLTRYSQGDDDGSSSSGGSSVAGSQSTLFKDSPLRTLKRKSSNMKRLSPAPQLGPSSDAHTSYYSESLVHESWFPPRSSLEELHGDANWGEDLRV

SEQ ID NO: 62589 - protein, 144 aa, Homo sapiens
MSRRSQRLTRYSQGDDDGSSSSGGSSVAGSQSTLFKDSPLRTLKRKSSNMKRLSPAPQLGPSSDAHTSYYSESLVHESWFPPRSSLEELHGDANWGEDLRVRRRRGTGGSESSRASGLVGRKATEDFLGSSSGYSSEDDYVGRR

SEQ ID NO: 62590 - protein, 205 aa, Homo sapiens
MSRRSQRLTRYSQGDDDGSSSSGGSSVAGSQSTLFKDSPLRTLKRKSSNMKRLSPAPQLGPSSDAHTSYYSESLVHESWFPPRSSLEELHGDANWGEDLRVRRRRGTGGSESSRASGLVGRKATEDFLGSSSGYSSEDDYVGYSDVDQQSSSSRLRSAVSRAGSLLWMVATSPGRLFRLLYWWAGTTWYRLTTAASLLDVFVLTR

SEQ ID NO: 62591 - protein, 379 aa, Homo sapiens
MPRSSRSPGDPGALLEDVAHNPRPRRIAQRGRNTSRMAEDTSPNMNDNILLPVRNNDQALGLTQCMLGCVSWFTCFACSLRTQAQQVLFNTCRCKLLCQKLMEKTGILLLCAFGFWMFSIHLPSKMKVWQDDSINGPLQSLRLYQEKVRHHSGEIQDLRGSMNQLIAKLQEMEAMSDEQKMAQKIMKMIHGDYIEKPDFALKSIGASIDFEHTSVTYNHEKAHSYWNWIQLWNYAQPPDVILEPNVTPGNCWAFEGDRGQVTIQLAQKVYLSNLTLQHIPKTISLSGSLDTAPKDFVIYGMEGSPKEEVFLGAFQFQPENIIQMFPLQNQPARAFSAVKVKISSNWGNPGFTCLYRVRVHGSVAPPREQPHQNPYPKRD

SEQ ID NO: 62592 - protein, 122 aa, Homo sapiens
MPRSSRSPGDPGALLEDVAHNPRPRRIAQRGRNTSRMAEDTSPNMNDNILLPVRNNDQALGLTQCMLGCVYASCCARSSWRRQAFCSSVLSVCPRALPSPRWRYPWALALIIGHWARHCTAT

SEQ ID NO: 62593 - protein, 354 aa, Homo sapiens
MPRSSRSPGDPGALLEDVAHNPRPRRIAQRGRNTSRMAEDTSPNMTWFTCFACSLRTQAQQVLFNTCRCKLLCQKLMEKTGILLLCAFGFWMFSIHLPSKMKVWQDDSINGPLQSLRLYQEKVRHHSGEIQDLRGSMNQLIAKLQEMEAMSDEQKMAQKIMKMIHGDYIEKPDFALKSIGASIDFEHTSVTYNHEKAHSYWNWIQLWNYAQPPDVILEPNVTPGNCWAFEGDRGQVTIQLAQKVYLSNLTLQHIPKTISLSGSLDTAPKDFVIYGMEGSPKEEVFLGAFQFQPENIIQMFPLQNQPARAFSAVKVKISSNWGNPGFTCLYRVRVHGSVAPPREQPHQNPYPKRD

SEQ ID NO: 62594 - protein, 152 aa, Homo sapiens
GALLEDVAHNPRPRRIAQRGRNTSRMAEDTSPNMNDNILLPVRNNDQALGLTQCMLGCVSWFTCFACSLRTQAQQVLFNTCRCKLLCQKLMEKTGILLLCAFGVSQGPAQSQVEVSLGPGTDYRTLGKTLHCHVTQFPHLPDGCCCENYEMK

SEQ ID NO: 62595 - protein, 128 aa, Homo sapiens
MSEGGGQVSCIFAAPTRLCRWPALIECGVNLTQPLCEWMIQVARDRTLSLAWEVASLLTLSSSEVGLEGVGTIWPSSYSSEESSRNGAEQGRQLSIEGPFQGQNCPSHPAAALPLPMRGESQATSCQV

SEQ ID NO: 62596 - protein, 1324 aa, Homo sapiens
MSRRKQAKPQHFQSDPEVASLPRRDGDTEKGQPSRPTKSKDAHVCGRCCAEFFELSDLLLHKKNCTKNQLVLIVNENPASPPETFSPSPPPDNPDEQMNDTVNKTDQVDCSDLSEHNGLDREESMEVEAPVANKSGSGTSSGSHSSTAPSSSSSSSSSSGGGGSSSTGTSAITTSLPQLGDLTTLGNFSVINSNVIIENLQSTKVAVAQFSQEARCGGASGGKLAVPALMEQLLALQQQQIHQLQLIEQIRHQILLLASQNADLPTSSSPSQGTLRTSANPLSTLSSHLSQQLAAAAGLAQSLASQSASISGVKQLPPIQLPQSSSGNTIIPSNSGSSPNMNILAAAVTTPSSEKVASSAGASHVSNPAVSSSSSPAFAISSLLSPASNPLLPQQASANSVFPSPLPNIGTTAEDLNSLSALAQQRKSKPPNVTAFEAKSTSDEAFFKHKCRFCAKVFGSDSALQIHLRSHTGERPFKCNICGNRFSTKGNLKVHFQRHKEKYPHIQMNPYPVPEHLDNIPTSTGIPYGMSIPPEKPVTSWLDTKPVLPTLTTSVGLPLPPTLPSLIPFIKTEEPAPIPISHSATSPPGSVKSDSGGPESATRNLGGLPEEAEGSTLPPSGGKSEESGMVTNSVPTASSSVLSSPAADCGPAGSATTFTNPLLPLMSEQFKAKFPFGGLLDSAQASETSKLQQLVENIDKKATDPNECIICHRVLSCQSALKMHYRTHTGERPFKCKICGRAFTTKGNLKTHYSVHRAMPPLRVQHSCPICQKKFTNAVVLQQHIRMHMGGQIPNTPVPDSYSESMESDTGSFDEKNFDDLDNFSDENMEDCPEGSIPDTPKSADASQDSLSSSPLPLEMSSIAALENQMKMINAGLAEQLQASLKSVENGSIEGDVLTNDSSSVGGDMESQSAGSPAISESTSSMQALSPSNSTQEFHKSPSIEEKPQRAVPSEFANGLSPTPVNGGALDLTSSHAEKIIKEDSLGILFPFRDRGKFKNTACDICGKTFACQSALDIHYRSHTKERPFICTVCNRGFSTKGNLKQHMLTHQMRDLPSQLFEPSSNLGPNQNSAVIPANSLSSLIKTEVNGFVHVSPQDSKDTPTSHVPSGPLSSSATSPVLLPALPRRTPKQHYCNTCGKTFSSSSALQIHERTHTGEKPFACTICGRAFTTKGNLKVHMGTHMWNSTPARRGRRLSVDGPMTFLGGNPVKFPEMFQKDLAARSGSGDPSSFWNQYAAALSNGLAMKANEISVIQNGGIPPIPGSLGSGNSSPVSGLTGNLERLQNSEPNAPLAGLEKMASSENGTNFRFTRFVEDSKEIVTS

SEQ ID NO: 62597 - protein, 1227 aa, Homo sapiens
MNDTVNKTDQVDCSDLSEHNGLDREESMEVEAPVANKSGSGTSSGSHSSTAPSSSSSSSSSSGGGGSSSTGTSAITTSLPQLGDLTTLGNFSVINSNVIIENLQSTKVAVAQFSQEARCGGASGGKLAVPALMEQLLALQQQQIHQLQLIEQIRHQILLLASQNADLPTSSSPSQGTLRTSANPLSTLSSHLSQQLAAAAGLAQSLASQSASISGVKQLPPIQLPQSSSGNTIIPSNSGSSPNMNILAAAVTTPSSEKVASSAGASHVSNPAVSSSSSPAFAISSLLSPASNPLLPQQASANSVFPSPLPNIGTTAEDLNSLSALAQQRKSKPPNVTAFEAKSTSDEAFFKHKCRFCAKVFGSDSALQIHLRSHTGERPFKCNICGNRFSTKGNLKVHFQRHKEKYPHIQMNPYPVPEHLDNIPTSTGIPYGMSIPPEKPVTSWLDTKPVLPTLTTSVGLPLPPTLPSLIPFIKTEEPAPIPISHSATSPPGSVKSDSGGPESATRNLGGLPEEAEGSTLPPSGGKSEESGMVTNSVPTASSSVLSSPAADCGPAGSATTFTNPLLPLMSEQFKAKFPFGGLLDSAQASETSKLQQLVENIDKKATDPNECIICHRVLSCQSALKMHYRTHTGERPFKCKICGRAFTTKGNLKTHYSVHRAMPPLRVQHSCPICQKKFTNAVVLQQHIRMHMGGQIPNTPVPDSYSESMESDTGSFDEKNFDDLDNFSDENMEDCPEGSIPDTPKSADASQDSLSSSPLPLEMSSIAALENQMKMINAGLAEQLQASLKSVENGSIEGDVLTNDSSSVGGDMESQSAGSPAISESTSSMQALSPSNSTQEFHKSPSIEEKPQRAVPSEFANGLSPTPVNGGALDLTSSHAEKIIKEDSLGILFPFRDRGKFKNTACDICGKTFACQSALDIHYRSHTKERPFICTVCNRGFSTKGNLKQHMLTHQMRDLPSQLFEPSSNLGPNQNSAVIPANSLSSLIKTEVNGFVHVSPQDSKDTPTSHVPSGPLSSSATSPVLLPALPRRTPKQHYCNTCGKTFSSSSALQIHERTHTGEKPFACTICGRAFTTKGNLKVHMGTHMWNSTPARRGRRLSVDGPMTFLGGNPVKFPEMFQKDLAARSGSGDPSSFWNQYAAALSNGLAMKANEISVIQNGGIPPIPGSLGSGNSSPVSGLTGNLERLQNSEPNAPLAGLEKMASSENGTNFRFTRFVEDSKEIVTS

SEQ ID NO: 62598 - protein, 1288 aa, Homo sapiens
MSRRKQAKPQHFQSDPEVASLPRRDGDTEKGQPSRPTKSKDAHVCGRCCAEFFELSDLLLHKKNCTKNQLVLIVNENPASPPETFSPSPPPDNPDEQMNDTVNKTGSHSSTAPSSSSSSSSSSGGGGSSSTGTSAITTSLPQLGDLTTLGNFSVINSNVIIENLQSTKVAVAQFSQEARCGGASGGKLAVPALMEQLLALQQQQIHQLQLIEQIRHQILLLASQNADLPTSSSPSQGTLRTSANPLSTLSSHLSQQLAAAAGLAQSLASQSASISGVKQLPPIQLPQSSSGNTIIPSNSGSSPNMNILAAAVTTPSSEKVASSAGASHVSNPAVSSSSSPAFAISSLLSPASNPLLPQQASANSVFPSPLPNIGTTAEDLNSLSALAQQRKSKPPNVTAFEAKSTSDEAFFKHKCRFCAKVFGSDSALQIHLRSHTGERPFKCNICGNRFSTKGNLKVHFQRHKEKYPHIQMNPYPVPEHLDNIPTSTGIPYGMSIPPEKPVTSWLDTKPVLPTLTTSVGLPLPPTLPSLIPFIKTEEPAPIPISHSATSPPGSVKSDSGGPESATRNLGGLPEEAEGSTLPPSGGKSEESGMVTNSVPTASSSVLSSPAADCGPAGSATTFTNPLLPLMSEQFKAKFPFGGLLDSAQASETSKLQQLVENIDKKATDPNECIICHRVLSCQSALKMHYRTHTGERPFKCKICGRAFTTKGNLKTHYSVHRAMPPLRVQHSCPICQKKFTNAVVLQQHIRMHMGGQIPNTPVPDSYSESMESDTGSFDEKNFDDLDNFSDENMEDCPEGSIPDTPKSADASQDSLSSSPLPLEMSSIAALENQMKMINAGLAEQLQASLKSVENGSIEGDVLTNDSSSVGGDMESQSAGSPAISESTSSMQALSPSNSTQEFHKSPSIEEKPQRAVPSEFANGLSPTPVNGGALDLTSSHAEKIIKEDSLGILFPFRDRGKFKNTACDICGKTFACQSALDIHYRSHTKERPFICTVCNRGFSTKGNLKQHMLTHQMRDLPSQLFEPSSNLGPNQNSAVIPANSLSSLIKTEVNGFVHVSPQDSKDTPTSHVPSGPLSSSATSPVLLPALPRRTPKQHYCNTCGKTFSSSSALQIHERTHTGEKPFACTICGRAFTTKGNLKVHMGTHMWNSTPARRGRRLSVDGPMTFLGGNPVKFPEMFQKDLAARSGSGDPSSFWNQYAAALSNGLAMKANEISVIQNGGIPPIPGSLGSGNSSPVSGLTGNLERLQNSEPNAPLAGLEKMASSENGTNFRFTRFVEDSKEIVTS

SEQ ID NO: 62599 - protein, 147 aa, Homo sapiens
MVHMGTHMWNSTPARRGRRLSVDGPMTFLGGNPVKFPEMFQKDLAARSGSGDPSSFWNQYAAALSNGLAMKANEISVIQNGGIPPIPGSLGSGNSSPVSGLTGNLERLQNSEPNAPLAGLEKMASSENGTNFRFTRFVEDSKEIVTS

SEQ ID NO: 62600 - protein, 1007 aa, Homo sapiens
MSRRKQRKPQQLISDCEGPSASENGDASEEDHPQVCAKCCAQFTDPTEFLAHQNACSTDPPVMVIIGGQENPNNSSASSEPRPEGHNNPQVMDTEHSNPPDSGSSVPTDPTWGPERRGEESPGHFLVAATGTAAGGGGGLILASPKLGATPLPPESTPAPPPPPPPPPPPGVGSGHLNIPLILEELRVLQQRQIHQMQMTEQICRQVLLLGSLGQTVGAPASPSELPGTGTASSTKPLLPLFSPIKPVQTSKTLASSSSSSSSSSGAETPKQAFFHLYHPLGSQHPFSAGGVGRSHKPTPAPSPALPGSTDQLIASPHLAFPSTTGLLAAQCLGAARGLEATASPGLLKPKNGSGELSYGEVMGPLEKPGGRHKCRFCAKVFGSDSALQIHLRSHTGERPYKCNVCGNRFTTRGNLKVHFHRHREKYPHVQMNPHPVPEHLDYVITSSGLPYGMSVPPEKAEEEAATPGGGVERKPLVASTTALSATESLTLLSTSAGTATAPGLPAFNKFVLMKAVEPKNKADENTPPGSEGSAISGVAESSTATRMQLSKLVTSLPSWALLTNHFKSTGSFPFPYVLEPLGASPSETSKLQQLVEKIDRQGAVAVTSAASGAPTTSAPAPSSSASSGPNQCVICLRVLSCPRALRLHYGQHGGERPFKCKVCGRAFSTRGNLRAHFVGHKASPAARAQNSCPICQKKFTNAVTLQQHVRMHLGGQIPNGGTALPEGGGAAQENGSEQSTVSGAGSFPQQQSQQPSPEEELSEEEEEEDEEEEEDVTDEDSLAGRGSESGGEKAISVRGDSEEASGAEEEVGTVAAAATAGKEMDSNEKTTQQSSLPPPPPPDSLDQPQPMEQGSSGVLGGKEEGGKPERSSSPASALTPEGEATSVTLVEELSLQEAMRKEPGESSSRKACEVCGQAFPSQAALEEHQKTHPKEGPLFTCVFCRQGFLERATLKKHMLLAHHQVQPFAPHGPQNIAALSLVPGCSPSITSTGLSPFPRKDDPTIP

SEQ ID NO: 62601 - protein, 608 aa, Homo sapiens
MSRRKQRKPQQLISDCEGPSASENGDASEEDHPQVCAKCCAQFTDPTEFLAHQNACSTDPPVMVIIGGQENPNNSSASSEPRPEGHNNPQVMDTEHSNPPDSGSSVPTDPTWGPERRGEESPGHFLVAATGTAAGGGGGLILASPKLGATPLPPESTPAPPPPPPPPPPPGVGSGHLNIPLILEELRVLQQRQIHQMQMTEQICRQVLLLGSLGQTVGAPASPSELPGTGTASSTKPLLPLFSPIKPVQTSKTLASSSSSSSSSSGAETPKQAFFHLYHPLGSQHPFSAGGVGRSHKPTPAPSPALPGSTDQLIASPHLAFPSTTGLLAAQCLGAARGLEATASPGLLKPKNGSGELSYGEVMGPLEKPGGRHKCRFCAKVFGSDSALQIHLRSHTGERPYKCNVCGNRFTTRGNLKVHFHRHREKYPHVQMNPHPVPEHLDYVITSSGLPYGMSVPPEKAEEEAATPGGGVERKPLVASTTALSATESLTLLSTSAGTATAPGLPAFNKFVLMKAVEPKNKADENTPPGSEGSAISGVAESSTATRMQLSKLVTSLPSWALLTNHFKSTGSFPFPYVPEEVHQCCHSAAACPDAPGGPDPQRWYCTP

SEQ ID NO: 62602 - protein, 1228 aa, Homo sapiens
MSRRKQAKPQHLKSDEELLPPDGAPEHAAPGEGAEDADSGPESRSGGEETSVCEKCCAEFFKWADFLEHQRSCTKLPPVLIVHEDAPAPPPEDFPEPSPASSPSERAESEAAEEAGAEGAEGEARPVEKEAEPMDAEPAGDTRAPRPPPAAPAPPTPAYGAPSTNVTLEALLSTKVAVAQFSQGARAAGGSGAGGGVAAAAVPLILEQLMALQQQQIHQLQLIEQIRSQVALMQRPPPRPSLSPAAAPSAPGPAPSQLPGLAALPLSAGAPAAAIAGSGPAAPAAFEGAQPLSRPESGASTPGGPAEPSAPAAPSAAPAPAAPAPAPAPQSAASSQPQSASTPPALAPGSLLGAAPGLPSPLLPQTSASGVIFPNPLVSIAATANALDPLSALMKHRKGKPPNVSVFEPKASAEDPFFKHKCRFCAKVFGSDSALQIHLRSHTGERPFKCNICGNRFSTKGNLKVHFQRHKEKYPHIQMNPYPVPEYLDNVPTCSGIPYGMSLPPEKPVTTWLDSKPVLPTVPTSVGLQLPPTVPGAHGYADSPSATPASRSPQRPSPASSECASLSPGLNHVESGVSATAESPQSLLGGPPLTKAEPVSLPCTNARAGDAPVGAQASAAPTSVDGAPTSLGSPGLPAVSEQFKAQFPFGGLLDSMQTSETSKLQQLVENIDKKMTDPNQCVICHRVLSCQSALKMHYRTHTGERPFKCKICGRAFTTKGNLKTHFGVHRAKPPLRVQHSCPICQKKFTNAVVLQQHIRMHMGGQIPNTPLPEGFQDAMDSELAYDDKNAETLSSYDDDMDENSMEDDAELKDAATDPAKPLLSYAGSCPPSPPSVISSIAALENQMKMIDSVMSCQQLTGLKSVENGSGESDRLSNDSSSAVGDLESRSAGSPALSESSSSQALSPAPSNGESFRSKSPGLGAPEEPQEIPLKTERPDSPAAAPGSGGAPGRAGIKEEAPFSLLFLSRERGPSQSTPSLISSAAPTMIKMEVNGHGKAMALGEGPPLPAGVQVPAGPQTVMGPGLAPMLAPPPRRTPKQHNCQSCGKTFSSASALQIHERTHTGEKPFGCTICGRAFTTKGNLKVHMGTHMWNNAPARRGRRLSVENPMALLGGDALKFSEMFQKDLAARAMNVDPSFWNQYAAAITNGLAMKNNEISVIQNGGIPQLPVSLGGSALPPLGSMASGMDKARTGSSPPIVSLDKASSETAASRPFTRFIEDNKEIGIN

SEQ ID NO: 62603 - protein, 1300 aa, Homo sapiens
MSRRKQAKPQHLKSDEELLPPDGAPEHAAPGEGAEDADSGPESRSGGEETSVCEKCCAEFFKWADFLEHQRSCTKLPPVLIVHEDAPAPPPEDFPEPSPASSPSERAESEAAEEAGAEGAEGEARPVEKEAEPMDAEPAGDTRAPRPPPAAPAPPTPAYGAPSTNVTLEALLSTKVAVAQFSQGARAAGGSGAGGGVAAAAVPLILEQLMALQQQQIHQLQLIEQIRSQVALMQRPPPRPSLSPAAAPSAPGPAPSQLPGLAALPLSAGAPAAAIAGSGPAAPAAFEGAQPLSRPESGASTPGGPAEPSAPAAPSAAPAPAAPAPAPAPQSAASSQPQSASTPPALAPGSLLGAAPGLPSPLLPQTSASGVIFPNPLVSIAATANALDPLSALMKHRKGKPPNVSVFEPKASAEDPFFKHKCRFCAKVFGSDSALQIHLRSHTGERPFKCNICGNRFSTKGNLKVHFQRHKEKYPHIQMNPYPVPEYLDNVPTCSGIPYGMSLPPEKPVTTWLDSKPVLPTVPTSVGLQLPPTVPGAHGYADSPSATPASRSPQRPSPASSECASLSPGLNHVESGVSATAESPQSLLGGPPLTKAEPVSLPCTNARAGDAPVGAQASAAPTSVDGAPTSLGSPGLPAVSEQFKAQFPFGGLLDSMQTSETSKLQQLVENIDKKMTDPNQCVICHRVLSCQSALKMHYRTHTGERPFKCKICGRAFTTKGNLKTHFGVHRAKPPLRVQHSCPICQKKFTNAVVLQQHIRMHMGGQIPNTPLPEGFQDAMDSELAYDDKNAETLSSYDDDMDENSMEDDAELKDAATDPAKPLLSYAGSCPPSPPSVISSIAALENQMKMIDSVMSCQQLTGLKSVENGSGESDRLSNDSSSAVGDLESRSAGSPALSESSSSQALSPAPSNGESFRSKSPGLGAPEEPQEIPLKTERPDSPAAAPGSGGAPGRAGIKEEAPFSLLFLSRERGKCPSTVCGVCGKPFACKSALEIHYRSHTKERPFVCALCRRGCSTMGNLKQHLLTHRLKELPSQLFDPNFALGPSQSTPSLISSAAPTMIKMEVNGHGKAMALGEGPPLPAGVQVPAGPQTVMGPGLAPMLAPPPRRTPKQHNCQSCGKTFSSASALQIHERTHTGEKPFGCTICGRAFTTKGNLKVHMGTHMWNNAPARRGRRLSVENPMALLGGDALKFSEMFQKDLAARAMNVDPSFWNQYAAAITNGLAMKNNEISVIQNGGIPQLPVSLGGSALPPLGSMASGMDKARTGSSPPIVSLDKASSETAASRPFTRFIEDNKEIGIN

SEQ ID NO: 62604 - protein, 960 aa, Homo sapiens
MSRRKQAKPQHLKSDEELLPPDGAPEHAAPGEGAEDADSGPESRSGGEETSVCEKCCAEFFKWADFLEHQRSCTKLPPVLIVHEDAPPGLPSPLLPQTSASGVIFPNPLVSIAATANALDPLSALMKHRKGKPPNVSVFEPKASAEDPFFKHKCRFCAKVFGSDSALQIHLRSHTGERPFKCNICGNRFSTKGNLKVHFQRHKEKYPHIQMNPYPVPEYLDNVPTCSGIPYGMSLPPEKPVTTWLDSKPVLPTVPTSVGLQLPPTVPGAHGYADSPSATPASRSPQRPSPASSECASLSPGLNHVESGVSATAESPQSLLGGPPLTKAEPVSLPCTNARAGDAPVGAQASAAPTSVDGAPTSLGSPGLPAVSEQFKAQFPFGGLLDSMQTSETSKLQQLVENIDKKMTDPNQCVICHRVLSCQSALKMHYRTHTGERPFKCKICGRAFTTKGNLKTHFGVHRAKPPLRVQHSCPICQKKFTNAVVLQQHIRMHMGGQIPNTPLPEGFQDAMDSELAYDDKNAETLSSYDDDMDENSMEDDAELKDAATDPAKPLLSYAGSCPPSPPSVISSIAALENQMKMIDSVMSCQQLTGLKSVENGSGESDRLSNDSSSAVGDLESRSAGSPALSESSSSQALSPAPSNGESFRSKSPGLGAPEEPQEIPLKTERPDSPAAAPGSGGAPGRAGIKEEAPFSLLFLSRERGPSQSTPSLISSAAPTMIKMEVNGHGKAMALGEGPPLPAGVQVPAGPQTVMGPGLAPMLAPPPRRTPKQHNCQSCGKTFSSASALQIHERTHTGEKPFGCTICGRAFTTKGNLKVHMGTHMWNNAPARRGRRLSVENPMALLGGDALKFSEMFQKDLAARAMNVDPSFWNQYAAAITNGLAMKNNEISVIQNGGIPQLPVSLGGSALPPLGSMASGMDKARTGSSPPIVSLDKASSETAASRPFTRFIEDNKEIGIN

SEQ ID NO: 62605 - protein, 1053 aa, Homo sapiens
MSRRKQAKPQHINSEEDQGEQQPQQQTPEFADAAPAAPAAGELGAPVNHPGNDEVASEDEATVKRLRREETHVCEKCCAEFFSISEFLEHKKNCTKNPPVLIMNDSEGPVPSEDFSGAVLSHQPTSPGSKDCHRENGGSSEDMKEKPDAESVVYLKTETALPPTPQDISYLAKGKVANTNVTLQALRGTKVAVNQRSADALPAPVPGANSIPWVLEQILCLQQQQLQQIQLTEQIRIQVNMWASHALHSSGAGADTLKTLGSHMSQQVSAAVALLSQKAGSQGLSLDALKQAKLPHANIPSATSSLSPGLAPFTLKPDGTRVLPNVMSRLPSALLPQAPGSVLFQSPFSTVALDTSKKGKGKPPNISAVDVKPKDEAALYKHKCKYCSKVFGTDSSLQIHLRSHTGERPFVCSVCGHRFTTKGNLKVHFHRHPQVKANPQLFAEFQDKVAAGNGIPYALSVPDPIDEPSLSLDSKPVLVTTSVGLPQNLSSGTNPKDLTGGSLPGDLQPGPSPESEGGPTLPGVGPNYNSPRAGGFQGSGTPEPGSETLKLQQLVENIDKATTDPNECLICHRVLSCQSSLKMHYRTHTGERPFQCKICGRAFSTKGNLKTHLGVHRTNTSIKTQHSCPICQKKFTNAVMLQQHIRMHMGGQIPNTPLPENPCDFTGSEPMTVGENGSTGAICHDDVIESIDVEEVSSQEAPSSSSKVPTPLPSIHSASPTLGFAMMASLDAPGKVGPAPFNLQRQGSRENGSVESDGLTNDSSSLMGDQEYQSRSPDILETTSFQALSPANSQAESIKSKSPDAGSKAESSENSRTEMEGRSSLPSTFIRAPPTYVKVEVPGTFVGPSTLSPGMTPLLAAQPRRQAKQHGCTRCGKNFSSASALQIHERTHTGEKPFVCNICGRAFTTKGNLKVHYMTHGANNNSARRGRKLAIENTMALLGTDGKRVSEIFPKEILAPSVNVDPVVWNQYTSMLNGGLAVKTNEISVIQSGGVPTLPVSLGATSVVNNATVSKMDGSQSGISADVEKPSATDGVPKHQFPHFLEENKIAVS

SEQ ID NO: 62606 - protein, 276 aa, Homo sapiens
MSRRKQAKPQHINSEEDQGEQQPQQQTPEFADAAPAAPAAGELGRSSLPSTFIRAPPTYVKVEVPGTFVGPSTLSPGMTPLLAAQPRRQAKQHGCTRCGKNFSSASALQIHERTHTGEKPFVCNICGRAFTTKGNLKVHYMTHGANNNSARRGRKLAIENTMALLGTDGKRVSEIFPKEILAPSVNVDPVVWNQYTSMLNGGLAVKTNEISVIQSGGVPTLPVSLGATSVVNNATVSKMDGSQSGISADVEKPSATDGVPKHQFPHFLEENKIAVS

SEQ ID NO: 62607 - protein, 616 aa, Homo sapiens
MSRRKQAKPQHINSEEDQGEQQPQQQTPEFADAAPAAPAAGELGAPVNHPGNDEVASEDEATVKRLRREETHVCEKCCAEFFSISEFLEHKKNCTKNPPVLIMNDSEGPVPSEDFSGAVLSHQPTSPGSKDCHRENGGSSEDMKEKPDAESVVYLKTETALPPTPQDISYLAKGKVANTNVTLQALRGTKVAVNQRSADALPAPVPGANSIPWVLEQILCLQQQQLQQIQLTEQIRIQVNMWASHALHSSGAGADTLKTLGSHMSQQVSAAVALLSQKAGSQGLSLDALKQAKLPHANIPSATSSLSPGLAPFTLKPDGTRVLPNVMSRLPSALLPQAPGSVLFQSPFSTVALDTSKKGKGKPPNISAVDVKPKDEAALYKHKCRSSLPSTFIRAPPTYVKVEVPGTFVGPSTLSPGMTPLLAAQPRRQAKQHGCTRCGKNFSSASALQIHERTHTGEKPFVCNICGRAFTTKGNLKVHYMTHGANNNSARRGRKLAIENTMALLGTDGKRVSEIFPKEILAPSVNVDPVVWNQYTSMLNGGLAVKTNEISVIQSGGVPTLPVSLGATSVVNNATVSKMDGSQSGISADVEKPSATDGVPKHQFPHFLEENKIAVS

SEQ ID NO: 62608 - protein, 926 aa, Homo sapiens
MVMADGPRHLQRGPVRVGFYDIEGTLGKGNFAVVKLGRHRITKTEVAIKIIDKSQLDAVNLEKIYREVQIMKMLDHPHIIKLYQVMETKSMLYLVTEYAKNGEIFDYLANHGRLNESEARRKFWQILSAVDYCHGRKIVHRDLKAENLLLDNNMNIKIADFGFGNFFKSGELLATWCGSPPYAAPEVFEGQQYEGPQLDIWSMGVVLYVLVCGALPFDGPTLPILRQRVLEGRFRIPYFMSEDCEHLIRRMLVLDPSKRLTIAQIKEHKWMLIEVPVQRPVLYPQEQENEPSIGEFNEQVLRLMHSLGIDQQKTIESLQNKSYNHFAAIYFLLVERLKSHRSSFPVEQRLDGRQRRPSTIAEQTVAKAQTVGLPVTMHSPNMRLLRSALLPQASNVEAFSFPASGCQAEAAFMEEECVDTPKVNGCLLDPVPPVLVRKGCQSLPSNMMETSIDEGLETEGEAEEDPAHAFEAFQSTRSGQRRHTLSEVTNQLVVMPGAGKIFSMNDSPSLDSVDSEYDMGSVQRDLNFLEDNPSLKDIMLANQPSPRMTSPFISLRPTNPAMQALSSQKREVHNRSPVSFREGRRASDTSLTQGIVAFRQHLQNLARTKGILELNKVQLLYEQIGPEADPNLAPAAPQLQDLASSCPQEEVSQQQESVSTLPASVHPQLSPRQSLETQYLQHRLQKPSLLSKAQNTCQLYCKEPPRSLEQQLQEHRLQQKRLFLQKQSQLQAYFNQMQIAESSYPQPSQQLPLPRQETPPPSQQAPPFSLTQPLSPVLEPSSEQMQYSPFLSQYQEMQLQPLPSTSGPRAAPPLPTQLQQQQPPPPPPPPPPRQPGAAPAPLQFSYQTCELPSAASPAPDYPTPCQYPVDGAQQSDLTGPDCPRSPGLQEAPSSYDPLALSELPGLFDCEMLDAVDPQHNGYVLVN

SEQ ID NO: 62609 - protein, 626 aa, Homo sapiens
MQRADSEQPSKRPRCDDSPRTPSNTPSAEADWSPGLELHPDYKTWGPEQVCSFLRRGGFEEPVLLKNIRENEITGALLPCLDESRFENLGVSSLGERKKLLSYIQRLVQIHVDTMKVINDPIHGHIELHPLLVRIIDTPQFQRLRYIKQLGGGYYVFPGASHNRFEHSLGVGYLAGCLVHALGEKQPELQISERDVLCVQIAGLCHDLGHGPFSHMFDGRFIPLARPEVKWTHEQGSVMMFEHLINSNGIKPVMEQYGLIPEEDICFIKEQIVGPLESPVEDSLWPYKGRPENKSFLYEIVSNKRNGIDVDKWDYFARDCHHLGIQNNFDYKRFIKFARVCEVDNELRICARDKEVGNLYDMFHTRNSLHRRAYQHKVGNIIDTMITDAFLKADDYIEITGAGGKKYRISTAIDDMEAYTKLTDNIFLEILYSTDPKLKDAREILKQIEYRNLFKYVGETQPTGQIKIKREDYESLPKEVASAKPKVLLDVKLKAEDFIVDVINMDYGMQEKNPIDHVSFYCKTAPNRAIRITKNQVSQLLPEKFAEQLIRVYCKKVDRKSLYAARQYFVQWCADRNFTKPQDGDVIAPLITPQKKEWNDSTSVQNPTRLREASKSRVQLFKDDPM

SEQ ID NO: 62610 - protein, 170 aa, Homo sapiens
MFDGRFIPLARPEVKWTHEQGSVMMFEHLINSNGIKPVMEQYGLIPEEDICFIKEQIVGPLESPVEDSLWPYKGRPENKSFLYEIVSNKRNGIDVDKWDYFARDCHHLGIQNNFDYKRFIKFARVCEVDNELRICARDKEVGNLYDMFHTRNSLHRRAYQHKVGNIIDTM

SEQ ID NO: 62611 - protein, 441 aa, Homo sapiens
MEIRLDTLSASLGRSSTLNNCNLEDKLAWYEGEAYMWHHWKPFPENPLWTCLDFQIAQVGPWDHCSSCIRHTRLKSSCSDMDLLHSWRSSSFGNFDRFRNNSLSKPDDSTEAHEGDPTNGSGEQSKTSNNGGGLGKKMRAISWTMKKKVGKKYIKALSEEKDEEDGENAHPYRNSDPVIGTHTEKVSLKASDSMDSLYSGQSSSSGITSCSDGTSNRDSFRLDDDGPYSGPFCGRARVHTDFTPSPYDTDSLKIKKGDIIDIICKTPMGMWTGMLNNKVGNFKFIYVDVISEEEAAPKKIKANRRSNSKKSKTLQEFLERIHLQEYTSTLLLNGYETLEDLKDIKESHLIELNIENPDDRRRLLSAAENFLEEEIIQEQENEPEPLSLSSDISLNKSQLDDCPRDSGCYISSGNSDNGKEDLESENLSDMVHKIIITEPSD

SEQ ID NO: 62612 - protein, 205 aa, Homo sapiens
MLKRKPSNVSEKEKHQKPKKGDIIDIICKTPMGMWTGMLNNKVGNFKFIYVDVISEEEAAPKKIKANRRSNSKKSKTLQEFLERIHLQEYTSTLLLNGYETLEDLKDIKESHLIELNIENPDDRRRLLSAAENFLEEEIIQEQENEPEPLSLSSDISLNKSQLDDCPRDSGCYISSGNSDNGKEDLESENLSDMVHKIIITEPSD

SEQ ID NO: 62613 - protein, 373 aa, Homo sapiens
MLKRKPSNVSEKEKHQKPKRSSSFGNFDRFRNNSLSKPDDSTEAHEGDPTNGSGEQSKTSNNGGGLGKKMRAISWTMKKKVGKKYIKALSEEKDEEDGENAHPYRNSDPVIGTHTEKVSLKASDSMDSLYSGQSSSSGITSCSDGTSNRDSFRLDDDGPYSGPFCGRARVHTDFTPSPYDTDSLKIKKGDIIDIICKTPMGMWTGMLNNKVGNFKFIYVDVISEEEAAPKKIKANRRSNSKKSKTLQEFLERIHLQEYTSTLLLNGYETLEDLKDIKESHLIELNIENPDDRRRLLSAAENFLEEEIIQEQENEPEPLSLSSDISLNKSQLDDCPRDSGCYISSGNSDNGKEDLESENLSDMVHKIIITEPSD

SEQ ID NO: 62614 - protein, 335 aa, Homo sapiens
MGSASPGLSSVSPSHLLLPPDTVSRTGLEKAAAGAVGLERRDWSPSPPATPEQGLSAFYLSYFDMLYPEDSSWAAKAPGASSREEPPEEPEQCPVIDSQAPAGSLDLVPGGLTLEEHSLEQVQSMVVGEVLKDIETACKLLNITADPMDWSPSNVQKWLLWTEHQYRLPPMGKAFQELAGKELCAMSEEQFRQRSPLGGDVLHAHLDIWKSAAWMKERTSPGAIHYCASTSEESWTDSEVDSSCSGQPIHLWQFLKELLLKPHSYGRFIRWLNKEKGIFKIEDSAQVARLWGIRKNRPAMNYDKLSRSIRQYYKKGIIRKPDISQRLVYQFVHPI

SEQ ID NO: 62615 - protein, 319 aa, Homo sapiens
MGSASPGLSSVSPSHLLLPPDTVSRTGLEKAAAGAVGLERRDWSPSPPATPEQGLSAFYLSYFDMLYPEDSSWAAKAPGASSREEPPEEPEQCPVIDSQAPAGSLDLVPGGLTLEEHSLEQVQSMVVGEVLKDIETACKLLNITADPMDWSPSNVQKWLLWTEHQYRLPPMGKAFQELAGKELCAMSEEQFRQRSPLGGDVLHAHLDIWKSASTSEESWTDSEVDSSCSGQPIHLWQFLKELLLKPHSYGRFIRWLNKEKGIFKIEDSAQVARLWGIRKNRPAMNYDKLSRSIRQYYKKGIIRKPDISQRLVYQFVHPI

SEQ ID NO: 62616 - protein, 405 aa, Homo sapiens
MAASGKTSKSEPNHVIFKKISRDKSVTIYLGNRDYIDHVSQVQPVDGVVLVDPDLVKGKKVYVTLTCAFRYGQEDIDVIGLTFRRDLYFSRVQVYPPVGAASTPTKLQESLLKKLGSNTYPFLLTFPDYLPCSVMLQPAPQDSGKSCGVDFEVKAFATDSTDAEEDKIPKKSSVRLLIRKVQHAPLEMGPQPRAEAAWQFFMSDKPLHLAVSLNKEIYFHGEPIPVTVTVTNNTEKTVKKIKAFVEQVANVVLYSSDYYVKPVAMEEAQEKVPPNSTLTKTLTLLPLLANNRERRGIALDGKIKHEDTNLASSTIIKEGIDRTVLGILVSYQIKVKLTVSGMTGRQKASEVATEVPFRLMHPQPEDPGQFSYQDANLVFEEFARHNLKDAGEAEEGKRDKNDVDE

SEQ ID NO: 62617 - protein, 405 aa, Homo sapiens
MAASGKTSKSEPNHVIFKKISRDKSVTIYLGNRDYIDHVSQVQPVDGVVLVDPDLVKGKKVYVTLTCAFRYGQEDIDVIGLTFRRDLYFSRVQVYPPVGAASTPTKLQESLLKKLGSNTYPFLLTFPDYLPCSVMLQPAPQDSGKSCGVDFEVKAFATDSTDAEEDKIPKKSSVRLLIRKVQHAPLEMGPQPRAEAAWQFFMSDKPLHLAVSLNKEIYFHGEPIPVTVTVTNNTEKTVKKIKAFVEQVANVVLYSSDYYVKPVAMEEAQEKVPPNSTLTKTLTLLPLLANNRERRGIALDGKIKHEDTNLASSTIIKEGIDRTVLGILVSYQIKVKLTVSGFLGELTSSEVATEVPFRLMHPQPEDPAKESYQDANLVFEEFARHNLKDAGEAEEGKRDKNDVDE

SEQ ID NO: 62618 - protein, 169 aa, Homo sapiens
MAASGKTSKSEPNHVIFKKISRDKSVTIYLGNRDYIDHVSQVQPVDGVVLVDPDLVKGKKVYVTLTCAFRYGQEDIDVIGLTFRRDLYFSRVQVYPPVGAASTPTKLQESLLKKLGSNTYPFLLTFPDYLPCSVMLQPAPQDSGKSCGVDFEVKAFATDSTDAEEDKIP

SEQ ID NO: 62619 - protein, 235 aa, Homo sapiens
MLQPAPQDSGKSCGVDFEVKAFATDSTDAEEDKIPKKSSVRLLIRKVQHAPLEMGPQPRAEAAWQFFMSDKPLHLAVSLNKEIYFHGEPIPVTVTVTNNTEKTVKKIKAFVEQVANVVLYSSDYYVKPVAMEEAQEKVPPNSTLTKTLTLLPLLANNRERRGIALDGKIKHEDTNLASSTIIKEGIDRTVLGILVSYQIKVKLTVSGFLGELTSSEVATEVPFRLMHPQPEDPGK

SEQ ID NO: 62620 - protein, 67 aa, Homo sapiens
MAASGKTSKSEPNHVIFKKISRDKSVSGAQVTIYLGNRDYIDHVSQVQPVDGVVLVDPDLVKGKKVS

SEQ ID NO: 62621 - protein, 210 aa, Homo sapiens
MATETVELHKLKLAELKQECLARGLETKGIKQDLIHRLQAYLEEHAEEEANEEDVLGDETEEEETKPIELPVKEEEPPEKTVDVAAEKKVVKITSEIPQTERMQKRAERFNVPVSLESKKAARAARFGISSVPTKGLSSDNKPMVNLDKLKERAQRFGLNVSSISRKSEDDEKLKKRKERFGIVTSSAGTGTTEDTEAKKRKRAERFGIA

SEQ ID NO: 62622 - protein, 150 aa, Homo sapiens
MEEETKPIELPVKEEEPPEKTVDVAAEKKVVKITSEIPQTERMQKRAERFNVPVSLESKKAARAARFGISSVPTKGLSSDNKPMVNLDKLKERAQRFGLNVSSISRKSEDDEKLKKRKERFGIVTSSAGTGTTEDTEAKKRKRAERFGIA

SEQ ID NO: 62623 - protein, 210 aa, Homo sapiens; identical to SEQ ID NO: 62621

SEQ ID NO: 62624 - protein, 292 aa, Homo sapiens
MAGKKNVLSSLAVYAEDSEPESDGEAGIEAVGSAAEEKGGLVSDAYGEDDFSRLGGDEDGYEEEEDENSRQSDNTEAEKRDPQELVASFSERVRNMSPDEIKIPPEPPGRCSNHLQDKIQKLYERKIKEGMDMNYIIQRKKEFRNPSIYEKLIQFCAIDELGTNYPKDMFDPHGWSEDSYYEALAKAQKIEMDKLEKAKKERTKIEFVTGTKKGTTTNATSTTTTTASTAVADAQKRKSKWDSAIPVTTIAQPTILTTTATLPAVVTVTTSASGSKTTVISAVGTIVKKAKQ

SEQ ID NO: 62625 - protein, 308 aa, Homo sapiens
MAGKKNVLSSLAVYAEDSEPESDGEAGIEAVGSAAEEKGGLVSDAYGEDDFSRLGGDEDGYEEEEDENSRQSEDDDSETEKPEADDPKDNTEAEKRDPQELVASFSERVRNMSPDEIKIPPEPPGRCSNHLQDKIQKLYERKIKEGMDMNYIIQRKKEFRNPSIYEKLIQFCAIDELGTNYPKDMFDPHGWSEDSYYEALAKAQKIEMDKLEKAKKERTKIEFVTGTKKGTTTNATSTTTTTASTAVADAQKRKSKWDSAIPVTTIAQPTILTTTATLPAVVTVTTSASGSKTTVISAVGTIVKKAKQ

SEQ ID NO: 62626 - protein, 168 aa, Homo sapiens
MAGKKNVLSSLAVYAEDSEPESDGEAGIEAVGSAAEEKGGLVSDAYGEDDFSRLGGDEDGYEEEEDENSRQSEDDDSETEKPEADDPKDNTEAEKRDPQELVASFSERVRNMSPDEIKIPPEPPGRCSNHLQDKIQKLYERKIKEGMDMNYIIQRKKEFRNPSQGPEN

SEQ ID NO: 62627 - protein, 308 aa, Homo sapiens; identical to SEQ ID NO: 62625

SEQ ID NO: 62628 - protein, 121 aa, Homo sapiens
MSFIFEWIYNGFSSVLQFLGLYKKSGKLVFLGLDNAGKTTLLHMLKDDRLGQHVPTLHPTSEELTIAGMTFTTFDLGGHEQARRVWKNYLPAINGIVFLVDCADHSRLVESKVELNVCFVL

SEQ ID NO: 62629 - protein, 198 aa, Homo sapiens
MSFIFEWIYNGFSSVLQFLGLYKKSGKLVFLGLDNAGKTTLLHMLKDDRLGQHVPTLHPTSEELTIAGMTFTTFDLGGHEQARRVWKNYLPAINGIVFLVDCADHSRLVESKVELNALMTDETISNVPILILGNKIDRTDAISEEKLREIFGLYGQTTGKGNVTLKELNARPMEVFMCSVLKRQGYGEGFRWLSQYID

SEQ ID NO: 62630 - protein, 198 aa, Homo sapiens; identical to SEQ ID NO: 62629

SEQ ID NO: 62631 - protein, 198 aa, Homo sapiens; identical to SEQ ID NO: 62629

SEQ ID NO: 62632 - protein, 198 aa, Homo sapiens; identical to SEQ ID NO: 62629

SEQ ID NO: 62633 - protein, 117 aa, Homo sapiens
MGLSFWWTVQIILASWNPKLSLMIYCSSLLTLAPNALMTDETISNVPILILGNKIDRTDAISEEKLREIFGLYGQTTGKGNVTLKELNARPMEVFMCSVLKRQGYGEGFRWLSQYID

SEQ ID NO: 62634 - protein, 198 aa, Homo sapiens; identical to SEQ ID NO: 62629

SEQ ID NO: 62635 - protein, 115 aa, Homo sapiens
  VARIANT 1: note = MOD_RES - Any amino acid
XSFWWTVQIILASWNPKLSLMIYCSSLLTLAPNALMTDETISNVPILILGNKIDRTDAISEEKLREIFGLYGQTTGKGNVTLKELNARPMEVFMCSVLKRQGYGEGFRWLSQYID

SEQ ID NO: 62636 - protein, 155 aa, Homo sapiens
MLKDDRLGQHVPTLHPTSEELTIAGMTFTTFDLGGHEQARRVWKNYLPAINGIVFLVDCADHSRLVESKVELNALMTDETISNVPILILGNKIDRTDAISEEKLREIFGLYGQTTGKGNVTLKELNARPMEVFMCSVLKRQGYGEGFRWLSQYID

SEQ ID NO: 62637 - protein, 130 aa, Homo sapiens
MTFTTFDLGGHVQARRVWKNYLPAINGIVFLVDCADHERLLESKEELDSLMTDETIANVPILILGNKIDRPEAISEERLREMFGLYGQTTGKGSISLKELNARPLEVFMCSVLKRQGYGEGFRWMAQYID

SEQ ID NO: 62638 - protein, 198 aa, Homo sapiens
MSFIFDWIYSGFSSVLQFLGLYKKTGKLVFLGLDNAGKTTLLHMLKDDRLGQHVPTLHPTSEELTIAGMTFTTFDLGGHVQARRVWKNYLPAINGIVFLVDCADHERLLESKEELDSLMTDETIANVPILILGNKIDRPEAISEERLREMFGLYGQTTGKGSISLKELNARPLEVFMCSVLKRQGYGEGFRWMAQYID

SEQ ID NO: 62639 - protein, 198 aa, Homo sapiens; identical to SEQ ID NO: 62638

SEQ ID NO: 62640 - protein, 103 aa, Homo sapiens
MSFIFDWIYSGFSSVLQFLGLYKKTGKLVFLGLDNAGKTTLLHMLKDDRLGQHVPTLHPTSEELTIAGMTFTTFDLGGHVQARRVWKNYLPAINGIVFLVDCA

SEQ ID NO: 62641 - protein, 130 aa, Homo sapiens; identical to SEQ ID NO: 62637

SEQ ID NO: 62642 - protein, 170 aa, Homo sapiens
MSFIFDWIYSGFSSVLQFLGLYKKTGKLVFLGLDNAGKTTLLHMLKDDRLGQHVPTLHPTSEELTIAGMTFTTFDLGGHVQARRVWKNYLPAINGIVFLVDCADHERLLESKEELDSLMTDETIANVPILILGNKIDRPEAISEERLREMFGLYGQTTGKGSISLKELNA

SEQ ID NO: 62643 - protein, 130 aa, Homo sapiens; identical to SEQ ID NO: 62637

SEQ ID NO: 62644 - protein, 130 aa, Homo sapiens; identical to SEQ ID NO: 62637

SEQ ID NO: 62645 - protein, 931 aa, Homo sapiens
MRALVLLGCLLASLLFSGQAELQVSASGGTEDVGNLLENHFSAGDASLEEKERALYADTAPQDKKLLLHYPDGREAESPKKTPASAASAGPDPEASLSNASATESPPPGERDDRDAAGPGEEKNGPPVASALPPGGAKGPVEEEWPEPSSGEGQGEEETGFGLPTEGTASGEAGGQAGGHELPEEVQEVQGDSLVQGAVAGTAEPKAEGASPHSEGDGVGPLNAEAEGSPGPGEEPAVPEGAPDVAAVGGESEPDIDTQASEGTEDQGEPGPAAEASAEPGGAQSVKAGDTEENQSPEMTEEDADEASSEEESGDGSGSEEEGGVPSEEESEEDSGDGASSEEAEGASEEATEPQEAGEPQEAREPQEGGDLQEAEESQEGGDPQEAEEPQEGGAPQEGGEPQEGGDPQEAREPQEAREPQEGAELPEATGTTSHRDRGAQPGPEELNTESMGSETLDMKAEEPEEGHQRESPIIVAQEETEDANEEAPLRDRSHIEKTLMLNEDKPSDDYSAVLQRLRKIYHSSIKPLEQSYKYNELRQHEITDGEITSKPMVLFLGPWSVGKSTMINYLLGLENTRYQLYTGAEPTTSEFTVLMHGPKLKTIEGIVMAADSARSFSPLEKFGQNFLEKLIGIEVPHKLLERVTFVDTPGIIENRKQQERGYPFNDVCQWFIDRADLIFVVFDPTKLDVGLELEMLFRQLKGRESQIRIILNKADNLATQMLMRVYGALFWSLAPLINVTEPPRVYVSSFWPQEYKPDTHQELFLQEEISLLEDLNQVIENRLENKIAFIRQHAIRVRIHALLVDRYLQTYKDKMTFFSDGELVFKDIVEDPDKFYIFKTILAKTNVSKFDLPNREAYKDFFGINPISSFKLLSQQCSYMGGCFLEKIERAITQELPGLLGSLGLGKNPGALNCDKTGCSETPKNRYRKH

SEQ ID NO: 62646 - protein, 473 aa, Homo sapiens
MRALVLLGCLLASLLFSGQAEETEDANEEAPLRDRSHIEKTLMLNEDKPSDDYSAVLQRLRKIYHSSIKPLEQSYKYNELRQHEITDGEITSKPMVLFLGPWSVGKSTMINYLLGLENTRYQLYTGAEPTTSEFTVLMHGPKLKTIEGIVMAADSARSFSPLEKFGQNFLEKLIGIEVPHKLLERVTFVDTPGIIENRKQQERGYPFNDVCQWFIDRADLIFVVFDPTKLDVGLELEMLFRQLKGRESQIRIILNKADNLATQMLMRVYGALFWSLAPLINVTEPPRVYVSSFWPQEYKPDTHQELFLQEEISLLEDLNQVIENRLENKIAFIRQHAIRVRIHALLVDRYLQTYKDKMTFFSDGELVFKDIVEDPDKFYIFKTILAKTNVSKFDLPNREAYKDFFGINPISSFKLLSQQCSYMGGCFLEKIERAITQELPGLLGSLGLGKNPGALNCDKTGCSETPKNRYRKH

SEQ ID NO: 62647 - protein, 431 aa, Homo sapiens
MLNEDKPSDDYSAVLQRLRKIYHSSIKPLEQSYKYNELRQHEITDGEITSKPMVLFLGPWSVGKSTMINYLLGLENTRYQLYTGAEPTTSEFTVLMHGPKLKTIEGIVMAADSARSFSPLEKFGQNFLEKLIGIEVPHKLLERVTFVDTPGIIENRKQQERGYPFNDVCQWFIDRADLIFVVFDPTKLDVGLELEMLFRQLKGRESQIRIILNKADNLATQMLMRVYGALFWSLAPLINVTEPPRVYVSSFWPQEYKPDTHQELFLQEEISLLEDLNQVIENRLENKIAFIRQHAIRVRIHALLVDRYLQTYKDKMTFFSDGELVFKDIVEDPDKFYIFKTILAKTNVSKFDLPNREAYKDFFGINPISSFKLLSQQCSYMGGCFLEKIERAITQELPGLLGSLGLGKNPGALNCDKTGCSETPKNRYRKH

SEQ ID NO: 62648 - protein, 387 aa, Homo sapiens
MAETLFWTPLLVVLLAGLGDTEAQQTTLHPLVGRVFVHTLDHETFLSLPEHVAVPPAVHITYHAHLQGHPDLPRWLRYTQRSPHHPGFLYGSATPEDRGLQVIEVTAYNRDSFDTTRQRLVLEIGDPEGPLLPYQAEFLVRSHDAEEVLPSTPASRFLSALGGLWEPGELQLLNVTSALDRGGRVPLPIEGRKEGVYIKVGSASPFSTCLKMVASPDSHARCAQGQPPLLSCYDTLAPHFRVDWCNVTLVDKSVPEPADEVPTPGDGILEHDPFFCPPTEAPDRDFLVDALVTLLVPLLVALLLTLLLAYVMCCRREGRLKRDLATSDIQMVHHCTIHGNTEELRQMAASREVPRPLSTLPMFNVHTGERLPPRVDSAQVPLILDQH

SEQ ID NO: 62649 - protein, 263 aa, Homo sapiens
MAETLFWTPLLVVLLAGLGDTEAQQTTLHPLVGRVFVHTLDHETFLSLPEHVAVPPAVHITYHAHLQGHPDLPRWLRYTQRSPHHPGFLYGSATPEDRGLQVIEVTAYNRDSFDTTRQRLVLEIGDPEGPLLPYQAEFLVRSHDAEEVLPSTPASRFLSALGGLWEPGELQLLNVTSALDRGGRVPLPIEGRKEGLKRDLATSDIQMVHHCTIHGNTEELRQMAASREVPRPLSTLPMFNVHTGERLPPRVDSAQVPLILDQH

SEQ ID NO: 62650 - protein, 178 aa, Homo sapiens [sequence omitted]

SEQ ID NO: 62651 - protein, 263 aa, Homo sapiens
MAETLFWTPLLVVLLAGLGDTEAQQTTLHPLVGRVFVHTLDHETFLSLPEHVAVPPAVHITYHAHLQGHPDLPRWLRYTQRSPHHPGFLYGSATPEDRGLQVIEVTAYNRDSFDTTRQRLVLEIGDPEGPLLPYQAEFLVRSHDAEEVLPSTPASRFLSALGGLWEPGELQLLNVTSALDRGGRVPLPIEGRKEVLLRHLGTPLIQMVHHCTIHGNTEELRQMAASREVPRPLSTLPMFNVHTGERLPPRVDSAQVPLILDQH

SEQ ID NO: 62652 - protein, 318 aa, Homo sapiens
MAAAAAAAAEQQSSNGPVKKSMREKAVERRSVNKEHNSNFKAGYIPIDEDRLHKTGLRGRKGNLAICVIILLFILAVINLIITLVIWAVIRIGPNGCDSMEFHESGLLRFKQVSDMGVIHPLYKSTVGGRRNENLVITGNNQPIVFQQGTTKLSVENNKTSITSDIGMQFFDPRTQNILFSTDYETHEFHLPSGVKSLNVQKASTERITSNATSDLNIKVDGRAIVRGNEGVFIMGKTIEFHMGGNMELKAENSIILNGSVMVSTTRLPSSSSGDQLGSGDWVRYKLCMCADGTLFKVQVTSQNMGCQISDNPCGNTH

SEQ ID NO: 62653 - protein, 248 aa, Homo sapiens
MAAAAAAAAEQITLVIWAVIRIGPNGCDSMEFHESGLLRFKQVSDMGVIHPLYKSTVGGRRNENLVITGNNQPIVFQQGTTKLSVENNKTSITSDIGMQFFDPRTQNILFSTDYETHEFHLPSGVKSLNVQKASTERITSNATSDLNIKVDGRAIVRGNEGVFIMGKTIEFHMGGNMELKAENSIILNGSVMVSTTRLPSSSSGDQLGSGDWVRYKLCMCADGTLFKVQVTSQNMGCQISDNPCGNTH

SEQ ID NO: 62654 - protein, 290 aa, Homo sapiens
MMPQEQYTHHRSTMPGSVGPQVYKVGIYGWRKRCLYFFVLLLMILILVNLAMTIWILKVMNFTIDGMGNLRITEKGLKLEGDSEFLQPLYAKEIQSRPGNALYFKSARNVTVNILNDQTKVLTQLITGPKAVEAYGKKFEVKTVSGKLLFSADNNEVVVGAERLRVLGAEGTVFPKSIETPNVRADPFKELRLESPTRSLVMEAPKGVEINAEAGNMEATCRTELRLESKDGEIKLDAAKIRLPRLPHGSYTPTGTRQKVFEICVCANGRLFLSQAGAGSTCQINTSVCL

SEQ ID NO: 62655 - protein, 289 aa, Homo sapiens
MPQEQYTHHRSTMPGSVGPQVYKVGIYGWRKRCLYFFVLLLMILILVNLAMTIWILKVMNFTIDGMGNLRITEKGLKLEGDSEFLQPLYAKEIQSRPGNALYFKSARNVTVNILNDQTKVLTQLITGPKAVEAYGKKFEVKTVSGKLLFSADNNEVVVGAERLRVLGAEGTVFPKSIETPNVRADPFKELRLESPTRSLVMEAPKGVEINAEAGNMEATCRTELRLESKDGEIKLDAAKIRLPRLPHGSYTPTGTRQKVFEICVCANGRLFLSQAGAGSTCQINTSVCL

SEQ ID NO: 62656 - protein, 256 aa, Homo sapiens
MMPQEQYTHHRSTMPGSVGPQVYKVGIYGWRKRCLYFFVLLLMILILVNLAMTIWILKVMNFTIDGMGNLRITEKGLKLEGDSEFLQPLYAKEIQSRPGNALYFKSARNVTVNILNDQTKVLTQLITGPKAVEAYGKKFEVKTVSGKLLFSADNNEVVVGAERLRVLGAEGTVFPKSIETPNVRADPFKELRLESPTRSLVMEAPKGVEINAEAGNMEATCRTELRLESKDGEVRDEKDRSSKSYSFNRPTLPITG

SEQ ID NO: 62657 - protein, 256 aa, Homo sapiens; identical to SEQ ID NO: 62656

SEQ ID NO: 62658 - protein, 437 aa, Homo sapiens
MQLPRWWELGDPCAWTGQGRGTRRMSPATTGTFLLTVYSIFSKVHSDRNVYPSAGVLFVHVLEREYFKGEFPPYPKPGEISNDPITFNTNLMGYPDRPGWLRYIQRTPYSDGVLYGSPTAENVGKPTIIEITAYNRRTFETARHNLIINIMSAEDFPLPYQAEFFIKNMNVEEMLASEVLGDFLGAVKNVWQPERLNAINITSALDRGGRVPLPINDLKEGVYVMVGADVPFSSCLREVENPQNQLRCSQEMEPVITCDKKFRTQFYIDWCKISLVDKTKQVSTYQEVIRGEGILPDGGEYKPPSDSLKSRDYYTDFLITLAVPSAVALVLFLILAYIMCCRREGVEKRNMQTPDIQLVHHSAIQKSTKELRDMSKNREIAWPLSTLPVFHPVTGEIIPPLHTDNYDSTNMPLMQTQQNLPHQTQIPQQQTTGKWYP

SEQ ID NO: 62659 - protein, 471 aa, Homo sapiens
MQLPRWWELGDPCAWTGQGRGTRRMSPATTGTFLLTAFLLSCADGINGTVNWKTRQANNFIISRKMAAGMKDVYSIFSKVHSDRNVYPSAGVLFVHVLEREYFKGEFPPYPKPGEISNDPITFNTNLMGYPDRPGWLRYIQRTPYSDGVLYGSPTAENVGKPTIIEITAYNRRTFETARHNLIINIMSAEDFPLPYQAEFFIKNMNVEEMLASEVLGDFLGAVKNVWQPERLNAINITSALDRGGRVPLPINDLKEGVYVMVGADVPFSSCLREVENPQNQLRCSQEMEPVITCDKKFRTQFYIDWCKISLVDKTKQVSTYQEVIRGEGILPDGGEYKPPSDSLKSRDYYTDFLITLAVPSAVALVLFLILAYIMCCRREGVEKRNMQTPDIQLVHHSAIQKSTKELRDMSKNREIAWPLSTLPVFHPVTGEIIPPLHTDNYDSTNMPLMQTQQNLPHQTQIPQQQTTGEC

SEQ ID NO: 62660 - protein, 451 aa, Homo sapiens
MQLPRWWELGDPCAWTGQGRGTRRMSPATTGTFLLTVYSIFSKVHSDRNVYPSAGVLFVHVLEREYFKGEFPPYPKPGEISNDPITFNTNLMGYPDRPGWLRYIQRTPYSDGVLYGSPTAENVGKPTIIEITAYNRRTFETARHNLIINIMSAEDFPLPYQAEFFIKNMNVEEMLASEVLGDFLGAVKNVWQPERLNAINITSALDRGGRVPLPINDLKEGVYVMVGADVPFSSCLREVENPQNQLRCSQEMEPVITCDKKFRTQFYIDWCKISLVDKTKQVSTYQEVIRGEGILPDGGEYKPPSDSLKSRDYYTDFLITLAVPSAVALVLFLILAYIMCCRREGVIQLVHHSAIQKSTKELRDMSKNREIAWPLSTLPVFHPVTGEIIPPLHTDNYDSTNMPLMQTQQNLPHQTQIPQQQTTGDFRLTTFQRFEVNGIPEERKLTEAMNL

SEQ ID NO: 62661 - protein, 462 aa, Homo sapiens
MQLPRWWELGDPCAWTGQGRGTRRMSPATTGTFLLTVYSIFSKVHSDRNVYPSAGVLFVHVLEREYFKGEFPPYPKPGEISNDPITFNTNLMGYPDRPGWLRYIQRTPYSDGVLYGSPTAENVGKPTIIEITAYNRRTFETARHNLIINIMSAEDFPLPYQAEFFIKNMNVEEMLASEVLGDFLGAVKNVWQPERLNAINITSALDRGGRVPLPINDLKEGVYVMVGADVPFSSCLREVENPQNQLRCSQEMEPVITCDKKFRTQFYIDWCKISLVDKTKQVSTYQEVIRGEGILPDGGEYKPPSDSLKSRDYYTDFLITLAVPSAVALVLFLILAYIMCCRREGVEKRNMQTPDIQLVHHSAIQKSTKELRDMSKNREIAWPLSTLPVFHPVTGEIIPPLHTDNYDSTNMPLMQTQQWSFAPVAQAGVQWSDLGSLQPPPPRNLPHQTQIPQQQTTGKWYP

SEQ ID NO: 62662 - protein, 291 aa, Homo sapiens
MVREQYTTATEGICIERPENQYVYKIGIYGWRKRCLYLFVLLLLIILVVNLALTIWILKVMWFSPAGMGHLCVTKDGLRLEGESEFLFPLYAKEIHSRVDSSLLLQSTQNVTVNARNSEGEVTGRLKVGPKMVEVQNQQFQINSNDGKPLFTVDEKEVVVGTDKLRVTGPEGALFEHSVETPLVRADPFQDLRLESPTRSLSMDAPRGVHIQAHAGKIEALSQMDILFHSSDGMLVLDAETVCLPKLVQGTWGPSGSSQSLYEICVCPDGKLYLSVAGVSTTCQEHNHICL

SEQ ID NO: 62663 - protein, 291 aa, Homo sapiens; identical to SEQ ID NO: 62662

SEQ ID NO: 62664 - protein, 291 aa, Homo sapiens; identical to SEQ ID NO: 62662

SEQ ID NO: 62665 - protein, 31 aa, Homo sapiens
MGINTRELFLNFTIVLITVILMWLLVRSYQY

SEQ ID NO: 62666 - protein, 31 aa, Homo sapiens; identical to SEQ ID NO: 62665

SEQ ID NO: 62667 - protein, 31 aa, Homo sapiens; identical to SEQ ID NO: 62665

SEQ ID NO: 62668 - protein, 243 aa, Homo sapiens
MGKNKQPRGQQRQGGPPAADAAGPDDMEPKKGTGAPKECGEEEPRTCCGCRFPLLLALLQLALGIAVTVVGFLMASISSSLLVRDTPFWAGIIVCLVAYLGLFMLCVSYQVDERTCIQFSMKLLYFLLSALGLTVCVLAVAFAAHHYSQLTQFTCETTLDSCQCKLPSSEPLSRTFVYRDVTDCTSVTGTFKLFLLIQMILNLVCGLVCLLACFVMWKHRYQVFYVGVRICSLTASEGPQQKI

SEQ ID NO: 62669 - protein, 140 aa, Homo sapiens
MLCVSYQVDERTCIQFSMKLLYFLLSALGLTVCVLAVAFAAHHYSQLTQFTCETTLDSCQCKLPSSEPLSRTFVYRDVTDCTSVTGTFKLFLLIQMILNLVCGLVCLLACFVMWKHRYQVFYVGVRICSLTASEGPQQKI

SEQ ID NO: 62670 - protein, 217 aa, Homo sapiens
MEPKKGTGAPKECGEEEPRTCCGCRFPLLLALLQLALGIAVTVVGFLMASISSSLLVRDTPFWAGIIVCLVAYLGLFMLCVSYQVDERTCIQFSMKLLYFLLSALGLTVCVLAVAFAAHHYSQLTQFTCETTLDSCQCKLPSSEPLSRTFVYRDVTDCTSVTGTFKLFLLIQMILNLVCGLVCLLACFVMWKHRYQVFYVGVRICSLTASEGPQQKI

SEQ ID NO: 62671 - protein, 128 aa, Homo sapiens
MGKNKQPRGQQRQGGPPAADAAGPDDMEPKKGTGAPKECGEEEPRTCCGCRFPLLLALLQLALGIAVTVVGFLMASISSSLLVRDTPFWAGIIVCLVAYLGLFMLCVSYQVDERTCIQFSMKIHCHDF

SEQ ID NO: 62672 - protein, 120 aa, Homo sapiens
MLCVSYQVDERTCIQFSMKLLYFLLSALGLTVCVLAVAFAAHHYSQLTQFTCETTLDSCQCKLPSSEPLSRTFVYRDVTDCTSVTGTFKLFLLIQMILNLVCGLVCLLACFVMWKHRYQV

SEQ ID NO: 62673 - protein, 140 aa, Homo sapiens; identical to SEQ ID NO: 62669

SEQ ID NO: 62674 - protein, 763 aa, Homo sapiens
MDHLNEATQGKEHSEMSNNVSDPKGPPAKIARLEQNGSPLGRGRLGSTGAKMQGVPLKHSGHLMKTNLRKGTMLPVFCVVEHYENAIEYDCKEEHAEFVLVRKDMLFNQLIEMALLSLGYSHSSAAQAKGLIQVGKWNPVPLSYVTDAPDATVADMLQDVYHVVTLKIQLHSCPKLEDLPPEQWSHTTVRNALKDLLKDMNQSSLAKECPLSQSMISSIVNSTYYANVSAAKCQEFGRWYKHFKKTKDMMVEMDSLSELSQQGANHVNFGQQPVPGNTAEQPPSPAQLSHGSQPSVRTPLPNLHPGLVSTPISPQLVNQQLVMAQLLNQQYAVNRLLAQQSLNQQYLNHPPPVSRSMNKPLEQQVSTNTEVSSEIYQWVRDELKRAGISQAVFARVAFNRTQGLLSEILRKEEDPKTASQSLLVNLRAMQNFLQLPEAERDRIYQDERERSLNAASAMGPAPLISTPPSRPPQVKTATIATERNGKPENNTMNINASIYDEIQQEMKRAKVSQALFAKVAATKSQGWLCELLRWKEDPSPENRTLWENLSMIRRFLSLPQPERDAIYEQESNAVHHHGDRPPHIIHVPAEQIQQQQQQQQQQQQQQQAPPPPQPQQQPQTGPRLPPRQPTVASPAESDEENRQKTRPRTKISVEALGILQSFIQDVGLYPDEEAIQTLSAQLDLPKYTIIKFFQNQRYYLKHHGKLKDNSGLEVDVAEYKEEELLKDLEESVQDKNTNTLFSVKLEEELSVEGNTDINTDLKD

SEQ ID NO: 62675 - protein, 116 aa, Homo sapiens
MDHLNEATQGKEHSEMSNNVSDPKGPPAKIARLEQNGSPLGRGRLGSTGAKMQGVPLKHSGHLMKTNLRKGTMLPVFCVVEHYENAIEYDCKEEHAEFVLVRKDMLFNQLIEMALL

SEQ ID NO: 62676 - protein, 224 aa, Homo sapiens
MDHLNEATQGKEHSEMSNNVSDPKGPPAKIARLEQNGSPLGRGRLGSTGAKMQGVPLKHSGHLMKTNLRKGTMLPVFCVVEHYENAIEYDCKEEHAEFVLVRKDMLFNQLIEMALLSLGYSHSSAAQAKGLIQVGKWNPVPLSYVTDAPDATVADMLQDVYHVVTLKIQLHSCPKLEDLPPEQWSHTTVRNALKDLLKDMNQSSLAKECPLSQSMISSIVNSTY

SEQ ID NO: 62677 - protein, 71 aa, Homo sapiens
MDHLNEATQGKEHSEMSNNVSDPKGPPAKIARLEQNGSPLGRGRLGSTGAKMQGVPLKHSGHLMKTNLRKG

SEQ ID NO: 62678 - protein, 8 aa, Homo sapiens
MDHLNEAT

SEQ ID NO: 62679 - protein, 172 aa, Homo sapiens
MDHLNEATQGKEHSEMSNNVSDPKGPPAKIARLEQNGSPLGRGRLGSTGAKMQGVPLKHSGHLMKTNLRKGTMLPVFCVVEHYENAIEYDCKEEHAEFVLVRKDMLFNQLIEMALLSLGYSHSSAAQAKGLIQVGKWNPVPLSYVTDAPDATVADMLQDVYHVVTLKIQLHR

SEQ ID NO: 62680 - protein, 763 aa, Homo sapiens; identical to SEQ ID NO: 62674

SEQ ID NO: 62681 - protein, 130 aa, Homo sapiens
MDHLNEATQGKEHSEMSNNVSDPKGPPAKIARLEQNGSPLGRGRLGSTGAKMQGVPLKHSGHLMKTNLRKGTMLPVFCVVEHYENAIEYDCKEEHAEFVLVRKDMLFNQLIEMALLSLGYSHSSAAQAKG

SEQ ID NO: 62682 - protein, 795 aa, Homo sapiens
MDHLNEATQGKEHSEMSNNVSDPKGPPAKIARLEQNGSPLGRGRLGSTGAKMQGVPLKHSGHLMKTNLRKGTMLPVFCVVEHYENAIEYDCKEEHAEFVLVRKDMLFNQLIEMALLSLGYSHSSAAQAKGLIQVGKWNPVPLSYVTDAPDATVADMLQDVYHVVTLKIQLHSCPKLEDLPPEQWSHTTVRNALKDLLKDMNQSSLAKECPLSQSMISSIVNSTYYANVSAAKCQEFGRWYKHFKKTKDMMVEMDSLSELSQQGANHVNFGQQPVPGNTAEQPPSPAQLSHGSQPSVRTPLPNLHPGLVSTPISPQLVNQQLVMAQLLNQQYAVNRLLAQQSLNQQYLNHPPPVSRSMNKPLEQQVSTNTEVSSEIYQWVRDELKRAGISQAVFARVAFNRTQGLLSEILRKEEDPKTASQSLLVNLRAMQNFLQLPEAERDRIYQDERERSLNAASAMGPAPLISTPPSRPPQVKTATIATERNGKPENNTMNINASIYDEIQQEMKRAKVSQALFAKVAATKSQGWLCELLRWKEDPSPENRTLWENLSMIRRFLSLPQPERDAIYEQESNAVHHHGDRPPHIIHVPAEQIQSPSPTTLGKGESRGVFLPGLPTPAPWLGAAPQQQQQQQQQQQQQQQAPPPPQPQQQPQTGPRLPPRQPTVASPAESDEENRQKTRPRTKISVEALGILQSFIQDVGLYPDEEAIQTLSAQLDLPKYTIIKFFQNQRYYLKHHGKLKDNSGLEVDVAEYKEEELLKDLEESVQDKNTNTLFSVKLEEELSVEGNTDINTDLKD

SEQ ID NO: 62683 - protein, 733 aa, Homo sapiens
MERRSESPCLRDSPDRRSGSPDVKGPPPVKVARLEQNGSPMGARGRPNGAVAKAVGGLMIPVFCVVEQLDGSLEYDNREEHAEFVLVRKDVLFSQLVETALLALGYSHSSAAQAQGIIKLGRWNPLPLSYVTDAPDATVADMLQDVYHVVTLKIQLQSCSKLEDLPAEQWNHATVRNALKELLKEMNQSTLAKECPLSQSMISSIVNSTYYANVSATKCQEFGRWYKKYKKIKVERVERENLSDYCVLGQRPMHLPNMNQLASLGKTNEQSPHSQIHHSTPIRNQVPALQPIMSPGLLSPQLSPQLVRQQIAMAHLINQQIAVSRLLAHQHPQAINQQFLNHPPIPRAVKPEPTNSSVEVSPDIYQQVRDELKRASVSQAVFARVAFNRTQGLLSEILRKEEDPRTASQSLLVNLRAMQNFLNLPEVERDRIYQDERERSMNPNVSMVSSASSSPSSSRTPQAKTSTPTTDLPIKVDGANINITAAIYDEIQQEMKRAKVSQALFAKVAANKSQGWLCELLRWKENPSPENRTLWENLCTIRRFLNLPQHERDVIYEEESRHHHSERMQHVVQLPPEPVQVLHRQQSQPAKESSPPREEAPPPPPPTEDSCAKKPRSRTKISLEALGILQSFIHDVGLYPDQEAIHTLSAQLDLPKHTIIKFFQNQRYHVKHHGKLKEHLGSAVDVAEYKDEELLTESEENDSEEGSEEMYKVEAEEENADKSKAAPAEIDQR

SEQ ID NO: 62684 - protein, 733 aa, Homo sapiens; identical to SEQ ID NO: 62683

SEQ ID NO: 62685 - protein, 615 aa, Homo sapiens
MERRSESPCLRDSPDRRSGSPDVKGPPPVKVARLEQNGSPMGARGRPNGAVAKAVGGLMIPVFCVVEQLDGSLEYDNREEHAEFVLVRKDVLFSQLVETALLALGYSHSSAAQAQVERVERENLSDYCVLGQRPMHLPNMNQLASLGKTNEQSPHSQIHHSTPIRNQVPALQPIMSPGLLSPQLSPQLVRQQIAMAHLINQQIAVSRLLAHQHPQAINQQFLNHPPIPRAVKPEPTNSSVEVSPDIYQQVRDELKRASVSQAVFARVAFNRTQGLLSEILRKEEDPRTASQSLLVNLRAMQNFLNLPEVERDRIYQDERERSMNPNVSMVSSASSSPSSSRTPQAKTSTPTTDLPIKVDGANINITAAIYDEIQQEMKRAKVSQALFAKVAANKSQGWLCELLRWKENPSPENRTLWENLCTIRRFLNLPQHERDVIYEEESRHHHSERMQHVVQLPPEPVQVLHRQQSQPAKESSPPREEAPPPPPPTEDSCAKKPRSRTKISLEALGILQSFIHDVGLYPDQEAIHTLSAQLDLPKHTIIKFFQNQRYHVKHHGKLKEHLGSAVDVAEYKDEELLTESEENDSEEGSEEMYKVEAEEENADKSKAAPAEIDQR

SEQ ID NO: 62686 - protein, 733 aa, Homo sapiens; identical to SEQ ID NO: 62683

SEQ ID NO: 62687 - protein, 915 aa, Homo sapiens
MAETLSGLGDSGAAGAAALSSASSETGTRRLSDLRVIDLRAELRKRNVDSSGNKSVLMERLKKAIEDEGGNPDEIEITSEGNKKTSKRSSKGRKPEEEGVEDNGLEENSGDGQEDVETSLENLQDIDIMDISVLDEAEIDNGSVADCVEDDDADNLQESLSDSRELVEGEMKELPEQLQEHAIEDKETINNLDTSSSDFTILQEIEEPSLEPENEKILDILGETCKSEPVKEESSELEQPFAQDTSSVGPDRKLAEEEDLFDSAHPEEGDLDLASESTAHAQSSKADSLLAVVKREPAEQPGDGERTDCEPVGLEPAVEQSSAASELAEASSEELAEAPTEAPSPEARDSKEDGRKFDFDACNEVPPAPKESSTSEGADQKMSSPEDDSDTKRLSKEEKGRSSCGRNFWVSGLSSTTRATDLKNLFSKYGKVVGAKVVTNARSPGARCYGFVTMSTAEEATKCINHLHKTELHGKMISVEKAKNEPVGKKTSDKRDSDGKKEKSSNSDRSTNLKRDDKCDRKDDAKKGDDGSGEKSKDQDDQKPGPSERSRATKSGSRGTERTVVMDKSKGVPVISVKTSGSKERASKSQDRKSASREKRSVVSFDKVKEPRKSRDSESHSRVRERSEREQRMQAQWEREERERLEIARERLAFQRQRLERERMERERLERERMHVEHERRREQERIHREREELRRQQELRYEQERRPAVRRPYDLDRRDDAYWPEAKRAALDERYHSDFNRQDRFHDFDHRDRGRYPDHSVDRREGSRSMMGEREGQHYPERHGGPERHGRDSRDGWGGYGSDKRMSEGRGLPPPPRRDWGDHGRREDDRSWQGTADGGMMDRDHKRWQGGERSMSGHSGPGHMMNRGGMSGRGSFAPGGASRGHPIPHGGMQGGFGGQSRGSRPSDARFTRRY

SEQ ID NO: 62688 - protein, 747 aa, Homo sapiens
MKELPEQLQEHAIEDKETINNLDTSSSDFTILQEIEEPSLEPENEKILDILGETCKSEPVKEESSELEQPFAQDTSSVGPDRKLAEEEDLFDSAHPEEGDLDLASESTAHAQSSKADSLLAVVKREPAEQPGDGERTDCEPVGLEPAVEQSSAASELAEASSEELAEAPTEAPSPEARDSKEDGRKFDFDACNEVPPAPKESSTSEGADQKMSSPEDDSDTKRLSKEEKGRSSCGRNFWVSGLSSTTRATDLKNLFSKYGKVVGAKVVTNARSPGARCYGFVTMSTAEEATKCINHLHKTELHGKMISVEKAKNEPVGKKTSDKRDSDGKKEKSSNSDRSTNLKRDDKCDRKDDAKKGDDGSGEKSKDQDDQKPGPSERSRATKSGSRGTERTVVMDKSKGVPVISVKTSGSKERASKSQDRKSASREKRSVVSFDKVKEPRKSRDSESHSRVRERSEREQRMQAQWEREERERLEIARERLAFQRQRLERERMERERLERERMHVEHERRREQERIHREREELRRQQELRYEQERRPAVRRPYDLDRRDDAYWPEAKRAALDERYHSDFNRQDRFHDFDHRDRGRYPDHSVDRREGSRSMMGEREGQHYPERHGGPERHGRDSRDGWGGYGSDKRMSEGRGLPPPPRGRRDWGDHGRREDDRSWQGTADGGMMDRDHKRWQGGERSMSGHSGPGHMMNRGGMSGRGSFAPGGASRGHPIPHGGMQGGFGGQSRGSRPSDARFTRRY

SEQ ID NO: 62689 - protein, 848 aa, Homo sapiens
MAETLSGLGDSGAAGAAALSSASSETGTRRLSDLRVIDLRAELRKRNVDSSGNKSVLMERLKKAIEDEGGNPDEIEITSEGNKKTSKRSSKGRKPEEEGVEDNGLEENSGDGQIEDKETINNLDTSSSDFTILQEIEEPSLEPENEKILDILGETCKSEPVKEESSELEQPFAQDTSSVGPDRKLAEEEDLFDSAHPEEGDLDLASESTAHAQSSKADSLLAVVKREPAEQPGDGERTDCEPVGLEPAVEQSSAASELAEASSEELAEAPTEAPSPEARDSKEDGRKFDFDACNEVPPAPKESSTSEGADQKMSSPEDDSDTKRLSKEEKGRSSCGRNFWVSGLSSTTRATDLKNLFSKYGKVVGAKVVTNARSPGARCYGFVTMSTAEEATKCINHLHKTELHGKMISVEKAKNEPVGKKTSDKRDSDGKKEKSSNSDRSTNLKRDDKCDRKDDAKKGDDGSGEKSKDQDDQKPGPSERSRATKSGSRGTERTVVMDKSKGVPVISVKTSGSKERASKSQDRKSASREKRSVVSFDKVKEPRKSRDSESHSRVRERSEREQRMQAQWEREERERLEIARERLAFQRQRLERERMERERLERERMHVEHERRREQERIHREREELRRQQELRYEQERRPAVRRPYDLDRRDDAYWPEAKRAALDERYHSDFNRQDRFHDFDHRDRGRYPDHSVDRREGSRSMMGEREGQHYPERHGGPERHGRDSRDGWGGYGSDKRMSEGRGLPPPPRGRRDWGDHGRREDDRSWQGTADGGMMDRDHKRWQGGERSMSGHSGPGHMMNRGGMSGRGSFAPGGASRGHPIPHGGMQGGFGGQSRGSRPSDARFTRRY

SEQ ID NO: 62690 - protein, 759 aa, Homo sapiens
MKVVILTKLKLPPRETRKHQRGLAKIEDKETINNLDTSSSDFTILQEIEEPSLEPENEKILDILGETCKSEPVKEESSELEQPFAQDTSSVGPDRKLAEEEDLFDSAHPEEGDLDLASESTAHAQSSKADSLLAVVKREPAEQPGDGERTDCEPVGLEPAVEQSSAASELAEASSEELAEAPTEAPSPEARDSKEDGRKFDFDACNEVPPAPKESSTSEGADQKMSSPEDDSDTKRLSKEEKGRSSCGRNFWVSGLSSTTRATDLKNLFSKYGKVVGAKVVTNARSPGARCYGFVTMSTAEEATKCINHLHKTELHGKMISVEKAKNEPVGKKTSDKRDSDGKKEKSSNSDRSTNLKRDDKCDRKDDAKKGDDGSGEKSKDQDDQKPGPSERSRATKSGSRGTERTVVMDKSKGVPVISVKTSGSKERASKSQDRKSASREKRSVVSFDKVKEPRKSRDSESHRVRERSEREQRMQAQWEREERERLEIARERLAFQRQRLERERMERERLERERMHVEHERRREQERIHREREELRRQQELRYEQERRPAVRRPYDLDRRDDAYWPEAKRAALDERYHSDFNRQDRFHDFDHRDRGRYPDHSVDRREGSRSMMGEREGQHYPERHGGPERHGRDSRDGWGGYGSDKRMSEGRGLPPPPRGRRDWGDHGRREDDRSWQGTADGGMMDRDHKRWQGGERSMSGHSGPGHMMNRGGMSGRGSFAPGGASRGHPIPHGGMQGGFGGQSRGSRPSDARFTRRY

SEQ ID NO: 62691 - protein, 812 aa, Homo sapiens
MAETLSGLGDSGAAGAAALSSASSETGTRRLSDLRVIDLRAELRKRNVDSSGNKSVLMERLKKAIEDEGGNPDEIEITSEGNKKTSKRSSKGRKPEEEGVEDNGLEPENEKILDILGETCKSEPVKEESSELEQPFAQDTSSVGPDRKLAEEEDLFDSAHPEEGDLDLASESTAHAQSSKADSLLAVVKREPAEQPGDGERTDCEPVGLEPAVEQSSAASELAEASSEELAEAPTEAPSPEARDSKEDGRKFDFDACNEVPPAPKESSTSEGADQKMSSPEDDSDTKRLSKEEKGRSSCGRNFWVSGLSSTTRATDLKNLFSKYGKVVGAKVVTNARSPGARCYGFVTMSTAEEATKCINHLHKTELHGKMISVEKAKNEPVGKKTSDKRDSDGKKEKSSNSDRSTNLKRDDKCDRKDDAKKGDDGSGEKSKDQDDQKPGPSERSRATKSGSRGTERTVVMDKSKGVPVISVKTSGSKERASKSQDRKSASREKRSVVSFDKVKEPRKSRDSESHSRVRERSEREQRMQAQWEREERERLEIARERLAFQRQRLERERMERERLERERMHVEHERRREQERIHREREELRRQQELRYEQERRPAVRRPYDLDRRDDAYWPEAKRAALDERYHSDFNRQDRFHDFDHRDRGRYPDHSVDRREGSRSMMGEREGQHYPERHGGPERHGRDSRDGWGGYGSDKRMSEGRGLPPPPRGRRDWGDHGRREDDRSWQGTADGGMMDRDHKRWQGGERSMSGHSGPGHMMNRGGMSGRGSFAPGGASRGHPIPHGGMQGGFGGQSRGSRPSDARFTRRY

SEQ ID NO: 62692 - protein, 953 aa, Homo sapiens
MAETLPGSGDSGPGTASLGPGVAETGTRRLSELRVIDLRAELKKRNLDTGGNKSVLMERLKKAVKEEGQDPDEIGIELEATSKKSAKRCVKGLKMEEEGTEDNGLEDDSRDGQEDMEASLENLQNMGMMDMSVLDETEVANSSAPDFGEDGTDGLLDSFCDSKEYVAAQLRQLPAQPPEHAVDGEGFKNTLETSSLNFKVTPDIEESLLEPENEKILDILGETCKSEPVKEESSELEQPFAQDTSSVGPDRKLAEEEDLFDSAHPEEGDLDLASESTAHAQSSKADSLLAVVKREPAEQPGDGERTDCEPVGLEPAVEQSSAASELAEASSEELAEAPTEAPSPEARDSKEDGRKFDFDACNEVPPAPKESSTSEGADQKMSSFKEEKDIKPIIKDEKGRVGSGSGRNLWVSGLSSTTRATDLKNLFSKYGKVVGAKVVTNARSPGARCYGFVTMSTSDEATKCISHLHRTELHGRMISVEKAKNEPAGKKLSDRKECEVKKEKLSSVDRHHSVEIKIEKTVIKKEEKIEKKEEKKPEDIKKEEKDQDELKPGPTNRSRVTKSGSRGMERTVVMDKSKGEPVISVKTTSRSKERSSKSQDRKSESKEKRDILSFDKIKEQRERERQRQREREIRETERRREREQREREQRLEAFHERKEKARLQRERLQLECQRQRLERERMERERLERERMRVERERRKEQERIHREREELRRQQEQLRYEQERRPGRRPYDLDRRDDAYWPEGKRVAMEDRYRADFPRPDHRFHDFDHRDRGQYQDHAIDRREGSRPMMGDHRDGQHYGDDRHGHGGPPERHGRDSRDGWGGYGSDKRLSEGRGLPPPPRGGRDWGEHNQRLEEHQARAWQGAMDAGAASREHARWQGGERGLSGPSGPGHMASRGGVAGRGGFAQGGHSQGHVVPGGGLEGGGVASQDRGSRVPHPHPHPPPYPHFTRRY

SEQ ID NO: 62693 - protein, 510 aa, Homo sapiens
MAETLPGSGDSGPGTASLGPGVAETGTRRLSELRVIDLRAELKKRNLDTGGNKSVLMERLKKAVKEEGQDPDEIGIELEATSKKSAKRCVKGLKMEEEGTEDNGLEDDSRDGQEDMEASLENLQNMGMMDMSVLDETEVANSSAPDFGEDGTDGLLDSFCDSKEYVAAQLRQLPAQPPEHAVGNLETRQDVPTSSSLRVSVAAVPVPHLSVENEKILDILGETCKSEPVKEESSELEQPFAQDTSSVGPDRKLAEEEDLFDSAHPEEGDLDLASESTAHAQSSKADSLLAVVKREPAEQPGDGERTDCEPVGLEPAVEQSSAASELAEASSEELAEAPTEAPSPEARDSKEDGRKFDFDACNEVPPAPKESSTSEGADQKMSSFKEEKDIKPIIKDEKGRVGSGSGRNLWVSGLSSTTRATDLKNLFSKYGKVVGAKVVTNARSPGARCYGFVTMSTSDEATKCISHLHRTELHGRMISVEKAKNEPAGKKLSDRKECEVKKEKLSSVDR

SEQ ID NO: 62694 - protein, 261 aa, Homo sapiens
MAETLPGSGDSGPGTASLGPGVAETGTRRLSELRVIDLRAELKKRNLDTGGNKSVLMERLKKAVKEEGQDPDEIGIELEATSKKSAKRCVKAPSPEARDSKEDGRKFDFDACNEVPPAPKESSTSEGADQKMSSFKEEKDIKPIIKDEKGRVGSGSGRNLWVSGLSSTTRATDLKNLFSKYGKVVGAKVVTNARSPGARCYGFVTMSTSDEATKCISHLHRTELHGRMISVEKAKNEPAGKKLSDRKECEVKKEKLSSVDR

SEQ ID NO: 62695 - protein, 406 aa, Homo sapiens
MAETLPGSGDSGPGTASLGPGVAETGTRRLSELRVIDLRAELKKRNLDTGGNKSVLMERLKKAVKEEGQDPDEIGIELEATSKKSAKRCVKGLKMEEEGTEDNGLEVENEKILDILGETCKSEPVKEESSELEQPFAQDTSSVGPDRKLAEEEDLFDSAHPEEGDLDLASESTAHAQSSKADSLLAVVKREPAEQPGDGERTDCEPVGLEPAVEQSSAASELAEASSEELAEAPTEAPSPEARDSKEDGRKFDFDACNEVPPAPKESSTSEGADQKMSSFKEEKDIKPIIKDEKGRVGSGSGRNLWVSGLSSTTRATDLKNLFSKYGKVVGAKVVTNARSPGARCYGFVTMSTSDEATKCISHLHRTELHGRMISVEKAKNEPAGKKLSDRKECEVKKEKLSSVDR

SEQ ID NO: 62696 - protein, 201 aa, Homo sapiens
MAETGTRRLSELRVIDLRAELKKRNLDTGGNKSVLMERLKKAVKEEGQDPDEIGIELEATSKKSAKRCVKGLKMEEEGTEDNGLEDDSRDGQEDMEASLENLQNMGMMDMSVLDETEVANSSAPDFGEDGTDGLLDSFCDSKEYVAAQLRQLPAQPPEHAVDGEGFKNTLETSSLNFKVTPDIEESLLEPGTDKRNTTVMV

SEQ ID NO: 62697 - protein, 606 aa, Homo sapiens
MKVRSAGGDGDALCVTEEDLAGDDEDMPTFPCTQKGRPGPRCSRCQKNLSLHTSVRILYLFLALLLVAVAVLASLVFRKVDSLSEDISLTQSIYDKKLVLMQKNLQGLDPKALNNCSFCHEAGQLGPEIRKLQEELEGIQKLLLAQEVQLDQTLQAQEVLSTTSRQISQEMGSCSFSIHQVNQSLGLFLAQVRGWQATTAGLDLSLKDLTQECYDVKAAVHQINFTVGQTSEWIHGIQRKTDEETLTLQKIVTDWQNYTRLFSGLRTTSTKTGEAVKNIQATLGASSQRISQNSESMHDLVLQVMGLQLQLDNISSFLDDHEENMHDLQYHTHYAQNRTVERFESLEGRMASHEIEIGTIFTNINATDNHVHSMLKYLDDVRLSCTLGFHTHAEELYYLNKSVSIMLGTTDLLRERFSLLSARLDLNVRNLSMIVEEMKAVDTQHGEILRNVTILRGAPGPPGPRGFKGDMGVKGPVGGRGPKGDPGSLGPLGPQGPQGQPGEAGPVGERGPVGPRGFPGLKGSKGSFGTGGPRGQPGPKGDIGPPGPEGPPGSPGPSGPQGKPGIAGKTGSPGQRGAMGPKGEPGIQGPPGLPGPPGPPGSQSFY

SEQ ID NO: 62698 - protein, 466 aa, Homo sapiens
MKVRSAGGDGDALCVTEEDLAGDDEDMPTFPCTQKGRPGPRCSRCQKNLSLHTSVRILYLFLALLLVAVAVLASLVFRKVDSLSEDISLTQSIYDKKLVLMQKNLQGLDPKALNNCSFCHEAGQLGPEIRKLQEELEGIQKLLLAQEVQLDQTLQAQEVLSTTSRQISQEMGSCSFSIHQVNQSLGLFLAQVRGWQATTAGLDLSLKDLTQECYDVKAAVHQINFTVGQTSEWIHGIQRKTDEETLTLQKIVTDWQNYTRLFSGLRTTSTKTGEAVKNIQATLGASSQRISQNSESMHDLVLQVMGLQLQLDNISSFLDDHEENMHDLQYHTHYAQNRTVERFESLEGRMASHEIEIGTIFTNINATDNHVHSMLKYLDDVRLSCTLGFHTHAEELYYLNKSVSIMLGTTDLLRERFSLLSARLDLNVRNLSMIVEEMKAVDTQHGEILRNVTILRGHTLFSHNRI

SEQ ID NO: 62699 - protein, 335 aa, Homo sapiens
MGRCCFYTAGTLSLLLLVTSVTLLVARVFQKAVDQSIEKKIVLRNGTEAFDSWEKPPLPVYTQFYFFNVTNPEEILRGETPRVEEVGPYTYRSLDWWITDKCNMINGTDGDSFHPLITKDEVLYVFPSDFCRSVYITFSDYESVQGLPAFRYKVPAEILANTSDNAGFCIPEGNCLGSGVLNVSICKNGAPIIMSFPHFYQADERFVSAIEGMHPNQEDHETFVDINPLTGIILKAAKRFQINIYVKKLDDFVETGDIRTMVFPVMYLNESVHIDKETASRLKSMINTTLIITNIPYIIMALGVFFGLVFTWLACKGQGSMDEGTADERAPLIRT

SEQ ID NO: 62700 - protein, 509 aa, Homo sapiens
MGCSAKARWAAGALGVAGLLCAVLGAVMIVMVPSLIKQQVLKNVRIDPSSLSFNMWKEIPIPFYLSVYFFDVMNPSEILKGEKPQVRERGPYVYREFRHKSNITFNNNDTVSFLEYRTFQFQPSKSHGSESDYIVMPNILVLGAAVMMENKPMTLKLIMTLAFTTLGERAFMNRTVGEIMWGYKDPLVNLINKYFPGMFPFKDKFGLFAELNNSDSGLFTVFTGVQNISRIHLVDKWNGLSKVDFWHSDQCNMINGTSGQMWPPFMTPESSLEFYSPEACRSMKLMYKESGVFEGIPTYRFVAPKTLFANGSIYPPNEGFCPCLESGIQNVSTCRFSAPLFLSHPHFLNADPVLAEAVTGLHPNQEAHSLFLDIHPVTGIPMNCSVKLQLSLYMKSVAGIGQTGKIEPVVLPLLWFAESGAMEGETLHTFYTQLVLMPKVMHYAQYVLLALGCVLLLVPVICQIRSQEKCYLFWSSSKKGSKDKEAIQAYSESLMTSAPKGSVLQEAKL

SEQ ID NO: 62701 - protein, 506 aa, Homo sapiens
MGCSAKARWAAGALGVAGLLCAVLGAVMIVMVPSLIKQQVLKNVRIDPSSLSFNMWKEIPIPFYLSVYFFDVMNPSEILKGEKPQVRERGPYVYREFRHKSNITFNNNDTVSFLEYRTFQFQPSKSHGSESDYIVMPNILVLGAAVMMENKPMTLKLIMTLAFTTLGERAFMNRTVGEIMWGYKDPLVNLINKYFPGMFPFKDKFGLFAELNNSDSGLFTVFTGVQNISRIHLVDKWNGLSKVDFWHSDQCNMINGTSGQMWPPFMTPESSLEFYSPEACRSMKLMYKESGVFEGIPTYRFVAPKTLFANGSIYPPNEGFCPCLESGIQNVSTCRFSAPLFLSHPHFLNADPVLAEAVTGLHPNQEAHSLFLDIHPVTGIPMNCSVKLQLSLYMKSVAGIGQTGKIEPVVLPLLWFAESGAMEGETLHTFYTQLVLMPKVMHYAQYVLLALGCVLLLVPVICQIRSQGPEDTVSQPGLAAGPDRPPSPYTPLLPDSPSGQPPSPTA

SEQ ID NO: 62702 - protein, 409 aa, Homo sapiens
MGCSAKARWAAGALGVAGLLCAVLGAVMIVMVPSLIKQQVLKGAAVMMENKPMTLKLIMTLAFTTLGERAFMNRTVGEIMWGYKDPLVNLINKYFPGMFPFKDKFGLFAELNNSDSGLFTVFTGVQNISRIHLVDKWNGLSKVDFWHSDQCNMINGTSGQMWPPFMTPESSLEFYSPEACRSMKLMYKESGVFEGIPTYRFVAPKTLFANGSIYPPNEGFCPCLESGIQNVSTCRFSAPLFLSHPHFLNADPVLAEAVTGLHPNQEAHSLFLDIHPVTGIPMNCSVKLQLSLYMKSVAGIGQTGKIEPVVLPLLWFAESGAMEGETLHTFYTQLVLMPKVMHYAQYVLLALGCVLLLVPVICQIRSQEKCYLFWSSSKKGSKDKEAIQAYSESLMTSAPKGSVLQEAKL

SEQ ID NO: 62703 - protein, 552 aa, Homo sapiens
MGCSAKARWAAGALGVAGLLCAVLGAVMIVMVPSLIKQQVLKNVRIDPSSLSFNMWKEIPIPFYLSVYFFDVMNPSEILKGEKPQVRERGPYVYREFRHKSNITFNNNDTVSFLEYRTFQFQPSKSHGSESDYIVMPNILVLGAAVMMENKPMTLKLIMTLAFTTLGERAFMNRTVGEIMWGYKDPLVNLINKYFPGMFPFKDKFGLFAELNNSDSGLFTVFTGVQNISRIHLVDKWNGLSKVDFWHSDQCNMINGTSGQMWPPFMTPESSLEFYSPEACRSMKLMYKESGVFEGIPTYRFVAPKTLFANGSIYPPNEGFCPCLESGIQNVSTCRFSAPLFLSHPHFLNADPVLAEAVTGLHPNQEAHSLFLDIHPVTGIPMNCSVKLQLSLYMKSVAGIGQTGKIEPVVLPLLWFAESGAMEGETLHTFYTQLVLMPKVMHYAQYVLLALGCVLLLVPVICQIRSQVGAGQRAARADSHSLACWGKGASDRTLWPTAAWSPPPAAVLRLCRSGSGHCWGLRSTLASFACRVATTLPVLEGLGPSLGGGTGS

SEQ ID NO: 62704 - protein, 516 aa, Homo sapiens [sequence omitted]

SEQ ID NO: 62705 - protein, 512 aa, Homo sapiens
MNVRIDPSSLSFNMWKEIPIPFYLSVYFFDVMNPSEILKGEKPQVRERGPYVYREFRHKSNITFNNNDTVSFLEYRTFQFQPSKSHGSESDYIVMPNILVLGAAVMMENKPMTLKLIMTLAFTTLGERAFMNRTVGEIMWGYKDPLVNLINKYFPGMFPFKDKFGLFAELNNSDSGLFTVFTGVQNISRIHLVDKWNGLSKVDFWHSDQCNMINGTSGQMWPPFMTPESSLEFYSPEACRSMKLMYKESGVFEGIPTYRFVAPKTLFANGSIYPPNEGFCPCLESGIQNVSTCRFSAPLFLSHPHFLNADPVLAEAVTGLHPNQEAHSLFLDIHPVTGIPMNCSVKLQLSLYMKSVAGIGQTGKIEPVVLPLLWFAESGAMEGETLHTFYTQLVLMPKVMHYAQYVLLALGCVLLLVPVICQIRSQVGAGQRAARADSHSLACWGKGASDRTLWPTAAWSPPPAAVLRLCRSGSGHCWGLRSTLASFACRVATTLPVLEGLGPSLGGGTGGL

SEQ ID NO: 62706 - protein, 146 aa, Homo sapiens
MGCSAKARWAAGALGVAGLLCAVLGAVMIVMVPSLIKQQVLKNVRIDPSSLSFNMWKEIPIPFYLSVYFFDVMNPSEILKGEKPQVRERGPYVYREFRHKSNITFNNNDTVSFLEYRTFQFQPSKSHGSESDYIVMPNILVLVRLP

SEQ ID NO: 62707 - protein, 481 aa, Homo sapiens
MGCSAKARWAAGALGVAGLLCAVLGAVMIVMVPSLIKQQVLKNVRIDPSSLSFNMWKEIPIPFYLSVYFFDVMNPSEILKGEKPQVRERGPYVYREFRHKSNITFNNNDTVSFLEYRTFQFQPSKSHGSESDYIVMPNILVLGAAVMMENKPMTLKLIMTLAFTTLGERAFMNRTVGEIMWGYKDPLVNLINKYFPGMFPFKDKFGLFAELNNSDSGLFTVFTGVQNISRIHLVDKWNGLSKVDFWHSDQCNMINGTSGQMWPPFMTPESSLEFYSPEACRSMKLMYKESGVFEGIPTYRFVAPKTLFANGSIYPPNEGFCPCLESGIQNVSTCRFSAPLFLSHPHFLNADPVLAEAVTGLHPNQEAHSLFLDIHPVTGIPMNCSVKLQLSLYMKSVAGIGQTGKIEPVVLPLLWFAESGAMEGETLHTFYTQLVLMPKEKCYLFWSSSKKGSKDKEAIQAYSESLMTSAPKGSVLQEAKL

SEQ ID NO: 62708 - protein, 478 aa, Homo sapiens
MGRCCFYTAGTLSLLLLVTSVTLLVARVFQKAVDQSIEKKIVLRNGTEAFDSWEKPPLPVYTQFYFFNVTNPEEILRGETPRVEEVGPYTYRELRNKANIQFGDNGTTISAVSNKAYVFERDQSVGDPKIDLIRTLNIPVLTVIEWSQVHFLREIIEAMLKAYQQKLFVTHTVDELLWGYKDEILSLIHVFRPDISPYFGLFYEKNGTNDGDYVFLTGEDSYLNFTKIVEWNGKTSLDWWITDKCNMINGTDGDSFHPLITKDEVLYVFPSDFCRSVYITFSDYESVQGLPAFRYKVPAEILANTSDNAGFCIPEGNCLGSGVLNVSICKNGAPIIMSFPHFYQADERFVSAIEGMHPNQEDHETFVDINPLTGIILKAAKRFQINIYVKKLDDFVETGDIRTMVFPVMYLNESVHIDKETASRLKSMINTTLIITNIPYIIMALGVFFGLVFTWLACKGQGSMDEGTADERAPLIRT

SEQ ID NO: 62709 - protein, 569 aa, Homo sapiens
MGLGLLLPLLLLWTRGTQGSELDPKGQHVCVASSPSAELQCCAGWRQKDQECTIPICEGPDACQKDEVCVKPGLCRCKPGFFGAHCSSRCPGQYWGPDCRESCPCHPHGQCEPATGACQCQADRWGARCEFPCACGPHGRCDPATGVCHCEPGWWSSTCRRPCQCNTAAARCEQATGACVCKPGWWGRRCSFRCNCHGSPCEQDSGRCACRPGWWGPECQQQCECVRGRCSAASGECTCPPGFRGARCELPCPAGSHGVQCAHSCGRCKHNEPCSPDTGSCESCEPGWNGTQCQQPCLPGTFGESCEQQCPHCRHGEACEPDTGHCQRCDPGWLGPRCEDPCPTGTFGEDCGSTCPTCVQGSCDTVTGDCVCSAGYWGPSCNASCPAGFHGNNCSVPCECPEGLCHPVSGSCQPGSGSRDTALIAGSLVPLLLLFLGLACCACCCWAPRSDLKDRPARDGATVSRMKLQVWGTLTSLGSTLPCRSLSSHKLPWVTASSSRPLPAGPLMTPSHPILSLERQMRFLPTVCHPKKGWSLWPRQGRQRPAWLQVLSRPLRTPPRHSPSRAPPA

SEQ ID NO: 62710 - protein, 870 aa, Homo sapiens
MEGAGPRGAGPARRRGAGGPPSPLLPSLLLLLLLWMLPDTVAPQELNPRGRNVCRAPGSQVPTCCAGWRQQGDECGIAVCEGNSTCSENEVCVRPGECRCRHGYFGANCDTKCPRQFWGPDCKELCSCHPHGQCEDVTGQCTCHARRWGARCEHACQCQHGTCHPRSGACRCEPGWWGAQCASACYCSATSRCDPQTGACLCHAGWWGRSCNNQCACNSSPCEQQSGRCQCRERTFGARCDRYCQCFRGRCHPVDGTCACEPGYRGKYCREPCPAGFYGLGCRRRCGQCKGQQPCTVAEGRCLTCEPGWNGTKCDQPCATGFYGEGCSHRCPPCRDGHACNHVTGKCTRCNAGWIGDRCETKCSNGTYGEDCAFVCADCGSGHCDFQSGRCLCSPGVHGPHCNVTCPPGLHGADCAQACSCHEDTCDPVTGACHLETNQRKGVMGAGALLVLLVCLLLSLLGCCCACRGKDPTRRPRPRRELSLGRKKAPHRLCGRFSRISMKLPRIPLRRQKLPKVVVAHHDLDNTLNCSFLEPPSGLEQPSPSWSSRASFSSFDTTDEGPVYCVPHEEAPAESRDPEVPTVPAEAPAPSPVPLTTPASAEEAIPLPASSDSERSASSVEGPGGALYARVARREARPARARGEIGGLSLSPSPERRKPPPPDPATKPKVSWIHGKHSAAAAGRAPSPPPPGSEAAPSPSKRKRTPSDKSAHTVEHGSPRTRDPTPRPPGLPEEATALAAPSPPRARARAAPRPLGAHGRRRSPAKRAEAASMLAADVRGKTRSLGRAEVALGAQGPREKPAPPQKAKRSVPPASPARAPPATETPGPEKAATDLPAPETPRKKTPIQKPPRKKSREAAGELGRAGAPTL

SEQ ID NO: 62711 - protein, 830 aa, Homo sapiens
MGLGLLLPLLLLWTRGTQGSELDPKGQHVCVASSPSAELQCCAGWRQKDQECTIPICEGPDACQKDEVCVKPGLCRCKPGFFGAHCSSRCPGQYWGPDCRESCPCHPHGQCEPATGACQCQADRWGARCEFPCACGPHGRCDPATGVCHCEPGWWSSTCRRPCQCNTAAARCEQATGACVCKPGWWGRRCSFRCNCHGSPCEQDSGRCACRPGWWGPECQQQCECVRGRCSAASGECTCPPGFRGARCELPCPAGSHGVQCAHSCGRCKHNEPCSPDTGSCESCEPGWNGTQCQQPCLPGTFGESCEQQCPHCRHGEACEPDTGHCQRCDPGWLGPRCEDPCPTGTFGEDCGSTCPTCVQGSCDTVTGDCVCSAGYWGPSCNASCPAGFHGNNCSVPCECPEGLCHPVSGSCQPGSGSRDTALIAGSLVPLLLLFLGLACCACCCWAPRSDLKDRPARDGATVSRMKLQVWGTLTSLGSTLPCRSLSSHKLPWVTVSHHDPEVPFNHSFIEPPSAGWATDDSFSSDPESGEADEVPAYCVPPQEGMVPVAQAGSSEASLAAGAFPPPEDASTPFAIPRTSSLARAKRPSVSFAEGTKFAPQSRRSSGELSSPLRKPKRLSRGAQSGPEGREAEESTGPEEAEAPESFPAAASPGDSATGHRRPPLGGRTVAEHVEAIEGSVQESSGPVTTIYMLAGKPRGSEGPVRSVFRHFGSFQKGQAEAKVKRAIPKPPRQALNRKKGSPGLASGSVGQSPNSAPKAGLPGATGPMAVRPEEAVRGLGAGTESSRRAQEPVSGCGSPEQDPQKQAEEERQEEPEYENVVPISRPPEP

SEQ ID NO: 62712 - protein, 744 aa, Homo sapiens
MGLGLLLPLLLLWTRGTQGSELDPKGQHVCVASSPSAELQCCAGWRQKDQECTIPICEGPDACQKDEVCVKPGLCRCKPGFFGAHCSSRCPGQYWGPDCRESCPCHPHGQCEPATGACQCQADRWGARCEFPCACGPHGRCDPATGVCHCEPGWWSSTCRRPCQCNTAAARCEQATGACVCKPGWWGRRCSFRCNCHGSPCEQDSGRCACRPGWWGPECQQQCECVRGRCSAASGECTCPPGFRGARCELPCPAGSHGVQCAHSCGRCKHNEPCSPDTGSCESCEPGWNGTQCQQPCLPGTFGESCEQQCPHCRHGEACEPDTGHCQRCSGSRDTALIAGSLVPLLLLFLGLACCACCCWAPRSDLKDRPARDGATVSRMKLQVWGTLTSLGSTLPCRSLSSHKLPWVTVSHHDPEVPFNHSFIEPPSAGWATDDSFSSDPESGEADEVPAYCVPPQEGMVPVAQAGSSEASLAAGAFPPPEDASTPFAIPRTSSLARAKRPSVSFAEGTKFAPQSRRSSGELSSPLRKPKRLSRGAQSGPEGREAEESTGPEEAEAPESFPAAASPGDSATGHRRPPLGGRTVAEHVEAIEGSVQESSGPVTTIYMLAGKPRGSEGPVRSVFRHFGSFQKGQAEAKVKRAIPKPPRQALNRKKGSPGLASGSVGQSPNSAPKAGLPGATGPMAVRPEEAVRGLGAGTESSRRAQEPVSGCGSPEQDPQKQAEEERQEEPEYENVVPISRPPEP

SEQ ID NO: 62713 - protein, 569 aa, Homo sapiens; identical to SEQ ID NO: 62709

SEQ ID NO: 62714 - protein, 864 aa, Homo sapiens
MEGAGPRGAGPARRRGAGGPPSPLLPSLLLLLLLWMLPDTVAPQELNPRGRNVCRAPGSQVPTCCAGWRQQGDECGIAVCEGNSTCSENEVCVRPGECRCRHGYFGANCDTKCPRQFWGPDCKELCSCHPHGQCEDVTGQCTCHARRWGARCEHACQCQHGTCHPRSGACRCEPGWWGAQCASACYCSATSRCDPQTGACLCHAGWWGRSCNNQCACNSSPCEQQSGRCQCRERTFGARCDRYCQCFRGRCHPVDGTCACEPGYRGKYCREPCPAGFYGLGCRRRCGQCKGQQPCTVAEGRCLTCEPGWNGTKCDQPCATGFYGEGCSHRCPPCRDGHACNHVTGKCTRCNAGWIGDRCETKCSNGTYGEDCAFVCADCGSGHCDFQSGRCLCSPGVHGPHCNVTCPPGLHGADCAQACSCHEDTCDPVTGACHLETNQRKGVMGAGALLVLLVCLLLSLLGCCCACRGKDPTRRELSLGRKKAPHRLCGRFSRISMKLPRIPLRRQKLPKVVVAHHDLDNTLNCSFLEPPSGLEQPSPSWSSRASFSSFDTTDEGPVYCVPHEEAPAESRDPEVPTVPAEAPAPSPVPLTTPASAEEAIPLPASSDSERSASSVEGPGGALYARVARREARPARARGEIGGLSLSPSPERRKPPPPDPATKPKVSWIHGKHSAAAAGRAPSPPPPGSEAAPSPSKRKRTPSDKSAHTVEHGSPRTRDPTPRPPGLPEEATALAAPSPPRARARARPGLLEPTDAGGPPRSAPAASMLAADVRGKTRSLGRAEVALGAQGPREKPAPPQKAKRSVPPASPARAPPATETPGPEKAATDLPAPETPRKKTPIQKPPRKKSREAAGELGRAGAPTL

SEQ ID NO: 62715 - protein, 865 aa, Homo sapiens
MEGAGPRGAGPARRRGAGGPPSPLLPSLLLLLLLWMLPDTVAPQELNPRGRNVCRAPGSQVPTCCAGWRQQGDECGIAVCEGNSTCSENEVCVRPGECRCRHGYFGANCDTKCPRQFWGPDCKELCSCHPHGQCEDVTGQCTCHARRWGARCEHACQCQHGTCHPRSGACRCEPGWWGAQCASACYCSATSRCDPQTGACLCHAGWWGRSCNNQCACNSSPCEQQSGRCQCRERTFGARCDRYCQCFRGRCHPVDGTCACEPGYRGKYCREPCPAGFYGLGCRRRCGQCKGQQPCTVAEGRCLTCEPGWNGTKCDQPCATGFYGEGCSHRCPPCRDGHACNHVTGKCTRCNAGWIGDRCETKCSNGTYGEDCAFVCADCGSGHCDFQSGRCLCSPGVHGPHCNVTCPPGLHGADCAQACSCHEDTCDPVTGACHLETNQRKGVMGAGALLVLLVCLLLSLLGCCCACRGKDPTRRELSLGRKKAPHRLCGRFSRISMKLPRIPLRRQKLPKVVVAHHDLDNTLNCSFLEPPSGLEQPSPSWSSRASFSSFDTTDEGPVYCVPHEEAPAESRDPEVPTVPAEAPAPSPVPLTTPASAEEAIPLPASSDSERSASSVEGPGGALYARVARREARPARARGEIGGLSLSPSPERRKPPPPDPATKPKVSWIHGKHSAAAAGRAPSPPPPGSEAAPSPSKRKRTPSDKSAHTVEHGSPRTRDPTPRPPGLPEEATALAAPSPPRARARAAPRPLGAHGRRRSPAKRAEAASMLAADVRGKTRSLGRAEVALGAQGPREKPAPPQKAKRSVPPASPARAPPATETPGPEKAATDLPAPETPRKKTPIQKPPRKKSREAAGELGRAGAPTL

SEQ ID NO: 62716 - protein, 575 aa, Homo sapiens
MHKEAEMLIGPQLDEKRWGWRLGDGSAAPPFLPQALSFLLLLPLASALQPTPLPFQELRLVGGPSRCRGRLEVMHGGSWGSVCDDDWDVVDANVVCRQLGCGLALPVPRPLAFGQGRGPILLDNVECRGQEAALSECGSRGWGVHNCFHYEDVAVLCDEFLPTQPPTRKMLTSRAPPTTLPNGKSEGSVRLVGGANLCQGRVEILHSGLWGTVCDDDWGLPDAAVVCRQLGCGAAMAATTNAFFGYGTGHILLDNVHCEGGEPRLAACQSLGWGVHNCGHHEDAGALCAGLGPPTLTALPSSATREDWAWQTDPSATGVGPQPSRETALLTTAAWAAGKKSGRLRLVGGPGPCRGRVEVLHAGGWGTVCDDDWDFADARVACREAGCGPALGATGLGHFGYGRGPVLLDNVGCAGTEARLSDCFHLGWGQHNCGHHEDAGALCAGPEELGLQVQQDGSETTRVPTPRPRDGHLRLVNGAHRCEGRVELYLGQRWGTVCDDAWDLRAAGVLCRQLGCGQALAAPGEAHFGPGRGPILLDNVKCRGEESALLLCSHIRWDAHNCDHSEDASVLCQPS

SEQ ID NO: 62717 - protein, 282 aa, Homo sapiens
MSNVTLRKMSPTGNEMKSTTQGTTRKQQDFHEVNKRRTFLQDNSWIKKRPEEEKDENYGRVVLNRHNSHDALDRKVNERDVPKATISRYSSDDTLDRSMSMFRSLEVTKLQPGGSLNANTSNTIASTSATTPVKKKRQSWFPPPPPGYNASSSTGTRRREPGVHPPIPPKPSSPVSSPNQLRQDNRQIHPPKPGVYTETNRSAERNISEELDNLIKMNKSLNRNQGLDSLFRANPKVEEREKRAKSLESLIYMSTRTDKDGKGIQSLGSPIKVNQRTDKNEK

SEQ ID NO: 62718 - protein, 688 aa, Homo sapiens
MSNVTLRKMSPTGNEMKSTTQGTTRKQQDFHEVNKRRTFLQDNSWIKKRPEEEKDENYGRVVLNRHNSHDALDRKVNERDVPKATISRYSSDDTLDRISDRNDAAKTYKANTLDNQLTNRSMSMFRSLEVTKLQPGGSLNANTSNTIASTSATTPVKKKRQSWFPPPPPGYNASSSTGTRRREPGVHPPIPPKPSSPVSSPNQLRQDNRQIHPPKPGVYTETNRSAERNIRSQDLDNIVKVATSLQRSDKGEELDNLIKMNKSLNRNQGLDSLFRANPKVEEREKRAKSLESLIYMSTRTDKDGKGIQSLGSPIKVNQRTDKNEKGRQNLESVAKVNARMNKTSRRSEDLDNATEVNPKGHENTTGKKDLDGLIKVDPETNKNITRGQSLDNLIKVTPEVKRSNQGSKDLNNFIKVYPGTEKSTEGGQSLDSLIKVTPERNRTNQGNQDLENLIKVIPSANKSSEQGLDEHINVSPKAVKNTDGKQDLDKLIKVNPEIFTNNQRNQDLANLIKVNPAVIRNNQSQDLDNLIKVKPSALRNTNRDQNLENLIEVNSHVSENKNGSSNTGAKQAGPQDTVVYTRTYVENSKSPKDGYQENISGKYIQTVYSTSDRSVIERDMCTYCRKPLGVETKMILDELQICCHSTCFKCEICKQPLENLQAGDSIWIYRQTIHCEPCYSKIMAKWIP

SEQ ID NO: 62719 - protein, 668 aa, Homo sapiens
MSNVTLRKMSPTGNEMKSTTQGTTRKQQDFHEVNKRRTFLQDNSWIKKRPEEEKDENYGRVVLNRHNSHDALDRKVNERDVPKATISRYSSDDTLDRISDRNDAAKTYKANTLDNQLTNRSMSMFRSLEVTKLQPGGSLNANTSNTIASTSATTPVKKKRQSWFPPPPPGYNASSSTGTRRREPGVHPPIPPKPSSPVSSPNQLRQDNRQIHPPKPGVYTETNRSAERNISEELDNLIKMNKSLNRNQGLDSLFRANPKVEEREKRAKSLESLIYMSTRTDKDGKGIQSLGSPIKVNQRTDKNEKGRQNLESVAKVNARMNKTSRRSEDLDNATEVNPKGHENTTGKKDLDGLIKVDPETNKNITRGQSLDNLIKVTPEVKRSNQGSKDLNNFIKVYPGTEKSTEGGQSLDSLIKVTPERNRTNQGNQDLENLIKVIPSANKSSEQGLDEHINVSPKAVKNTDGKQDLDKLIKVNPEIFTNNQRNQDLANLIKVNPAVIRNNQSQDLDNLIKVKPSALRNTNRDQNLENLIEVNSHVSENKNGSSNTGAKQAGPQDTVVYTRTYVENSKSPKDGYQENISGKYIQTVYSTSDRSVIERDMCTYCRKPLGVETKMILDELQICCHSTCFKCEICKQPLENLQAGDSIWIYRQTIHCEPCYSKIMAKWIP

SEQ ID NO: 62720 - protein, 646 aa, Homo sapiens
MSNVTLRKMSPTGNEMKSTTQGTTRKQQDFHEVNKRRTFLQDNSWIKKRPEEEKDENYGRVVLNRHNSHDALDRKVNERDVPKATISRYSSDDTLDRISDRNDAAKTYKANTLDNQLTNRSMSMFRSLEVTKLQPGGSLNANTSNTIASTSATTPVKKKREPGVHPPIPPKPSSPVSSPNQLRQDNRQIHPPKPGVYTETNRSAERNIRSQDLDNIVKVATSLQRSDKGEELDNLIKMNKSLNRNQGLDSLFRANPKVEEREKRAKSLESLIYMSTRTDKDGKGIQSLGSPIKVNQRTDKNEKGRQNLESVAKVNARMNKTSRRSEDLDNATEVNPKGHENTTGGQSLDNLIKVTPEVKRSNQGSKDLNNFIKVYPGTEKSTEGGQSLDSLIKVTPERNRTNQGNQDLENLIKVIPSANKSSEQGLDEHINVSPKAVKNTDGKQDLDKLIKVNPEIFTNNQRNQDLANLIKVNPAVIRNNQSQDLDNLIKVKPSALRNTNRDQNLENLIEVNSHVSENKNGSSNTGAKQAGPQDTVVYTRTYVENSKSPKDGYQENISGKYIQTVYSTSDRSVIERDMCTYCRKPLGVETKMILDELQICCHSTCFKCEICKQPLENLQAGDSIWIYRQTIHCEPCYSKIMAKWIP

SEQ ID NO: 62721 - protein, 715 aa, Homo sapiens
MARELYHEEFARAGKQAGLQVWRIEKLELVPVPQSAHGDFYVGDAYLVLHTAKTSRGFTYHLHFWLGKECSQDESTAAAIFTVQMDDYLGGKPVQNRELQGYESNDFVSYFKGGLKYKAGGVASGLNHVLTNDLTAKRLLHVKGRRVVRATEVPLSWDSFNKGDCFIIDLGTEIYQWCGSSCNKYERLKANQVATGIRYNERKGRSELIVVEEGSEPSELIKVLGEKPELPDGGDDDDIIADISNRKMAKLYMVSDASGSMRVTVVAEENPFSMAMLLSEECFILDHGAAKQIFVWKGKDANPQERKAAMKTAEEFLQQMNYSKNTQIQVLPEGGETPIFKQFFKDWRDKDQSDGFGKVYVTEKVAQIKQIPFDASKLHSSPQMAAQHNMVDDGSGKVEIWRVENNGRIQVDQNSYGEFYGGDCYIILYTYPRGQIIYTWQGANATRDELTTSAFLTVQLDRSLGGQAVQIRVSQGKEPVHLLSLFKDKPLIIYKNGTSKKGGQAPAPPTRLFQVRRNLASITRIVEVDVDANSLNSNDVFVLKLPQNSGYIWVGKGASQEEEKGAEYVASVLKCKTLRIQEGEEPEEFWNSLGGKKDYQTSPLLETQAEDHPPRLYGCSNKTGRFVIEEIPGEFTQDDLAEDDVMLLDAWEQIFIWIGKDANEVEKKESLKSAKMYLETDPSGRDKRTPIVIIKQGHEPPTFTGWFLGWDSSKW

SEQ ID NO: 62722 - protein, 468 aa, Homo sapiens
MAKLYMVSDASGSMRVTVVAEENPFSMAMLLSEECFILDHGAAKQIFVWKGKDANPQERKAAMKTAEEFLQQMNYSKNTQIQVLPEGGETPIFKQFFKDWRDKDQSDGFGKVYVTEKVAQIKQIPFDASKLHSSPQMAAQHNMVDDGSGKVEIWRVENNGRIQVDQNSYGEFYGGDCYIILYTYPRGQIIYTWQGANATRDELTTSAFLTVQLDRSLGGQAVQIRVSQGKEPVHLLSLFKDKPLIIYKNGTSKKGGQAPAPPTRLFQVRRNLASITRIVEVDVDANSLNSNDVFVLKLPQNSGYIWVGKGASQEEEKGAEYVASVLKCKTLRIQEGEEPEEFWNSLGGKKDYQTSPLLETQAEDHPPRLYGCSNKTGRFVIEEIPGEFTQDDLAEDDVMLLDAWEQIFIWIGKDANEVEKKESLKSAKMYLETDPSGRDKRTPIVIIKQGHEPPTFTGWFLGWDSSKW

SEQ ID NO: 62723 - protein, 468 aa, Homo sapiens; identical to SEQ ID NO: 62722

SEQ ID NO: 62724 - protein, 1287 aa, Homo sapiens
MEPIYPFARPQMNTRFPSSRMVPFHFPPSKCALWNPTPTGDFIYLHLSYYRNPKLVVTEKTIRLAYRHAKQNKKNSSCFLLGSLTADEDEEGVTLTVDRFDPGREVPECLEITPTASLPGDFLIPCKVHTQELCSREMIVHSVDDFSSALKALQCHICSKDSLDCGKLLSLRVHITSRESLDSVEFDLHWAAVTLANNFKCTPVKPIPIIPTALARNLSSNLNISQVQGTYKYGYLTMDETRKLLLLLESDPKVYSLPLVGIWLSGITHIYSPQVWACCLRYIFNSSVQERVFSESGNFIIVLYSMTHKEPEFYECFPCDGKIPDFRFQLLTSKETLHLFKNVEPPDKNPIRCELSAESQNAETEFFSKASKNFSIKRSSQKLSSGKMPIHDHDSGVEDEDFSPRPIPSPHPVSQKISKIQPSVPELSLVLDGNFIESNPLPTPLEMVNNENPPLINHLEHLKPLQPQLYDEKHSPEVEAGEPSLRGIPNQLNQDKPALLRHCKVRQPPAYKKGNPHTRNSIKPSSHNGPSHDIFEKLQTVSAGNVQNEEYPIRPSTLNSRQSSLAPQSQPHDFVFSPHNSGRPMELQIPTPPLPSYCSTNVCRCCQHHSHIQYSPLNSWQGANTVGSIQDVQSEALQKHSLFHPSGCPALYCNAFCSSSSPIALRPQGDMGSCSPHSNIEPSPVARPPSHMDLCNPQPCTVCMHTPKTESDNGMMGLSPDAYRFLTEQDRQLRLLQAQIQRLLEAQSLMPCSPKTTAVEDTVQAGRQMELVSVEAQSSPGLHMRKGVSIAVSTGASLFWNAAGEDQEPDSQMKQDDTKISSEDMNFSVDINNEVTSLPGSASSLKAVDIPSFEESNIAVEEEFNQPLSVSNSSLVVRKEPDVPVFFPSGQLAESVSMCLQTGPTGGASNNSETSEEPKIEHVMQPLLHQPSDNQKIYQDLLGQVNHLLNSSSKETEQPSTKAVIISHECTRTQNVYHTKKKTHHSRLVDKDCVLNATLKQLRSLGVKIDSPTKVKKNAHNVDHASVLACISPEAVISGLNCMSFANVGMSGLSPNGVDLSMEANAIALKYLNENQLSQLSVTRSNQNNCDPFSLLHINTDRSTVGLSLISPNNMSFATKKYMKRYGLLQSSDNSEDEEEPPDNADSKSEYLLNQNLRSIPEQLGGQKEPSKNDHEIINCSNCESVGTNADTPVLRNITNEVLQTKAKQQLTEKPAFLVKNLKPSPAVNLRTGKAEFTQHPEKENEGDITIFPESLQPSETLKQMNSMNSVGTFLDVKRLRQLPKLF

SEQ ID NO: 62725 - protein, 1287 aa, Homo sapiens; identical to SEQ ID NO: 62724

SEQ ID NO: 62726 - protein, 1287 aa, Homo sapiens; identical to SEQ ID NO: 62724

SEQ ID NO: 62727 - protein, 210 aa, Homo sapiens
QLYDEKHSPEVEAGEPSLRGIPNQLNQDKPALLRHCKPCTVCMHTPKTESDNGMMGLSPDAYRFLTEQDRQLRLLQAQIQRLLEAQSLMPCSPKTTAVEDTVQAGRQMELVSVEAQSSPGLHMRKGVSIAVSTGASLFWNAAGEDQEPDSQMKQDDTKISSEDMNFSVDINNEVTSLPGSASSLKAVDIPSFEESNIAVEEEFNQPLSVS

SEQ ID NO: 62728 - protein, 1288 aa, Homo sapiens
MEPIYPFARPQMNTRFPSSRMVPFHFPPSKCALWNPTPTGDFIYLHLSYYRNPKLVVTEKTIRLAYRHAKQNKKNSSCFLLGSLTADEDEEGVTLTVDRFDPGREVPECLEITPTASLPGDFLIPCKVHTQELCSREMIVHSVDDFSSALKALQCHICSKDSLDCGKLLSLRVHITSRESLDSVEFDLHWAAVTLANNFKCTPVKPIPIIPTALARNLSSNLNISQVQGTYKYGYLTMDETRKLLLLLESDPKVYSLPLVGIWLSGITHIYSPQVWACCLRYIFNSSVQERVFSESGNFIIVLYSMTHKEPEFYECFPCDGKIPDFRFQLLTSKETLHLFKNVEPPDKNPIRCELSAESQNAETEFFSKASKNFSIKRSSQKLSSGKMPIHDHDSGVEDEDFSPRPIPSPHPVSQKISKIQPSVPELSLVLDGNFIESNPLPTPLEMVNNENPPLINHLEHLKPLQPQLYDEKHSPEVEAGEPSLRGIPNQLNQDKPALLRHCKVRQPPAYKKGNPHTRNSIKPSSHNGPSHDIFEKLQTVSAGNVQNEEYPIRPSTLNSRQSSLAPQSQPHDFVFSPHNSGRPMELQIPTPPLPSYCSTNVCRCCQHHSHIQYSPLNSWQGANTVGSIQDVQSEALQKHSLFHPSGCPALYCNAFCSSSSPIALRPQGDMGSCSPHSNIEPSPVARPPSHMDLCNPQPCTVCMHTPKTESDNGMMGLSPDAYRFLTEQDRQLRLLQAQIQRLLEAQSLMPCSPKTTAVEDTVQAGRQMELVSVEAQSSPGLHMRKGVSIAVSTGASLFWNAAGEDQEPDSQMKQDDTKISSEDMNFSVDINNEVTSLPGSASSLKAVDIPSFEESNIAVEEEFNQPLSVSNSSSLVVRKEPDVPVFFPSGQLAESVSMCLQTGPTGGASNNSETSEEPKIEHVMQPLLHQPSDNQKIYQDLLGQVNHLLNSSSKETEQPSTKAVIISHECTRTQNVYHTKKKTHHSRLVDKDCVLNATLKQLRSLGVKIDSPTKVKKNAHNVDHASVLACISPEAVISGLNCMSFANVGMSGLSPNGVDLSMEANAIALKYLNENQLSQLSVTRSNQNNCDPFSLLHINTDRSTVGLSLISPNNMSFATKKYMKRYGLLQSSDNSEDEEEPPDNADSKSEYLLNQNLRSIPEQLGGQKEPSKNDHEIINCSNCESVGTNADTPVLRNITNEVLQTKAKQQLTEKPAFLVKNLKPSPAVNLRTGKAEFTQHPEKENEGDITIFPESLQPSETLKQMNSMNSVGTFLDVKRLRQLPKLF

SEQ ID NO: 62729 - protein, 201 aa, Homo sapiens
MSFATLRPAPPGRYLYPEVSPLSEDEDRGSDSSGSDEKPCRVHAARCGLQGARRRAGGRRAGGGGPGGRPGREPRQRHTANARERDRTNSVNTAFTALRTLIPTEPADRKLSKIETLRLASSYISHLGNVLLAGEACGDGQPCHSGPAFFHAARAGSPPPPPPPPPARDGENTQPKQICTFCLSNQRKLSKDRDRKTAIRS

SEQ ID NO: 62730 - protein, 213 aa, Homo sapiens
MQLPLALCLVCLLVHTAFRVVEGQGWQAFKNDATEIIPELGEYPEPPPELENNKTMNRAENGGRPPHHPFETKDVSEYSCRELHFTRYVTDGPCRSAKPVTELVCSGQCGPARLLPNAIGRGKWWRPSGPDFRCIPDRYRAQRVQLLCPGGEAPRARKVRLVASCKCKRLTRFHNQSELKDFGTEAARPQKGRKPRPRARSAKANQAELENAY

SEQ ID NO: 62731 - protein, 301 aa, Homo sapiens
MAMLVLVPGRVMRPLGGQLWRFLPRGLEFWGPAEGTARVLLRQFCARQAEAWRASGRPGYCLGTRPLSTARPPPPWSQKGPGDSTRPSKPGPVSWKSLAITFAIGGALLAGMKHVKKEKAEKLEKERQRHIGKPLLGGPFSLTTHTGERKTDKDYLGQWLLIYFGFTHCPDVCPEELEKMIQVVDEIDSITTLPDLTPLFISIDPERDTKEAIANYVKEFSPKLVGLTGTREEVDQVARAYRVYYSPGPKDEDEDYIVDHTIIMYLIGPDGEFLDYFGQNKRKGEIAASIATHMRPYRKKS

SEQ ID NO: 62732 - protein, 270 aa, Homo sapiens
MAMLVLVPGRVMRPLGGQLWRFLPRGLEFWGPAEGTARVLLRQFCARQAEAWRASGRPGYCLGTRPLSTARPPPPWSQKGPGDSTRPSKPGPVSWKSLAITFAIGGALLAGMKHVKKEKAEKLEKERQRHIGKPLLGGPFSLTTHTGERKTDKDYLDSITTLPDLTPLFISIDPERDTKEAIANYVKEFSPKLVGLTGTREEVDQVARAYRVYYSPGPKDEDEDYIVDHTIIMYLIGPDGEFLDYFGQNKRKGEIAASIATHMRPYRKKS

SEQ ID NO: 62733 - protein, 266 aa, Homo sapiens
MLLLTRSPTAWHRLSQLKPRVLPGTLGGQALHLRSWLLSRQGPAETGGQGQPQGPGLRTRLLITGLFGAGLGGAWLALRAEKERLQQQKRTEALRQAAVGQGDFHLLDHRGRARCKADFRGQWVLMYFGFTHCPDICPDELEKLVQVVRQLEAEPGLPPVQPVFITVDPERDDVEAMARYVQDFHPRLLGLTGSTKQVAQASHSYRVYYNAGPKDEDQDYIVDHSIAIYLLNPDGLFTDYYGRSRSAEQISDSVRRHMAAFRSVLS

SEQ ID NO: 62734 - protein, 266 aa, Homo sapiens; identical to SEQ ID NO: 62733

SEQ ID NO: 62735 - protein, 136 aa, Homo sapiens
MLLLTRSPTAWHRLSQLKPRVLPGTLGGQALHLRSWLLSRQGPAETGGQGQPQGPGLRTRLLITGLFGAGLGGAWLALRAEKERLQQQKRTEALRQAAVGQGDFHLLDHRGRARCKADFRGQWVLMYFGFTHCPDI

SEQ ID NO: 62736 - protein, 136 aa, Homo sapiens; identical to SEQ ID NO: 62735

SEQ ID NO: 62737 - protein, 266 aa, Homo sapiens; identical to SEQ ID NO: 62733

SEQ ID NO: 62738 - protein, 266 aa, Homo sapiens; identical to SEQ ID NO: 62733

SEQ ID NO: 62739 - protein, 348 aa, Homo sapiens
MPRSFLVKKVKLDAFSSADLESAYGRARSDLGAPLHDKGYLSDYVGPSSVYDGDAEAALLKGPSPEPMYAAAVRGELGPAAAGSAPPPTPRPELATAAGGYINGDAAVSEGYAADAFFITDGRSRRKASNAGSAAAPSTASAAAPDGDAGGGGGAGGRSLGSGPGGRGGTRAGAGTEARAGPGAAGAGGRHACGECGKTYATSSNLSRHKQTHRSLDSQLARRCPTCGKVYVSMPAMAMHLLTHDLRHKCGVCGKAFSRPWLLQGHMRSHTGEKPFGCAHCGKAFADRSNLRAHMQTHSAFKHFQCKRCKKSFALKSYLNKHYESACFKGGAGGPAAPAPPQLSPVQA

SEQ ID NO: 62740 - protein, 1630 aa, Homo sapiens
MLKCIPLWRCNRHVESVDKRHCSLQAVPEEIYRYSRSLEELLLDANQLRELPKPFFRLLNLRKLGLSDNEIQRLPPEVANFMQLVELDVSRNDIPEIPESIKFCKALEIADFSGNPLSRLPDGFTQLRSLAHLALNDVSLQALPGDVGNLANLVTLELRENLLKSLPASLSFLVKLEQLDLGGNDLEVLPDTLGALPNLRELWLDRNQLSALPPELGNLRRLVCLDVSENRLEELPAELGGLVLLTDLLLSQNLLRRLPDGIGQLKQLSILKVDQNRLCEVTEAIGDCENLSELILTENLLMALPRSLGKLTKLTNLNVDRNHLEALPPEIGGCVALSVLSLRDNRLAVLPPELAHTTELHVLDVAGNRLQSLPFALTHLNLKALWLAENQAQPMLRFQTEDDARTGEKVLTCYLLPQQPPPSLEDAGQQGSLSETWSDAPPSRVSVIQFLEAPIGDEDAEEAAAEKRGLQRRATPHPSELKVMKRSIEGRRSEACPCQPDSGSPLPAEEEKRLSAESGLSEDSRPSASTVSEAEPEGPSAEAQGGSQQEATTAGGEEDAEEDYQEPTVHFAEDALLPGDDREIEEGQPEAPWTLPGGRQRLIRKDTPHYKKHFKISKLPQPEAVVALLQGMQPDGEGPVAPGGWHNGPHAPWAPRAQKEEEEEEEGSPQEEEVEEEEENRAEEEEASTEEEDKEGAVVSAPSVKGVSFDQANNLLIEPARIEEEELTLTILRQTGGLGISIAGGKGSTPYKGDDEGIFISRVSEEGPAARAGVRVGDKLLEVNGVALQGAEHHEAVEALRGAGTAVQMRVWRERMVEPENAVTITPLRPEDDYSPRERRGGGLRLPLLPPESPGPLRQRHVACLARSERGLGFSIAGGKGSTPYRAGDAGIFVSRIAEGGAAHRAGTLQVGDRVLSINGVDVTEARHDHAVSLLTAASPTIALLLEREAGGPLPPSPLPHSSPPTAAVATTSITTATPGVPGLPSLAPSLLAAALEGPYPVEEIRLPRAGGPLGLSIVGGSDHSSHPFGVQEPGVFISKVLPRGLAARSGLRVGDRILAVNGQDVRDATHQEAVSALLRPCLELSLLVRRDPAPPGLRELCIQKAPGERLGISIRGGARGHAGNPRDPTDEGIFISKVSPTGAAGRDGRLRVGLRLLEVNQQSLLGLTHGEAVQLLRSVGDTLTVLVCDGFEASTDAALEVSPGVIANPFAAGIGHRNSLESISSIDRELSPEGPGKEKELPGQTLHWGPEATEAAGRGLQPLKLDYRALAAVPSAGSVQRVPSGAAGGKMAESPCSPSGQQPPSPPSPDELPANVKQAYRAFAAVPTSHPPEDAPAQPPTPGPAASPEQLSFRERQKYFELEVRVPQAEGPPKRVSLVGADDLRKMQEEEARKLQQKRAQMLREAAEAGAEARLALDGETLGEEEQEDEQPPWASPSPTSRQSPASPPPLGGGAPVRTAKAERRHQERLRVQSPEPPAPERALSPAELRALEAEKRALWRAARMKSLEQDALRAQMVLSRSQEGRGTRGPLERLAEAPSPAPTPSPTPVEDLGPQTSTSPGRLSPDFAEELRSLEPSPSPGPQEEDGEVALVLLGRPSPGAVGPEDVALCSSRRPVRPGRRGLGPVPS

SEQ ID NO: 62741 - protein, 1549 aa, Homo sapiens
MQLVELDVSRNDIPEIPESIKFCKALEIADFSGNPLSRLPDGFTQLRSLAHLALNDVSLQALPGDVGNLANLVTLELRENLLKSLPASLSFLVKLEQLDLGGNDLEVLPDTLGALPNLRELWLDRNQLSALPPELGNLRRLVCLDVSENRLEELPAELGGLVLLTDLLLSQNLLRRLPDGIGQLKQLSILKVDQNRLCEVTEAIGDCENLSELILTENLLMALPRSLGKLTKLTNLNVDRNHLEALPPEIGGCVALSVLSLRDNRLAVLPPELAHTTELHVLDVAGNRLQSLPFALTHLNLKALWLAENQAQPMLRFQTEDDARTGEKVLTCYLLPQQPPPSLEDAGQQGSLSETWSDAPPSRVSVIQFLEAPIGDEDAEEAAAEKRGLQRRATPHPSELKVMKRSIEGRRSEACPCQPDSGSPLPAEEEKRLSAESGLSEDSRPSASTVSEAEPEGPSAEAQGGSQQEATTAGGEEDAEEDYQEPTVHFAEDALLPGDDREIEEGQPEAPWTLPGGRQRLIRKDTPHYKKHFKISKLPQPEAVVALLQGMQPDGEGPVAPGGWHNGPHAPWAPRAQKEEEEEEEGSPQEEEVEEEEENRAEEEEASTEEEDKEGAVVSAPSVKGVSFDQANNLLIEPARIEEEELTLTILRQTGGLGISIAGGKGSTPYKGDDEGIFISRVSEEGPAARAGVRVGDKLLEVNGVALQGAEHHEAVEALRGAGTAVQMRVWRERMVEPENAVTITPLRPEDDYSPRERRGGGLRLPLLPPESPGPLRQRHVACLARSERGLGFSIAGGKGSTPYRAGDAGIFVSRIAEGGAAHRAGTLQVGDRVLSINGVDVTEARHDHAVSLLTAASPTIALLLEREAGGPLPPSPLPHSSPPTAAVATTSITTATPGVPGLPSLAPSLLAAALEGPYPVEEIRLPRAGGPLGLSIVGGSDHSSHPFGVQEPGVFISKVLPRGLAARSGLRVGDRILAVNGQDVRDATHQEAVSALLRPCLELSLLVRRDPAPPGLRELCIQKAPGERLGISIRGGARGHAGNPRDPTDEGIFISKVSPTGAAGRDGRLRVGLRLLEVNQQSLLGLTHGEAVQLLRSVGDTLTVLVCDGFEASTDAALEVSPGVIANPFAAGIGHRNSLESISSIDRELSPEGPGKEKELPGQTLHWGPEATEAAGRGLQPLKLDYRALAAVPSAGSVQRVPSGAAGGKMAESPCSPSGQQPPSPPSPDELPANVKQAYRAFAAVPTSHPPEDAPAQPPTPGPAASPEQLSFRERQKYFELEVRVPQAEGPPKRVSLVGADDLRKMQEEEARKLQQKRAQMLREAAEAGAEARLALDGETLGEEEQEDEQPPWASPSPTSRQSPASPPPLGGGAPVRTAKAERRHQERLRVQSPEPPAPERALSPAELRALEAEKRALWRAARMKSLEQDALRAQMVLSRSQEGRGTRGPLERLAEAPSPAPTPSPTPVEDLGPQTSTSPGRLSPDFAEELRSLEPSPSPGPQEEDGEVALVLLGRPSPGAVGPEDVALCSSRRPVRPGRRGLGPVPS

SEQ ID NO: 62742 - protein, 755 aa, Homo sapiens
MQPDGEGPVAPGGWHNGPHAPWAPRAQKEEEEEEEGSPQEEEVEEEEENRAEEEEASTEEEDKEGAVVSAPSVKGVSFDQANNLLIEPARIEEEELTLTILRQTGGLGISIAGGKGSTPYKGDDEGIFISRVSEEGPAARAGVRVGDKLLEVNGVALQGAEHHEAVEALRGAGTAVQMRVWRERMVEPENAVTITPLRPEDDYSPRERRGGGLRLPLLPPESPGPLRQRHVACLARSERGLGFSIAGGKGSTPYRAGDAGIFVSRIAEGGAAHRAGTLQVGDRVLSINGVDVTEARHDHAVSLLTAASPTIALLLEREAGGPLPPSPLPHSSPPTAAVATTSITTATPGVPGLPSLAPSLLAAALEGPYPVEEIRLPRAGGPLGLSIVGGSDHSSHPFGVQEPGVFISKVLPRGLAARSGLRVGDRILAVNGQDVRDATHQEAVSALLRPCLELSLLVRRDPAPPGLRELCIQKAPGERLGISIRGGARGHAGNPRDPTDEGIFISKVSPTGAAGRDGRLRVGLRLLEVNQQSLLGLTHGEAVQLLRSVGDTLTVLVCDGFEASTDAALEVSPGVIANPFAAGIGHRNSLESISSIDRELSPEGPGKEKELPGQTLHWGPEATEAAGRGLQPLKLDYRALAAVPSAGSVQRVPSGAAGGKMAESPCSPSGQQPPSPPSPDELPANVKQAYRAFAAVPTSHPPEDAPAQPPTPGPAASPEQLSFRERQKYFELEVRVPQAEGPLRPGRRGLGPVPS

SEQ ID NO: 62743 - protein, 1655 aa, Homo sapiens
MLKCIPLWRCNRHVESVDKRHCSLQAVPEEIYRYSRSLEELLLDANQLRELPKPFFRLLNLRKLGLSDNEIQRLPPEVANFMQLVELDVSRNDIPEIPESIKFCKALEIADFSGNPLSRLPDGFTQLRSLAHLALNDVSLQALPGDVGNLANLVTLELRENLLKSLPASLSFLVKLEQLDLGGNDLEVLPDTLGALPNLRELWLDRNQLSALPPELGNLRRLVCLDVSENRLEELPAELGGLVLLTDLLLSQNLLRRLPDGIGQLKQLSILKVDQNRLCEVTEAIGDCENLSELILTENLLMALPRSLGKLTKLTNLNVDRNHLEALPPEIGGCVALSVLSLRDNRLAVLPPELAHTTELHVLDVAGNRLQSLPFALTHLNLKALWLAENQAQPMLRFQTEDDARTGEKVLTCYLLPQQPPPSLEDAGQQGSLSETWSDAPPSRVSVIQFLEAPIGDEDAEEAAAEKRGLQRRATPHPSELKVMKRSIEGRRSEACPCQPDSGSPLPAEEEKRLSAESGLSEDSRPSASTVSEAEPEGPSAEAQGGSQQEATTAGGEEDAEEDYQEPTVHFAEDALLPGDDREIEEGQPEAPWTLPGGRQRLIRKDTPHYKKHFKISKLPQPEAVVALLQGMQPDGEGPVAPGGWHNGPHAPWAPRAQKEEEEEEEGSPQEEEVEEEEENRAEEEEASTEEEDKEGAVVSAPSVKGVSFDQANNLLIEPARIEEEELTLTILRQTGGLGISIAGGKGSTPYKGDDEGIFISRVSEEGPAARAGVRVGDKLLEVNGVALQGAEHHEAVEALRGAGTAVQMRVWRERMVEPENAVTITPLRPEDDYSPRERRGGGLRLPLLPPESPGPLRQRHVACLARSERGLGFSIAGGKGSTPYRAGDAGIFVSRIAEGGAAHRAGTLQVGDRVLSINGVDVTEARHDHAVSLLTAASPTIALLLEREAGGPLPPSPLPHSSPPTAAVATTSITTATPGVPGLPSLAPSLLAAALEGPYPVEEIRLPRAGGPLGLSIVGGSDHSSHPFGVQEPGVFISKVLPRGLAARSGLRVGDRILAVNGQDVRDATHQEAVSALLRPCLELSLLVRRDPAPPGLRELCIQKAPGERLGISIRGGARGHAGNPRDPTDEGIFISKVSPTGAAGRDGRLRVGLRLLEVNQQSLLGLTHGEAVQLLRSVGDTLTVLVCDGFEASTDAALEVSPGVIANPFAAGIGHRNSLESISSIDRELSPEGPGKEKELPGQTLHWGPEATEAAGRGLQPLKLDYRALAAVPSAGSVQRVPSGAAGGKMAESPCSPSGQQPPSPPSPDELPANVKQAYRAFAAVPTSHPPEDAPAQPPTPGPAASPEQLSFRERQKYFELEVRVPQAEGPPKRVSLVGADDLRKMQEEEARKLQQKRAQMLREAAEAGAEARLALDGETLGEEEQEDEQPPWASPSPTSRQSPASPPPLGGGAPVRTAKAERRHQERLRVQSPEPPAPERALSPAELRALEAEKRALWRAARMKSLEQDALRAQMVLSRSQEGRGTRGPLERLAEAPSPAPTPSPTPVEDLGPQTSTSPGRLPLSGKKFDYRAFAALPSSRPVYDIQSPDFAEELRSLEPSPSPGPQEEDGEVALVLLGRPSPGAVGPEDVALCSSRRPVRPGRRGLGPVPS

SEQ ID NO: 62744 - protein, 808 aa, Homo sapiens
MWFFARDPVRDFPFELIPEPPEGGLPGPWALHRGRKKATGSPVSIFVYDVKPGAEEQTQVAKAAFKRFKTLRHPNILAYIDGLETEKCLHVVTEAVTPLGIYLKARVEAGGLKELEISWGLHQIVKALSFLVNDCSLIHNNVCMAAVFVDRAGEWKLGGLDYMYSAQGNGGGPPRKGIPELEQYDPPELADSSGRVVREKWSADMWRLGCLIWEVFNGPLPRAAALRNPGKIPKTLVPHYCELVGANPKVRPNPARFLQNCRAPGGFMSNRFVETNLFLEEIQIKEPAEKQKFFQELSKSLDAFPEDFCRHKVLPQLLTAFEFGNAGAVVLTPLFKVGKFLSAEEYQQKIIPVVVKMFSSTDRAMRIRLLQQMEQFIQYLDEPTVNTQIFPHVVHGFLDTNPAIREQTVKSMLLLAPKLNEANLNVELMKHFARLQAKDEQGPIRCNTTVCLGKIGSYLSASTRHRVLTSAFSRATRDPFAPSRVAGVLGFAATHNLYSMNDCAQKILPVLCGLTVDPEKSVRDQAFKAIRSFLSKLESVSEDPTQLEEVEKDVHAASSPGMGGAAASWAGWAVTGVSSLTSKLIRSHPTTAPTETNIPQRPTPEGVPAPAPTPVPATPTTSGHWETQEEDKDTAEDSSTADRWDDEDWGSLEQEAESVLAQQDDWSTGGQVSRASQVSNSDHKSSKSPESDWSSWEAEGSWEQGWQEPSSQEPPPDGTRLASEYNWGGPESSDKGDPFATLSARPSTQPRPDSWGEDNWEGLETDSRQVKAELARKKREERRREMEAKRAERKVAKGPMKLGARKLD

SEQ ID NO: 62745 - protein, 781 aa, Homo sapiens
MWFFARDPVRDFPFELIPEPPEGGLPGPWALHRGRKKATGSPVSIFVYDVKPGAEEQTQVAKAAFKRFKTLRHPNILAYIDGLETEKCLHVVTEAVTPLGIYLKARVEAGGLKELEISWGLHQIVKALSFLVNDCSLIHNNVCMAAVFVDRAGEWKLGGLDYMYSAQGNGGGPPRKGIPELEQYDPPELADSSGRVVREKWSADMWRLGCLIWEVFNGPLPRAAALRNPGKIPKTLVPHYCELVGANPKVRPNPARFLQNCRAPGGFMSNRFVETNLFLEEIQIKEPAEKQKFFQELSKSLDAFPEDFCRHKVLPQLLTAFEFGNAGAVVLTPLFKVGKFLSAEEYQQKIIPVVVKMFSSTDRAMRIRLLQQMEQFIQYLDEPTVNTQIFPHVVHGFLDTNPAIREQTVKSMLLLAPKLNEANLNVELMKHFARLQAKDEQGPIRCNTTVCLGKIGSYLSASTRHRVLTSAFSRATRDPFAPSRVAGVLGFAATHNLYSMNDCAQKILPVLCGLTVDPEKSVRDQAFKAIRSFLSKLESVSEDPTQLEEVEKDVHAASSPGMGGAAASWAGWAVTGVSSLTSKLIRSHPTTAPTETNIPQRPTPEGVPAPAPTPVPATPTTSGHWETQEEDKDTAEDSSTADRWDDEDWGSLEQEAESVLAQQDDWSTGGQVSRASQVSNSDHKSSKSPESDWSSWEAEGSWEQGWQEPSSQEPPPDGTRLASEYNWGGPESSDKGDPFATLSARPSTQDRSRLSWPGRSARSGGGRWRPNAPRGRWPRAP

SEQ ID NO: 62746 - protein, 707 aa, Homo sapiens
MWFFARDPVRDFPFELIPEPPEGGLPGPWALHRGRKKATGSPVSIFVYDVKPGAEEQTQVAKAAFKRFKTLRHPNILAYIDGLETEKCLHVVTEAVTPLGIYLKARVEAGGLKELEISWGLHQIVKALSFLVNDCSLIHNNVCMAAVFVDRAGEWKLGGLDYMYSAQGNGGGPPRKGIPELEQYDPPELADSSGRVVREKWSADMWRLGCLIWEVFNGPLPRAAALRNPGKIPKTLVPHYCELVGANPKVRPNPARFLQNCRAPGGFMSNRFVETNLFLEEIQIKEPAEKQKFFQELSKSLDAFPEDFCRHKVLPQLLTAFEFGNAGAVVLTPLFKVGKFLSAEEYQQKIIPVVVKMFSSTDRAMRIRLLQQMEQFIQYLDEPTVNTQIFPHVVHGFLDTNPAIREQTVKSMLLLAPKLNEANLNVELMKHFARLQAKDEQGPIRCNTTVCLGKIGSYLSASTRHRVLTSAFSRATRDPFAPSRVAGVLGFAATHNLYSMNDCAQKILPVLCGLTVDPEKSVRDQAFKAIRSFLSKLESVSEDPTQLEEVEKDVHAASSPGMGGAAASWAGWAVTGVSSLTSKLIRSHPTTAPTETNIPQRPTPEGHWETQEPPPDGTRLASEYNWGGPESSDKGDPFATLSARPSTQPRPDSWGEDNWEGLETDSRQVKAELARKKREERRREMEAKRAERKVAKGPMKLGARKLD

SEQ ID NO: 62747 - protein, 356 aa, Homo sapiens
MWFFARDPVRDFPFELIPEPPEGGLPGPWALHRGRKKATGSPVSIFVYDVKPGAEEQTQVAKAAFKRFKTLRHPNILAYIDGLETEKCLHVVTEAVTPLGIYLKARVEAGGLKELEISWGLHQIVKALSFLVNDCSLIHNNVCMAAVFVDRAGEWKLGGLDYMYSAQGNGGGPPRKGIPELEQYDPPELADSSGRVVREKWSADMWRLGCLIWEVFNGPLPRAAALRNPGKIPKTLVPHYCELVGANPKVRPNPARFLQNCRAPGGFMSNRFVETNLFLEEIQPKDPRLKEFLPQPPPLFLPPLQPQATGRRRRRTRTQQRTAALLTDGTTKTGAAWSRRPSLCWPSRTTGAPGAK

SEQ ID NO: 62748 - protein, 791 aa, Homo sapiens
MWFFARDPVRDFPFELIPEPPEGGLPGPWALHRGRKKATGSPVSIFVYDVKPGAEEQTQVAKAAFKRFKTLRHPNILAYIDGLETEKCLHVVTEAVTPLGIYLKARVEAGGLKELEISWGLHQIVKALSFLVNDCSLIHNNVCMAAVFVDRAGEWKLGGLDYMYSAQGNGGGPPRKGIPELEQYDPPELADSSGRVVREKWSADMWRLGCLIWEVFNGPLPRAAALRNPGKIPKTLVPHYCELVGANPKVRPNPARFLQNCRAPGGFMSNRFVETNLFLEEIQIKEPAEKQKFFQELSKSLDAFPEDFCRHKVLPQLLTAFEFGNAGAVVLTPLFKVGKFLSAEEYQQKIIPVVVKMFSSTDRAMRIRLLQQMEQFIQYLDEPTVNTQIFPHVVHGFLDTNPAIREQTVKSMLLLAPKLNEANLNVELMKHFARLQAKDEQGPIRCNTTVCLGKIGSYLSASTRHRVLTSAFSRATRDPFAPSRVAGVLGFAATHNLYSMNDCAQKILPVLCGLTVDPEKSVRDQAFKAIRSFLSKLESVSEDPTQLEEVEKDVHAASSPGMGGAAASWAGWAVTGVSSLTSKLIRSHPTTAPTETNIPQRPTPEGHWETQEEDKDTAEDSSTADRWDDEDWGSLEQEAESVLAQQDDWSTGGQVSRASQVSNSDHKSSKSPESDWSSWEAEGSWEQGWQEPSSQEPPPDGTRLASEYNWGGPESSDKGDPFATLSARPSTQPRPDSWGEDNWEGLETDSRQVKAELARKKREERRREMEAKRAERKVAKGPMKLGARKLD

SEQ ID NO: 62749 - protein, 780 aa, Homo sapiens
MWFFARDPVRDFPFELIPEPPEGGLPGPWALHRGRKKATGSPVSIFVYDVKPGAEEQTQVAKAAFKRFKTLRHPNILAYIDGLETEKCLHVVTEAVTPLGIYLKARVEAGGLKELEISWGLHQIVKALSFLVNDCSLIHNNVCMAAVFVDRAGEWKLGGLDYMYSAQGNGGGPPRKGIPELEQYDPPELADSSGRVVREKWSADMWRLGCLIWEVFNGPLPRAAALRNPGKIPKTLVPHYCELVGANPKVRPNPARFLQNCRAPGGFMSNRFVETNLFLEEIQIKEPAEKQKFFQELSKSLDAFPEDFCRHKVLPQLLTAFEFGNAGAVVLTPLFKVGKFLSAEEYQQKIIPVVVKMFSSTDRAMRIRLLQQMEQFIQYLDEPTVNTQIFPHVVHGFLDTNPAIREQTVKSMLLLAPKLNEANLNVELMKHFARLQAKDEQGPIRCNTTVCLGKIGSYLSASTRHRVLTSAFSRATRDPFAPSRVAGVLGFAATHNLYSMNDCAQKILPVLCGLTVDPEKSVRDQAFKAIRSFLSKLESVSEDPTQLEEVEKDVHAASSPGMGGAAASWAGWAVTGVSSLTSKLIRSHPTTAPTETNIPQRPTPEGVPAPAPTPVPATPTTSGHWETQEEDKDTAEDSSTADRWDDEDWGSLEEAESVLAQQDDWSTGGQVSRASQVSNSDHKSSKSPESDWSSWEAEGSWEQGWQEPSSQEPPPDGTRLASEYNWGGPESSDKGDPFATLSARPSTQDRSRLSWPGRSARSGGGRWRPNAPRGRWPRAP

SEQ ID NO: 62750 - protein, 707 aa, Homo sapiens; identical to SEQ ID NO: 62746

SEQ ID NO: 62751 - protein, 787 aa, Homo sapiens
MWFFARDPVRDFPFELIPEPPEGGLPGPWALHRGRKKATGSPVSIFVYDVKPGAEEQTQVAKAAFKRFKTLRHPNILAYIDGLETEKCLHVVTEAVTPLGIYLKARVEAGGLKELEISWGLHQIVKALSFLVNDCSLIHNNVCMAAVFVDRAGEWKLGGLDYMYSAQGNGGGPPRKGIPELEQYDPPELADSSGRVVREKWSADMWRLGCLIWEVFNGPLPRAAALRNPGKIPKTLVPHYCELVGANPKVRPNPARFLQNCRAPGGFMSNRFVETNLFLEEIQIKEPAEKQKFFQELSKSLDAFPEDFCRHKVLPQLLTAFEFGNAGAVVLTPLFKVGKFLSAEEYQQKIIPVVVKMFSSTDRAMRIRLLQQMEQFIQYLDEPTVNTQIFPHVVHGFLDTNPAIREQTVKSMLLLAPKLNEANLNVELMKHFARLQAKDEQGPIRCNTTVCLGKIGSYLSASTRHRVLTSAFSRATRDPFAPSRVAGVLGFAATHNLYSMNDCAQKILPVLCGLTVDPEKSVRDQAFKAIRSFLSKLESVSEDPTQLEEVEKDVHAASSPGMGGAAASWAGWAVTGVSSLTSKLIRSHPTTAPTETNIPQRPTPEGVPAPAPTPVPATPTTSGHWETQEEDKDTAEDSSTADRWDDEDWGSLEQEAESVLAQQDDWSTGGQVSRASQSPTGAAGKLRAPGNRAGRSQAPRSHLLTVHGWPASITGVAQSPATRATPSLPCLHVPAPSRGQTLGVRTTGRASRLTVDRSRLSWPGRSARSGGGRWRPNAPRGRWPRAP

SEQ ID NO: 62752 - protein, 220 aa, Homo sapiens
MIKPKWGGLVWAQWHGPLARPSGTLPFASSMPSPVDASSADGGSGLGSHRRKRTTFSKGQLLELERAFAAWPYPNISTHEHLAWVTCLPEAKVQVWFQKRWAKIIKNRKSGILSPGSECPQSSCSLPDTLQQPWDPQMPGQPPPSSGTPQRTSVCRHSSCPAPGLSPRQGWEGAKAVAPWGSAGASEVHPSLERATPQTSLGSLSDLIYALAIVVNVDHS

SEQ ID NO: 62753 - protein, 216 aa, Homo sapiens
MGGSGVGTAWHGPLARPSGTLPFASSMPSPVDASSADGGSGLGSHRRKRTTFSKGQLLELERAFAAWPYPNISTHEHLAWVTCLPEAKVQVWFQKRWAKIIKNRKSGILSPGSECPQSSCSLPDTLQQPWDPQMPGQPPPSSGTPQRTSVCRHSSCPAPGLSPRQGWEGAKAVAPWGSAGASEVHPSLERATPQTSLGSLSDLIYALAIVVNVDHS

SEQ ID NO: 62754 - protein, 215 aa, Homo sapiens
MMTTGWTGLCLPPVNPSRVSSSSLETSTTESIFAHDGGSGLGSHRRKRTTFSKGQLLELERAFAAWPYPNISTHEHLAWVTCLPEAKVQVWFQKRWAKIIKNRKSGILSPGSECPQSSCSLPDTLQQPWDPQMPGQPPPSSGTPQRTSVCRHSSCPAPGLSPRQGWEGAKAVAPWGSAGASEVHPSLERATPQTSLGSLSDLIYALAIVVNVDHS

SEQ ID NO: 62755 - protein, 215 aa, Homo sapiens; identical to SEQ ID NO: 62754

SEQ ID NO: 62756 - protein, 403 aa, Homo sapiens
MSGRVGDLSPRQKEALAKFRENVQDVLPALPNPDDYFLLRWLRARSFDLQKSEAMLRKHVEFRKQKDIDNIISWQPPEVIQQYLSGGMCGYDLDGCPVWYDIIGPLDAKGLLFSASKQDLLRTKMRECELLLQECAHQTTKLGRKVETITIIYDCEGLGLKHLWKPAVEAYGEFLCMFEENYPETLKRLFVVKAPKLFPVAYNLIKPFLSEDTRKKIMVLGANWKEVLLKHISPDQVPVEYGGTMTDPDGNPKCKSKINYGGDIPRKYYVRDQVKQQYEHSVQISRGSSHQVEYEILFPGCVLRWQFMSDGADVGFGIFLKTKMGERQRAGEMTEVLPNQRYNSHLVPEDGTLTCSDPGIYVLRFDNTYSFIHAKKVNFTVEVLLPDKASEEKMKQLGAGTPK

SEQ ID NO: 62757 - protein, 320 aa, Homo sapiens
MSGRVGDLSPRQKEALAKFRENVQDVLPALPNPDDYFLLRWLRARSFDLQKSEAMLRKLGRKVETITIIYDCEGLGLKHLWKPAVEAYGEFLCMFEENYPETLKRLFVVKAPKLFPVAYNLIKPFLSEDTRKKIMVLGANWKEVLLKHISPDQVPVEYGGTMTDPDGNPKCKSKINYGGDIPRKYYVRDQVKQQYEHSVQISRGSSHQVEYEILFPGCVLRWQFMSDGADVGFGIFLKTKMGERQRAGEMTEVLPNQRYNSHLVPEDGTLTCSDPGIYVLRFDNTYSFIHAKKVNFTVEVLLPDKASEEKMKQLGAGTPK

SEQ ID NO: 62758 - protein, 329 aa, Homo sapiens
MLRKVIQQYLSGGMCGYDLDGCPVWYDIIGPLDAKGLLFSASKQDLLRTKMRECELLLQECAHQTTKLGRKVETITIIYDCEGLGLKHLWKPAVEAYGEFLCMFEENYPETLKRLFVVKAPKLFPVAYNLIKPFLSEDTRKKIMVLGANWKEVLLKHISPDQVPVEYGGTMTDPDGNPKCKSKINYGGDIPRKYYVRDQVKQQYEHSVQISRGSSHQVEYEILFPGCVLRWQFMSDGADVGFGIFLKTKMGERQRAGEMTEVLPNQRYNSHLVPEDGTLTCSDPGIYVLRFDNTYSFIHAKKVNFTVEVLLPDKASEEKMKQLGAGTPK

SEQ ID NO: 62759 - protein, 392 aa, Homo sapiens
MSGRVGDLSPRQKEALAKFRENVQDVLPALPNPDDYFLLRWLRARSFDLQKSEAMLRKHVEFRKQKDIDNIISWQPPEVIQQYLSGGMCGYDLDGCPVWYDIIGPLDAKGLLFSASKQDLLRTKMRECELLLQECAHQTTKLGRKVETITIIYDCEGLGLKHLWKPAVEAYGEFLCMFEENYPETLKRLFVVKAPKLFPVAYNLIKPFLSEDTRKKIMVLGANWKEVLLKHISPDQVPVEYGGTMTDPDGNPKCKSKINYGGDIPRKYYVRDQVKQQYEHSVQISRGSSHQVEYEILFPGCVLRWQFMSDGADVGFGIFLKTKMGERQRAGEMTEVLPNQRYNSHLVPEDGTLTCSDPGICKYLCLGNALKPHVQLSACEVPLPPWIFGSEC

SEQ ID NO: 62760 - protein, 400 aa, Homo sapiens
MSGRVGDLSPKQAETLAKFRENVQDVLPALPNPDDYFLLRWLRARNFDLQKSEALLRKYMEFRKTMDIDHILDWQPPEVIQKYMPGGLCGYDRDGCPVWYDIIGPLDPKGLLFSVTKQDLLKTKMRDCERILHECDLQTERLGKKIETIVMIFDCEGLGLKHFWKPLVEVYQEFFGLLEENYPETLKFMLIVKATKLFPVGYNLMKPFLSEDTRRKIIVLGNNWKEGLLKLISPEELPAQFGGTLTDPDGNPKCLTKINYGGEIPKSMYVRDQVKTQYEHSVQINRGSSHQVEYEILFPGCVLRWQFSSDGADIGFGVFLKTKMGERQRAGEMTDVLPSQRYNAHMVPEDGNLTCSEAGVYVLRFDNTYSFVHAKKVSFTVEVLLPDEGMQKYDKELTPV

SEQ ID NO: 62761 - protein, 353 aa, Homo sapiens
MEFRKTMDIDHILDWQPPEVIQKYMPGGLCGYDRDGCPVWYDIIGPLDPKGLLFSVTKQDLLKTKMRDCERILHECDLQTERLGKKIETIVMIFDCEGLGLKHFWKPLVEVYQEFFGLLEENYPETLKFMLIVKATKLFPVGYNLMKPFLSEDTRRKIIVLGNNWKEGLLKLISPEELPAQFGGTLTDPDGNPKCLTKINYGGEIPKSMYVRDQVKTQYEHSVQINRGSSHQVEYEILFPGCVLRWQFSSDGADIGFGVFLKTKMGERQRAGEMTDVLPSQRYNAHMVPEDGNLTCSEAGVYVESESGKSCCHLPVIICSHELQNSHSNSQVMAYQMVRKCKLSRPLPLPASN

SEQ ID NO: 62762 - protein, 341 aa, Homo sapiens
MEFRKTMDIDHILDWQPPEVIQKYMPGGLCGYDRDGCPVWYDIIGPLDPKGLLFSVTKQDLLKTKMRDCERILHECDLQTERLGKKIETIVMIFDCEGLGLKHFWKPLVEVYQEFFGLLEENYPETLKFMLIVKATKLFPVGYNLMKPFLSEDTRRKIIVLGNNWKEGLLKLISPEELPAQFGGTLTDPDGNPKCLTKINYGGEIPKSMYVRDQVKTQYEHSVQINRGSSHQVEYEILFPGCVLRWQFSSDGADIGFGVFLKTKMGERQRAGEMTDVLPSQRYNAHMVPEDGNLTCSEAGVYVLRFDNTYSFVHAKKVSFTVEVLLPDEGMQKYDKELTPV

SEQ ID NO: 62763 - protein, 323 aa, Homo sapiens
MVIQKYMPGGLCGYDRDGCPVWYDIIGPLDPKGLLFSVTKQDLLKTKMRDCERILHECDLQTERLGKKIETIVMIFDCEGLGLKHFWKPLVEVYQEFFGLLEENYPETLKFMLIVKATKLFPVGYNLMKPFLSEDTRRKIIVLGNNWKEGLLKLISPEELPAQFGGTLTDPDGNPKCLTKINYGGEIPKSMYVRDQVKTQYEHSVQINRGSSHQVEYEILFPGCVLRWQFSSDGADIGFGVFLKTKMGERQRAGEMTDVLPSQRYNAHMVPEDGNLTCSEAGVYVLRFDNTYSFVHAKKVSFTVEVLLPDEGMQKYDKELTPV

SEQ ID NO: 62764 - protein, 323 aa, Homo sapiens; identical to SEQ ID NO: 62763

SEQ ID NO: 62765 - protein, 406 aa, Homo sapiens
MSSRVGDLSPQQQEALARFRENLQDLLPILPNADDYFLLRWLRARNFDLQKSEDMLRRHMEFRKQQDLDNIVTWQPPEVIQLYDSGGLCGYDYEGCPVYFNIIGSLDPKGLLLSASKQDMIRKRIKVCELLLHECELQTQKLGRKIEMALMVFDMEGLSLKHLWKPAVEVYQQFFSILEANYPETLKNLIVIRAPKLFPVAFNLVKSFMSEETRRKIVILGDNWKQELTKFISPDQLPVEFGGTMTDPDGNPKCLTKINYGGEVPKSYYLCEQVRLQYEHTRSVGRGSSLQVENEILFPGCVLRWQFASDGGDIGFGVFLKTKMGEQQSAREMTEVLPSQRYNAHMVPEDGSLTCLQAGVYVLRFDNTYSRMHAKKLSYTVEVLLPDKASEETLQSLKAMRPSPTQ

SEQ ID NO: 62766 - protein, 360 aa, Homo sapiens
MSSRVGDLSPQQQEALARFRENLQDLLPILPNADDYFLLRWLRARNFDLQKSEDMLRRHMEFRKQQDLDNIVTWQPPEVIQLYDSGGLCGYDYEGCPVYFNIIGSLDPKGLLLSASKQDMIRKRIKVCELLLHECELQTQKLGRKIEMALMVFDMEGLSLKHLWKPAVEVYQQFFSILEANYPETLKNLIVIRAPKLFPVAFNLVKSFMSEETRRKIVILGDNWKQELTKFISPDQLPVEFGGTMTDPDGNPKCLTKINYGGEVPKSYYLCEQVRLQYEHTRSVGRGSSLQVENEILFPGCVLRWQFASDGGDIGFGVFLKTKMGEQQSAREMTEVLPSQRYNAHMVPEDGSLTCLQAGV

SEQ ID NO: 62767 - protein, 360 aa, Homo sapiens
MLRRHMEFRKQQDLDNIVTWQPPEVIQLYDSGGLCGYDYEGCPVYFNIIGSLDPKGLLLSASKQDMIRKRIKVCELLLHECELQTQKLGRKIEMALMVFDMEGLSLKHLWKPAVEVYQQFFSILEANYPETLKNLIVIRAPKLFPVAFNLVKSFMSEETRRKIVILGDNWKQELTKFISPDQLPVEFGGTMTDPDGNPKCLTKINYGGEVPKSYYLCEQVRLQYEHTRSVGRGSSLQVENEILFPGCVLRWQFASDGGDIGFGVFLKTKMGEQQSAREMTEVLPSQRYNAHMVPEDGSLTCLQAGVYVRGLCSLITSPSLQMSCASTTPTAGCMPRSSATLWRCCFPTRPLRRRCRVSRR

SEQ ID NO: 62768 - protein, 391 aa, Homo sapiens
MLMTTSSCAGCELETLTCRNPKTCSEGPKSPQPTSCPHALRAWHMEFRKQQDLDNIVTWQPPEVIQLYDSGGLCGYDYEGCPVYFNIIGSLDPKGLLLSASKQDMIRKRIKVCELLLHECELQTQKLGRKIEMALMVFDMEGLSLKHLWKPAVEVYQQFFSILEANYPETLKNLIVIRAPKLFPVAFNLVKSFMSEETRRKIVILGDNWKQELTKFISPDQLPVEFGGTMTDPDGNPKCLTKINYGGEVPKSYYLCEQVRLQYEHTRSVGRGSSLQVENEILFPGCVLRWQFASDGGDIGFGVFLKTKMGEQQSAREMTEVLPSQRYNAHMVPEDGSLTCLQAGVYVLRFDNTYSRMHAKKLSYTVEVLLPDKASEETLQSLKAMRPSPTQ

SEQ ID NO: 62769 - protein, 751 aa, Homo sapiens
PAAAASSLERETERFRELLLYGRKKDALESAMKNGLWGHALLLASKMDSRTHARVMTRFANSLPINDPLQTVYQLMSGRMPAASTCCGDEKWGDWRPHLAMVLSNLNNNMDVESRTMATMGDTLASRGLLDAAHFCYLMAQAGFGVYTKKTTKLVLIGSNHSLPFLKFATNEAIQRTEAYEYAQSLGAETCPLPSFQVFKFIYSCRLAEMGLATQAFHYCEAIAKSILTQPHLYSPVLISQLVQMASQLRLFDPQLKEKPEEESLAAPTWLVHLQQVERQIKEGAGVWHQDGALPQQCPGTPSSEMEQLDRPGLSQPGALGIANPLLAVPAPSPEHSSPSVRLLPSAPQTLPDGPLASPARVPMFPVPLPPGPLEPGPGCVTPGPALGFLEPSGPGLPPGVPPLQERRHLLQEARSPDPGIVPQEAPVGNSLSELSEENFDGKFANLTPSRTVPDSEAPPGWDRADSGPTQPPLSLSPAPETKRPGQAAKKETKEPKKGESWFFRWLPGKKKTEAYLPDDKNKSIVWDEKKNQWVNLNEPEEEKKAPPPPPTSMPKTVQAAPPALPGPPGAPVNMYSRRAAGTRARYVDVLNPSGTQRSEPALAPADFVAPLAPLPIPSNLFVPTPDAEEPQLPDGTGREGPAAARGLANPEPAPEPKVLSSAASLPGSELPSSRPEGSQGGELSRCSSMSSLSREVSQHFNQAPGDLPAAGGPPSGAMPFYNPAQLAQACATSGSSRLGRIGQRKHLVLN

SEQ ID NO: 62770 - protein, 2159 aa, Homo sapiens
MPGLDRPLSRQNPHDGVVTPAASPSLPQPGLQMPGQWGPVQGGPQPSGQHRSPCPEGPVPSGVPCATSVPHFPTPSILHQGPGHEQHSPLVAPPAALPSDGRDEVSHLQSGSHLANNSDPESTFRQNPRIVNHWASPELRQNPGVKNEHRPASALVNPLARGDSPENRTHHPLGAGAGSGCAPLEADSGASGALAMFFQGGETENEENLSSEKAGLSGQADFDDFCSSPGLGRPPAPTHVGAGSLCQALLPGPSNEAAGDVWGDTASTGVPDASGSQYENVENLEFVQNQEVLPSEPLNLDPSSPSDQFRYGPLPGPAVPRHGAVCHTGAPDATLHTVHPDSVSSSYSSRSHGRLSGSARPQELVGTFIQQEVGKPEDEASGSFFKQIDSSPVGGETDETTVSQNYRGSVSQPSTPSPPKPTGIFQTSANSSFEPVKSHLVGVKPFEADRANVVGEVRETCVRQKQCRPAAALPDASPGNLEQPPDNMETLCAPQVCPLPLNSTTEAVHMLPHAGAPPLDTVYPAPEKRPSARTQGPVKCESPATTLWAQSELPDFGGNVLLAPAAPALYVCAKPQPPVVQPPEEAMSGQQSRNPSSAAPVQSRGGIGASENLENPPKMGEEEALQSQASSGYASLLSSPPTESLQNPPVLIAQPDHSYNLAQPINFSVSLSNSHEKNQSWREALVGDRPAVSSWALGGDSGENTSLSGIPTSSVLSLSLPSSVAQSNFPQGSGASEMVSNQPANLLVQPPSQPVPENLVPESQKDRKAGSALPGFANSPAGSTSVVLVPPAHGTLVPDGNKANHSSHQEDTYGALDFTLSRTLENPVNVYNPSHSDSLASQQSVASHPRQSGPGAPNLDRFYQQVTKDAQGQPGLERAQQELVPPQQQASPPQLPKAMFSELSNPESLPAQGQAQNSAQSPASLVLVDAGQQLPPRPPQSSSVSLVSSGSGQAAVPSEQPWPQPVPALAPGPPPQDLAAYYYYRPLYDAYQPQYSLPYPPEPGAASLYYQDVYSLYEPRYRPYDGAASAYAQNYRYPEPERPSSRASHSSERPPPRQGYPEGYYSSKSGWSSQSDYYASYYSSQYDYGDPGHWDRYHYSARVRDPRTYDRRYWCDAEYDAYRREHSAFGDRPEKRDNNWRYDPRFTGSFDDDPDPHRDPYGEEVDRRSVHSEHSARSLHSAHSLASRRSSLSSHSHQSQIYRSHNVAAGSYEAPLPPGSFHGDFAYGTYRSNFSSGPGFPEYGYPADTVWPAMEQVSSRPTSPEKFSVPHVCARFGPGGQLIKVIPNLPSEGQPALVEVHSMEALLQHTSEQEEMRAFPGPLAKDDTHKVDVINFAQNKAMKCLQNENLIDKESASLLWNFIVLLCRQNGTVVGTDIAELLLRDHRTVWLPGKSPNEANLIDFTNEAVEQVEEEESGEAQLSFLTGGPAAAASSLERETERFRELLLYGRKKDALESAMKNGLWGHALLLASKMDSRTHARVMTRFANSLPINDPLQTVYQLMSGRMPAASTCCGDEKWGDWRPHLAMVLSNLNNNMDVESRTMATMGDTLASRGLLDAAHFCYLMAQAGFGVYTKKTTKLVLIGSNHSLPFLKFATNEAIQRTEAYEYAQSLGAETCPLPSFQVFKFIYSCRLAEMGLATQAFHYCEAIAKSILTQPHLYSPVLISQLVQMASQLRLFDPQLKEKPEEESLAAPTWLVHLQQVERQIKEGAGVWHQDGALPQQCPGTPSSEMEQLDRPGLSQPGALGIANPLLAVPAPSPEHSSPSVRLLPSAPQTLPDGPLASPARVPMFPVPLPPGPLEPGPGCVTPGPALGFLEPSGPGLPPGVPPLQERRHLLQEARSPDPGIVPQEAPVGNSLSELSEENFDGKFANLTPSRTVPDSEAPPGWDRADSGPTQPPLSLSPAPETKRPGQAAKKETKEPKKGESWFFRWLPGKKKTEAYLPDDKNKSIVWDEKKNQWVNLNEPEEEKKAPPPPPTSMPKTVQAAPPALPGPPGAPVNMYSRRAAGTRARYVDVLNPSGTQRSEPALAPADFVAPLAPLPIPSNLFVPTPDAEEPQLPDGTGREGPAAARGLANPEPAPEPKVLSSAASLPGSELPSSRPEGSQGGEAPGDLPAAGGPPSGAMPFYNPAQLAQACATSGSSRLGRIGQRKHLVLN

SEQ ID NO: 62771 - protein, 2357 aa, Homo sapiens
MQPPPQTVPSGMAGPPPAGNPRSVFWASSPYRRRANNNAAVAPTTCPLQPVTDPFAFSRQALQSTPLGSSSKSSPPVLQGPAPAGFSQHPGLLVPHTHARDSSQGPCEPLPGPLTQPRAHASPFSGALTPSAPPGPEMNRSAEVGPSSEPEVQTLPYLPHYIPGVDPETSHGGHPHGNMPGLDRPLSRQNPHDGVVTPAASPSLPQPGLQMPGQWGPVQGGPQPSGQHRSPCPEGPVPSGVPCATSVPHFPTPSILHQGPGHEQHSPLVAPPAALPSDGRDEVSHLQSGSHLANNSDPESTFRQNPRIVNHWASPELRQNPGVKNEHRPASALVNPLARGDSPENRTHHPLGAGAGSGCAPLEADSGASGALAMFFQGGETENEENLSSEKAGLSGQADFDDFCSSPGLGRPPAPTHVGAGSLCQALLPGPSNEAAGDVWGDTASTGVPDASGSQYENVENLEFVQNQEVLPSEPLNLDPSSPSDQFRYGPLPGPAVPRHGAVCHTGAPDATLHTVHPDSVSSSYSSRSHGRLSGSARPQELVGTFIQQEVGKPEDEASGSFFKQIDSSPVGGETDETTVSQNYRGSVSQPSTPSPPKPTGIFQTSANSSFEPVKSHLVGVKPFEADRANVVGEVRETCVRQKQCRPAAALPDASPGNLEQPPDNMETLCAPQVCPLPLNSTTEAVHMLPHAGAPPLDTVYPAPEKRPSARTQGPVKCESPATTLWAQSELPDFGGNVLLAPAAPALYVCAKPQPPVVQPPEEAMSGQQSRNPSSAAPVQSRGGIGASENLENPPKMGEEEALQSQASSGYASLLSSPPTESLQNPPVLIAQPDHSYNLAQPINFSVSLSNSHEKNQSWREALVGDRPAVSSWALGGDSGENTSLSGIPTSSVLSLSLPSSVAQSNFPQGSGASEMVSNQPANLLVQPPSQPVPENLVPESQKDRKAGSALPGFANSPAGSTSVVLVPPAHGTLVPDGNKANHSSHQEDTYGALDFTLSRTLENPVNVYNPSHSDSLASQQSVASHPRQSGPGAPNLDRFYQQVTKDAQGQPGLERAQQELVPPQQQASPPQLPKAMFSELSNPESLPAQGQAQNSAQSPASLVLVDAGQQLPPRPPQSSSVSLVSSGSGQAAVPSEQPWPQPVPALAPGPPPQDLAAYYYYRPLYDAYQPQYSLPYPPEPGAASLYYQDVYSLYEPRYRPYDGAASAYAQNYRYPEPERPSSRASHSSERPPPRQGYPEGYYSSKSGWSSQSDYYASYYSSQYDYGDPGHWDRYHYSARVRDPRTYDRRYWCDAEYDAYRREHSAFGDRPEKRDNNWRYDPRFTGSFDDDPDPHRDPYGEEVDRRSVHSEHSARSLHSAHSLASRRSSLSSHSHQSQIYRSHNVAAGSYEAPLPPGSFHGDFAYGTYRSNFSSGPGFPEYGYPADTVWPAMEQVSSRPTSPEKFSVPHVCARFGPGGQLIKVIPNLPSEGQPALVEVHSMEALLQHTSEQEEMRAFPGPLAKDDTHKVDVINFAQNKAMKCLQNENLIDKESASLLWNFIVLLCRQNGTVVGTDIAELLLRDHRTVWLPGKSPNEANLIDFTNEAVEQVEEEESGEAQLSFLTGGPAAAASSLERETERFRELLLYGRKKDALESAMKNGLWGHALLLASKMDSRTHARVMTRFANSLPINDPLQTVYQLMSGRMPAASTCCGDEKWGDWRPHLAMVLSNLNNNMDVESRTMATMGDTLASRGLLDAAHFCYLMAQAGFGVYTKKTTKLVLIGSNHSLPFLKFATNEAIQRTEAYEYAQSLGAETCPLPSFQVFKFIYSCRLAEMGLATQAFHYCEAIAKSILTQPHLYSPVLISQLVQMASQLRLFDPQLKEKPEEESLAAPTWLVHLQQVERQIKEGAGVWHQDGALPQQCPGTPSSEMEQLDRPGLSQPGALGIANPLLAVPAPSPEHSSPSVRLLPSAPQTLPDGPLASPARVPMFPVPLPPGPLEPGPGCVTPGPALGFLEPSGPGLPPGVPPLQERRHLLQEARSPDPGIVPQEAPVGNSLSELSEENFDGKFANLTPSRTVPDSEAPPGWDRADSGPTQPPLSLSPAPETKRPGQAAKKETKEPKKGESWFFRWLPGKKKTEAYLPDDKNKSIVWDEKKNQWVNLNEPEEEKKAPPPPPTSMPKTVQAAPPALPGPPGAPVNMYSRRAAGTRARYVDVLNPSGTQRSEPALAPADFVAPLAPLPIPSNLFVPTPDAEEPQLPDGTGREGPAAARGLANPEPAPEPKVLSSAASLPGSELPSSRPEGSQGGELSRCSSMSSLSREVSQHFNQAPGDLPAAGGPPSGAMPFYNPAQLAQACATSGSSRLGRIGQRKHLVLN

SEQ ID NO: 62772 - protein, 385 aa, Homo sapiens
MDLLPTSILLASLWICSHLHPPGVSVDLPPTSILLVSLWICSHLHPPGVSVDRPPPPSSWCLCGSPPTSILLVSLWICSPPPSSWCLCGSAPTSILLVSLWIWRLWGLTEGESWFFRWLPGKKKTEAYLPDDKNKSIVWDEKKNQWVNLNEPEEEKKAPPPPPTSMPKTVQAAPPALPGPPGAPVNMYSRRAAGTRARYVDVLNPSGTQRSEPALAPADFVAPLAPLPIPSNLFVPTPVSSVRPQGRSGRNDGLLALSSPDAEEPQLPDGTGREGPAAARGLANPEPAPEPKVLSSAASLPGSELPSSRPEGSQGGELSRCSSMSSLSREVSQHFNQAPGDLPAAGGPPSGAMPFYNPAQLAQACATSGSSRLGRIGQRKHLVLN

SEQ ID NO: 62773 - protein, 2134 aa, Homo sapiens
MPGLDRPLSRQNPHDGVVTPAASPSLPQPGLQMPGQWGPVQGGPQPSGQHRSPCPEGPVPSGVPCATSVPHFPTPSILHQGPGHEQHSPLVAPPAALPSDGRDEVSHLQSGSHLANNSDPESTFRQNPRIVNHWASPELRQNPGVKNEHRPASALVNPLARGDSPENRTHHPLGAGAGSGCAPLEADSGASGALAMFFQGGETENEENLSSEKAGLSGQADFDDFCSSPGLGRPPAPTHVGAGSLCQALLPGPSNEAAGDVWGDTASTGVPDASGSQYENVENLEFVQNQEVLPSEPLNLDPSSPSDQFRYGPLPGPAVPRHGAVCHTGAPDATLHTVHPDSVSSSYSSRSHGRLSGSARPQELVGTFIQQEVGKPEDEASGSFFKQIDSSPVGGETDETTVSQNYRGSVSQPSTPSPPKPTGIFQTSANSSFEPVKSHLVGVKPFEADRANVVGEVRETCVRQKQCRPAAALPDASPGNLEQPPDNMETLCAPQVCPLPLNSTTEAVHMLPHAGAPPLDTVYPAPEKRPSARTQGPVKCESPATTLWAQSELPDFGGNVLLAPAAPALYVCAKPQPPVVQPPEEAMSGQQSRNPSSAAPVQSRGGIGASENLENPPKMGEEEALQSQASSGYASLLSSPPTESLQNPPVLIAQPDHSYNLAQPINFSVSLSNSHEKNQSWREALVGDRPAVSSWALGGDSGENTSLSGIPTSSVLSLSLPSSVAQSNFPQGSGASEMVSNQPANLLVQPPSQPVPENLVPESQKDRKAGSALPGFANSPAGSTSVVLVPPAHGTLVPDGNKANHSSHQEDTYGALDFTLSRTLENPVNVYNPSHSDSLASQQSVASHPRQSGPGAPNLDRFYQQVTKDAQGQPGLERAQQELVPPQQQASPPQLPKAMFSELSNPESLPAQGQAQNSAQSPASLVLVDAGQQLPPRPPQSSSVSLVSSGSGQAAVPSEQPWPQPVPALAPGPPPQDLAAYYYYRPLYDAYQPQYSLPYPPEPGAASLYYQDVYSLYEPRYRPYDGAASAYAQNYRYPEPERPSSRASHSSERPPPRQGYPEGYYSSKSGWSSQSDYYASYYSSQYDYGDPGHWDRYHYSARVRDPRTYDRRYWCDAEYDAYRREHSAFGDRPEKRDNNWRYDPRFTGSFDDDPDPHRDPYGEEVDRRSVHSEHSARSLHSAHSLASRRSSLSSHSHQSQIYRSHNVAAGSYEAPLPPGSFHGDFAYGTYRSNFSSGPGFPEYGYPADTVWPAMEQVSSRPTSPEKFSVPHVCARFGPGGQLIKVIPNLPSEGQPALVEVHSMEALLQHTSEQEEMRAFPGPLAKDDTHKVDVINFAQNKAMKCLQNENLIDKESASLLWNFIVLLCRQNGTVVGTDIAELLLRDHRTVWLPGKSPNEANLIDFTNEAVEQVEEEESGEAQLSFLTGGPAAAASSLERETERFRELLLYGRKKDALESAMKNGLWGHALLLASKMDSRTHARVMTRFANSLPINDPLQTVYQLMSGRMPAASTCCGDEKWGDWRPHLAMVLSNLNNNMDVESRTMATMGDTLASRGLLDAAHFCYLMAQAGFGVYTKKTTKLVLIGSNHSLPFLKFATNEAIQRTEAYEYAQSLGAETCPLPSFQVFKFIYSCRLAEMGLATQAFHYCEAIAKSILTQPHLYSPVLISQLVQMASQLRLFDPQLKEKPEEESLAAPTWLVHLQQVERQIKEGAGVWHQDGALPQQCPGTPSSEMEQLDRPGLSQPGALGIANPLLAVPAPSPEHSSPSVRLLPSAPQTLPDGPLASPARVPMFPVPLPPGPLEPGPGCVTPGPALGFLEPSGPGLPPGVPPLQERRHLLQEARSPDPGIVPQEAPVGNSLSELSEENFDGKFANLTPSRTVPDSEAPPGWDRADSGPTQPPLSLSPAPETKRPGQAAKKETKEPKKGESWFFRWLPGKKKTEAYLPDDKNKSIVWDEKKNQWVNLNEPEEEKKAPPPPPTSMPKTVQAAPPALPGPPGAPVNMYSRRAAGTRARYVDVLNPSGTQRSEPALAPADFVAPLAPLPIPSNLFVPTPDAEEPQLPDGTGREGPAAARGLANPEPAPEPKAPGDLPAAGGPPSGAMPFYNPAQLAQACATSGSSRLGRIGQRKHLVLN

SEQ ID NO: 62774 - protein, 140 aa, Homo sapiens
MDLLPTSILLASLWICSHLHPPGVSVDLPPTSILLVSLWICSHLHPPGVSVDRPPPPSSWCLCGSPPTSILLVSLWICSPPPSSWCLCGSAPTSILLVSLWIWRLWGLTEVGHVEFVFLPWLISWNIMFSKLFSCFLYLG

SEQ ID NO: 62775 - protein, 734 aa, Homo sapiens
MFSELSNPESLPAQGQAQNSAQSPASLVLVDAGQQLPPRPPQSSSVSLVSSGSGQAAVPSEQPWPQPVPALAPGPPPQDLAAYYYYRPLYDAYQPQYSLPYPPEPGAASLYYQDVYSLYEPRYRPYDGAASAYAQNYRYPEPERPSSRASHSSERPPPRQGYPEGYYSSKSGWSSQSDYYASYYSSQYDYGDPGHWDRYHYSARVRDPRTYDRRYWCDAEYDAYRREHSAFGDRPEKRDNNWRYDPRFTGSFDDDPDPHRDPYGEEVDRRSVHSEHSARSLHSAHSLASRRSSLSSHSHQSQIYRSHNVAAGSYEAPLPPGSFHGDFAYGTYRSNFSSGPGFPEYGYRPALGFLEPSGPGLPPGVPPLQERRHLLQEARSPDPGIVPQEAPVGNSLSELSEENFDGKFANLTPSRTVPDSEAPPGWDRADSGPTQPPLSLSPAPETKRPGQAAKKETKEPKKGESWFFRWLPGKKKTEAYLPDDKNKSIVWDEKKNQWVNLNEPEEEKKAPPPPPTSMPKTVQAAPPALPGPPGAPVNMYSRRAAGTRARYVDVLNPSGTQRSEPALAPADFVAPLAPLPIPSNLFVPTPVRPQGRSGRNDGLLALSSPDAEEPQLPDGTGREGPAAARGLANPEPAPEPKVLSSAASLPGSELPSSRPEGSQGGELSRCSSMSSLSREVSQHFNQAPGDLPAAGGPPSGAMPFYNPAQLAQACATSGSSRLGRIGQRKHLVLN

SEQ ID NO: 62776 - protein, 1727 aa, Homo sapiens
MFFQGGETENEENLSSEKAGLSGQADFDDFCSSPGLGRPPAPTHVGAGSLCQALLPGPSNEAAGDVWGDTASTGVPDASGSQYENVENLEFVQNQEVLPSEPLNLDPSSPSDQFRYGPLPGPAVPRHGAVCHTGAPDATLHTVHPDSVSSSYSSRSHGRLSGSARPQELVGTFIQQEVGKPEDEASGSFFKQIDSSPVGGETDETTVSQNYRGSVSQPSTPSPPKPTGIFQTSANSSFEPVKSHLVGVKPFEADRANVVGEVRETCVRQKQCRPAAALPDASPGNLEQPPDNMETLCAPQVCPLPLNSTTEAVHMLPHAGAPPLDTVYPAPEKRPSARTQGPVKCESPATTLWAQSELPDFGGNVLLAPAAPALYVCAKPQPPVVQPPEEAMSGQQSRNPSSAAPVQSRGGIGASENLENPPKMGEEEALQSQVTKDAQGQPGLERAQQELVPPQQQASPPQLPKAMFSELSNPESLPAQGQAQNSAQSPASLVLVDAGQQLPPRPPQSSSVSLVSSGSGQAAVPSEQPWPQPVPALAPGPPPQDLAAYYYYRPLYDAYQPQYSLPYPPEPGAASLYYQDVYSLYEPRYRPYDGAASAYAQNYRYPEPERPSSRASHSSERPPPRQGYPEGYYSSKSGWSSQSDYYASYYSSQYDYGDPGHWDRYHYSARVRDPRTYDRRYWCDAEYDAYRREHSAFGDRPEKRDNNWRYDPRFTGSFDDDPDPHRDPYGEEVDRRSVHSEHSARSLHSAHSLASRRSSLSSHSHQSQIYRSHNVAAGSYEAPLPPGSFHGDFAYGTYRSNFSSGPGFPEYGYPADTVWPAMEQVSSRPTSPEKFSVPHVCARFGPGGQLIKVIPNLPSEGQPALVEVHSMEALLQHTSEQEEMRAFPGPLAKDDTHKVDVINFAQNKAMKCLQNENLIDKESASLLWNFIVLLCRQNGTVVGTDIAELLLRDHRTVWLPGKSPNEANLIDFTNEAVEQVEEEESGEAQLSFLTGGPAAAASSLERETERFRELLLYGRKKDALESAMKNGLWGHALLLASKMDSRTHARVMTRFANSLPINDPLQTVYQLMSGRMPAASTCCGDEKWGDWRPHLAMVLSNLNNNMDVESRTMATMGDTLASRGLLDAAHFCYLMAQAGFGVYTKKTTKLVLIGSNHSLPFLKFATNEAIQRTEAYEYAQSLGAETCPLPSFQVFKFIYSCRLAEMGLATQAFHYCEAIAKSILTQPHLYSPVLISQLVQMASQLRLFDPQLKEKPEEESLAAPTWLVHLQQVERQIKEGAGVWHQDGALPQQCPGTPSSEMEQLDRPGLSQPGALGIANPLLAVPAPSPEHSSPSVRLLPSAPQTLPDGPLASPARVPMFPVPLPPGPLEPGPGCVTPGPALGFLEPSGPGLPPGVPPLQERRHLLQEARSPDPGIVPQEAPVGNSLSELSEENFDGKFANLTPSRTVPDSEAPPGWDRADSGPTQPPLSLSPAPETKRPGQAAKKETKEPKKGESWFFRWLPGKKKTEAYLPDDKNKSIVWDEKKNQWVNLNEPEEEKKAPPPPPTSMPKTVQAAPPALPGPPGAPVNMYSRRAAGTRARYVDVLNPSGTQRSEPALAPADFVAPLAPLPIPSNLFVPTPDAEEPQLPDGTGREGPAAARGLANPEPAPEPKVLSSAASLPGSELPSSRPEGSQGGEAPGDLPAAGGPPSGAMPFYNPAQLAQACATSGSSRLGRIGQRKHLVLN

SEQ ID NO: 62777 - protein, 2154 aa, Homo sapiens
MPGLDRPLSRQNPHDGVVTPAASPSLPQPGLQMPGQWGPVQGGPQPSGQHRSPCPEGPVPSGVPCATSVPHFPTPSILHQGPGHEQHSPLVAPPAALPSDGRDEVSHLQSGSHLANNSDPESTFRQNPRIVNHWASPELRQNPGVKNEHRPASALVNPLARGDSPENRTHHPLGAGAGSGCAPLEADSGASGALAMFFQGGETENEENLSSEKAGLSGQADFDDFCSSPGLGRPPAPTHVGAGSLCQALLPGPSNEAAGDVWGDTASTGVPDASGSQYENVENLEFVQNQEVLPSEPLNLDPSSPSDQFRYGPLPGPAVPRHGAVCHTGAPDATLHTVHPDSVSSSYSSRSHGRLSGSARPQELVGTFIQQEVGKPEDEASGSFFKQIDSSPVGGETDETTVSQNYRGSVSQPSTPSPPKPTGIFQTSANSSFEPVKSHLVGVKPFEADRANVVGEVRETCVRQKQCRPAAALPDASPGNLEQPPDNMETLCAPQVCPLPLNSTTEAVHMLPHAGAPPLDTVYPAPEKRPSARTQGPVKCESPATTLWAQSELPDFGGNVLLAPAAPALYVCAKPQPPVVQPPEEAMSGQQSRNPSSAAPVQSRGGIGASENLENPPKMGEEEALQSQASSGYASLLSSPPTESLQNPPVLIAQPDHSYNLAQPINFSVSLSNSHEKNQSWREALVGDRPAVSSWALGGDSGENTSLSGIPTSSVLSLSLPSSVAQSNFPQGSGASEMVSNQPANLLVQPPSQPVPENLVPESQKDRKAGSALPGFANSPAGSTSVVLVPPAHGTLVPDGNKANHSSHQEDTYGALDFTLSRTLENPVNVYNPSHSDSLASQQSVASHPRQSGPGAPNLDRFYQQVTKDAQGQPGLERAQQELVPPQQQASPPQLPKAMFSELSNPESLPAQGQAQNSAQSPASLVLVDAGQQLPPRPPQSSSVSLVSSGSGQAAVPSEQPWPQPVPALAPGPPPQDLAAYYYYRPLYDAYQPQYSLPYPPEPGAASLYYQDVYSLYEPRYRPYDGAASAYAQNYRYPEPERPSSRASHSSERPPPRQGYPEGYYSSKSGWSSQSDYYASYYSSQYDYGDPGHWDRYHYSARVRDPRTYDRRYWCDAEYDAYRREHSAFGDRPEKRDNNWRYDPRFTGSFDDDPDPHRDPYGEEVDRRSVHSEHSARSLHSAHSLASRRSSLSSHSHQSQIYRSHNVAAGSYEAPLPPGSFHGDFAYGTYRSNFSSGPGFPEYGYPADTVWPAMEQVSSRPTSPEKFSVPHVCARFGPGGQLIKVIPNLPSEGQPALVEVHSMEALLQHTSEQEEMRAFPGPLAKDDTHKVDVINFAQNKAMKCLQNENLIDKESASLLWNFIVLLCRQNGTVVGTDIAELLLRDHRTVWLPGKSPNEANLIDFTNEAVEQVEEEESGEAQLSFLTGGPAAAASSLERETERFRELLLYGRKKDALESAMKNGLWGHALLLASKMDSRTHARVMTRFANSLPINDPLQTVYQLMSGRMPAASTCCGDEKWGDWRPHLAMVLSNLNNNMDVESRTMATMGDTLASRGLLDAAHFCYLMAQAGFGVYTKKTTKLVLIGSNHSLPFLKFATNEAIQRTEAYEYAQSLGAETCPLPSFQVFKFIYSCRLAEMGLATQAFHYCEAIAKSILTQPHLYSPVLISQLVQMASQLRLFDPQLKEKPEEESLAAPTWLVHLQQVERQIKEGAGVWHQDGALPQQCPGTPSSEMEQLDRPGLSQPGALGIANPLLAVPAPSPEHSSPSVRLLPSAPQTLPDGPLASPARVPMFPVPLPPGPLEPGPGCVTPGPALGFLEPSGPGLPPGVPPLQERRHLLQEARSPDPGIVPQEAPVGNSLSELSEENFDGKFANLTPSRTVPDSEAPPGWDRADSGPTQPPLSLSPAPETKRPGQAAKKETKEPKKGESWFFRWLPGKKKTEAYLPDDKNKSIVWDEKKNQWVNLNEPEEEKKAPPPPPTSMPKTVQAAPPALPGPPGAPVNMYSRRAAGTRARYVDVLNPSGTQRSEPALAPADFVAPLAPLPIPSNLFVPTPDAEEPQLPDGTGREGPAAARGLANPEPAPEPKLSRCSSMSSLSREVSQHFNQAPGDLPAAGGPPSGAMPFYNPAQLAQACATSGSSRLGRIGQRKHLVLN

SEQ ID NO: 62778 - protein, 506 aa, Homo sapiens
  VARIANT 1: note = MOD_RES - Any amino acid
XSAFGDRPEKRDNNWRYDPRFTGSFDDDPDPHRDPYGEEVDRRSVHSEHSARSLHSAHSLASRRSSLSSHSHQSQIYRSHNVAAGSYEAPLPPGSFHGDFAYGTYRSNFSSGPGFPEYGYPALGFLEPSGPGLPPGVPPLQERRHLLQEARSPDPGIVPQEAPVGNSLSELSEENFDGKFANLTPSRTVPDSEAPPGWDRADSGPTQPPLSLSPAPETKRPGQAAKKETKEPKKGESWFFRWLPGKKKTEAYLPDDKNKSIVWDEKKNQWVNLNEPEEEKKAPPPPPTSMPKTVQAAPPALPGPPGAPVNMYSRRAAGTRARYVDVLNPSGTQRSEPALAPADFVAPLAPLPIPSNLFVPTPVRPQGRSGRNDGLLALSSPDAEEPQLPDGTGREGPAAARGLANPEPAPEPKVLSSAASLPGSELPSSRPEGSQGGELSRCSSMSSLSREVSQHFNQAPGDLPAAGGPPSGAMPFYNPAQLAQACATSGSSRLGRIGQRKHLVLN

SEQ ID NO: 62779 - protein, 1059 aa, Homo sapiens
ARVRDPRTYDRRYWCDAEYDAYRREHSAFGDRPEKRDNNWRYDPRFTGSFDDDPDPHRDPYGEEVDRRSVHSEHSARSLHSAHSLASRRSSLSSHSHQSQIYRSHNVAAGSYEAPLPPGSFHGDFAYGTYRSNFSSGPGFPEYGYPADTVWPAMEQVSSRPTSPEKFSVPHVCARFGPGGQLIKVIPNLPSEGQPALVEVHSMEALLQHTSEQEEMRAFPGPLAKDDTHKVDVINFAQNKAMKCLQNENLIDKESASLLWNFIVLLCRQNGTVVGTDIAELLLRDHRTVWLPGKSPNEANLIDFTNEAVEQVEEEESGEAQLSFLTGGPAAAASSLERETERFRELLLYGRKKDALESAMKNGLWGHALLLASKMDSRTHARVMTRFANSLPINDPLQTVYQLMSGRMPAASTCCGDEKWGDWRPHLAMVLSNLNNNMDVESRTMATMGDTLASRGLLDAAHFCYLMAQAGFGVYTKKTTKLVLIGSNHSLPFLKFATNEAIQRTEAYEYAQSLGAETCPLPSFQVFKFIYSCRLAEMGLATQAFHYCEAIAKSILTQPHLYSPVLISQLVQMASQLRLFDPQLKEKPEEESLAAPTWLVHLQQVERQIKEGAGVWHQDGALPQQCPGTPSSEMEQLDRPGLSQPGALGIANPLLAVPAPSPEHSSPSVRLLPSAPQTLPDGPLASPARVPMFPVPLPPGPLEPGPGCVTPGPALGFLEPSGPGLPPGVPPLQERRHLLQEARSPDPGIVPQEAPVGNSLSELSEENFDGKFANLTPSRTVPDSEAPPGWDRADSGPTQPPLSLSPAPETKRPGQAAKKETKEPKKGESWFFRWLPGKKKTEAYLPDDKNKSIVWDEKKNQWVNLNEPEEEKKAPPPPPTSMPKTVQAAPPALPGPPGAPVNMYSRRAAGTRARYVDVLNPSGTQRSEPALAPADFVAPLAPLPIPSNLFVPTPDAEEPQLPDGTGREGPAAARGLANPEPAPEPKVLSSAASLPGSELPSSRPEGSQGGEAPGDLPAAGGPPSGAMPFYNPAQLAQACATSGSSRLGRIGQRKHLVLN

SEQ ID NO: 62780 - protein, 200 aa, Homo sapiens
MPKTVQAAPPALPGPPGAPVNMYSRRAAGTRARYVDVLNPSGTQRSEPALAPADFVAPLAPLPIPSNLFVPTPVSSVRPQGRSGRNDGLLALSSPDAEEPQLPDGTGREGPAAARGLANPEPAPEPKVLSSAASLPGSELPSSRPEGSQGGEAPGDLPAAGGPPSGAMPFYNPAQLAQACATSGSSRLGRIGQRKHLVLN

SEQ ID NO: 62781 - protein, 307 aa, Homo sapiens
MSMILSASVIRVRDGLPLSASTDYEQSTGMQECRKYFKMLSRKLAQLPDRCTLKTGHYNINFISSLGVSYMMLCTENYPNVLAFSFLDELQKEFITTYNMMKTNTAVRPYCFIEFDNFIQRTKQRYNNPRSLSTKINLSDMQTEIKLRPPYQISMCELGSANGVTSAFSVDCKGAGKISSAHQRLEPATLSGIVGFILSLLCGALNLIRGFHAIESLLQSDGDDFNYIIAFFLGTAACLYQCYLLVYYTGWRNVKSFLTFGLICLCNMYLYELRNLWQLFFHVTVGAFVTLQIWLRQAQGKAPDYDV

SEQ ID NO: 62782 - protein, 109 aa, Homo sapiens
MSMILSASVIRVRDGLPLSASTDYEQSTGMQECRKYFKMLSRKLAQLPDRCTLKTGHYNINFISSLGVSYMMLCTENYPNVLAFSFLDELQKEFITTYNMMKTNTAVRP

SEQ ID NO: 62783 - protein, 289 aa, Homo sapiens
MSMILSASVIRVRDGLPLSASTDYEQSTGMQECRKYFKMLSRKLAQLPDRCTLKTGHYNINFISSLGVSYMMLCTENYPNVLAFSFLDELQKEFITTYNMMKTNTAVRPYCFIEFDNFIQRTKQRYNNPRSLSTKINLSDMQTEIKLRPPYQISMCELGSANGVTSAFSVDCKGAGKISSAHQRLEPATLSGIVGFILSLLCGALNLIRGFHAIESLLQSDGDDFNYIIAFFLGTAACLYQCYLLVYYTGWRNVKSFLTFGLICLCNMYLYELRNLWQLFFHVTVGAFV

SEQ ID NO: 62784 - protein, 138 aa, Homo sapiens
MSMILSASVIRVRDGLPLSASTDYEQSTGMQECRKYFKMLSRKLAQLPDRCTLKTGHYNINFISSLGVSYMMLCTENYPNVLAFSFLDELQKEFITTYNMMKTNTAVRPYCFIEFDNFIQRTKQRYNNPRSLSTKINL

SEQ ID NO: 62785 - protein, 218 aa, Homo sapiens
MSMILSASVIRVRDGLPLSASTDYEQSTGMQECRKYFKMLSRKLAQLPDRCTLKTGHYNINFISSLGVSYMMLCTENYPNVLAFSFLDELQKEFITTYNMMKTNTAVRPYCFIEFDNFIQRTKQRYNNPRSLSTKINLSDMQTEIKLRPPYQISMCELGSANGVTSAFSVDCKGAGKISSAHQRLEPATLSGIVGFILSLLCGALNLIRGFHAIESLL

SEQ ID NO: 62786 - protein, 101 aa, Homo sapiens
MSMILSASVIRVRDGLPLSASTDYEQSTGMQECRKYFKMLSRKLAQLPDRCTLKTGHYNINFISSLGVSYMMLCTENYPNVLAFSFLDELQKEFITTYNMM

SEQ ID NO: 62787 - protein, 307 aa, Homo sapiens; identical to SEQ ID NO: 62781

SEQ ID NO: 62788 - protein, 765 aa, Homo sapiens
MTTYLEFIQQNEERDGVRFSWNVWPSSRLEATRMVVPVAALFTPLKERPDLPPIQYEPVLCSRTTCRAVLNPLCQVDYRAKLWACNFCYQRNQFPPSYAGISELNQPAELLPQFSSIEYVVLRGPQMPLIFLYVVDTCMEDEDLQALKESMQMSLSLLPPTALVGLITFGRMVQVHELGCEGISKSYVFRGTKDLSAKQLQEMLGLSKVPLTQATRGPQVQQPPPSNRFLQPVQKIDMNLTDLLGELQRDPWPVPQGKRPLRSSGVALSIAVGLLECTFPNTGARIMMFIGGPATQGPGMVVGDELKTPIRSWHDIDKDNAKYVKKGTKHFEALANRAATTGHVIDIYACALDQTGLLEMKCCPNLTGGYMVMGDSFNTSLFKQTFQRVFTKDMHGQFKMGFGGTLEIKTSREIKISGAIGPCVSLNSKGPCVSENEIGTGGTCQWKICGLSPTTTLAIYFEVVNQHNAPIPQGGRGAIQFVTQYQHSSGQRRIRVTTIARNWADAQTQIQNIAASFDQEAAAILMARLAIYRAETEEGPDVLRWLDRQLIRLCQKFGEYHKDDPSSFRFSETFSLYPQFMFHLRRSSFLQVFNNSPDESSYYRHHFMRQDLTQSLIMIQPILYAYSFSGPPEPVLLDSSSILADRILLMDTFFQILIYHGETIAQWRKSGYQDMPEYENFRHLLQAPVDDAQEILHSRFPMPRYIDTEHGGSQARFLLSKVNPSQTHNNMYAWGQESGAPILTDDVSLQVFMDHLKKLAVSSAA

SEQ ID NO: 62789 - protein, 663 aa, Homo sapiens
MPLIFLYVVDTCMEDEDLQALKESMQMSLSLLPPTALVGLITFGRMVQVHELGCEGISKSYVFRGTKDLSAKQLQEMLGLSKVPLTQATRGPQVQQPPPSNRFLQPVQKIDMNLTDLLGELQRDPWPVPQGKRPLRSSGVALSIAVGLLECTFPNTGARIMMFIGGPATQGPGMVVGDELKTPIRSWHDIDKDNAKYVKKGTKHFEALANRAATTGHVIDIYACALDQTGLLEMKCCPNLTGGYMVMGDSFNTSLFKQTFQRVFTKDMHGQFKMGFGGTLEIKTSREIKISGAIGPCVSLNSKGPCVSENEIGTGGTCQWKICGLSPTTTLAIYFEVVNQHNAPIPQGGRGAIQFVTQYQHSSGQRRIRVTTIARNWADAQTQIQNIAASFDQEAAAILMARLAIYRAETEEGPDVLRWLDRQLIRLCQKFGEYHKDDPSSFRFSETFSLYPQRRDFPKTSGEILENQEKARSACLKFMFHLRRSSFLQVFNNSPDESSYYRHHFMRQDLTQSLIMIQPILYAYSFSGPPEPVLLDSSSILADRILLMDTFFQILIYHGETIAQWRKSGYQDMPEYENFRHLLQAPVDDAQEILHSRFPMPRYIDTEHGGSQARFLLSKVNPSQTHNNMYAWGQESGAPILTDDVSLQVFMDHLKKLAVSSAA

SEQ ID NO: 62790 - protein, 563 aa, Homo sapiens
MLGLSKVPLTQATRGPQVQQPPPSNRFLQPVQKIDMNLTDLLGELQRDPWPVPQGKRPLRSSGVALSIAVGLLECTFPNTGARIMMFIGGPATQGPGMVVGDELKTPIRSWHDIDKDNAKYVKKGTKHFEALANRAATTGHVIDIYACALDQTGLLEMKCCPNLTGGYMVMGDSFNTSLFKQTFQRVFTKDMHGQFKMGFGGTLEIKTSREIKISGAIGPCVSLNSKGPCVSENEIGTGGTCQWKICGLSPTTTLAIYFEVVNQHNAPIPQGGRGAIQFVTQYQHSSGQRRIRVTTIARNWADAQTQIQNIAASFDQEAAAILMARLAIYRAETEEGPDVLRWLDRQLIRLCQKFGEYHKDDPSSFRFSETFSLYPQFMFHLRRSSFLQVFNNSPDESSYYRHHFMRQDLTQSLIMIQPILYAYSFSGPPEPVLLDSSSILADRILLMDTFFQILIYHGETIAQWRKSGYQDMPEYENFRHLLQAPVDDAQEILHSRFPMPRYIDTEHGGSQARFLLSKVNPSQTHNNMYAWGQESGAPILTDDVSLQVFMDHLKKLAVSSAA

SEQ ID NO: 62791 - protein, 736 aa, Homo sapiens
MTTYLEFIQQNEERDGVRFSWNVWPSSRLEATRMVVPVAALFTPLKERPDLPPIQYEPVLCSRTTCRAVLNPLCQVDYRAKLWACNFCYQRNQRGPQMPLIFLYVVDTCMEDEDLQALKESMQMSLSLLPPTALVGLITFGRMVQVHELGCEGISKSYVFRGTKDLSAKQLQEMLGLSKVPLTQATRGPQVQQPPPSNRFLQPVQKIDMNLTDLLGELQRDPWPVPQGKRPLRSSGVALSIAVGLLECTFPNTGARIMMFIGGPATQGPGMVVGDELKTPIRSWHDIDKDNAKYVKKGTKHFEALANRAATTGHVIDIYACALDQTGLLEMKCCPNLTGGYMVMGDSFNTSLFKQTFQRVFTKDMHGQFKMGFGGTLEIKTSREIKISGAIGPCVSLNSKGPCVSENEIGTGGTCQWKICGLSPTTTLAIYFEVVNQHNAPIPQGGRGAIQFVTQYQHSSGQRRIRVTTIARNWADAQTQIQNIAASFDQEAAAILMARLAIYRAETEEGPDVLRWLDRQLIRLCQKFGEYHKDDPSSFRFSETFSLYPQFMFHLRRSSFLQVFNNSPDESSYYRHHFMRQDLTQSLIMIQPILYAYSFSGPPEPVLLDSSSILADRILLMDTFFQILIYHGETIAQWRKSGYQDMPEYENFRHLLQAPVDDAQEILHSRFPMPRYIDTEHGGSQARFLLSKVNPSQTHNNMYAWGQESGAPILTDDVSLQVFMDHLKKLAVSSAA

SEQ ID NO: 62792 - protein, 169 aa, Homo sapiens
MTTYLEFIQQNEERDGVRFSWNVWPSSRLEATRMVVPVAALFTPLKERPDLPPIQYEPVLCSRTTCRAVLNPLCQVDYRAKLWACNFCYQRNQFPPSYAGISELNQPAELLPQFSSIEYVVLRGPQMPLIFLYVVDTCMEDEDLQALKESMQMSLSLLPPTALVGLITF

SEQ ID NO: 62793 - protein, 94 aa, Homo sapiens
MTTYLEFIQQNEERDGVRFSWNVWPSSRLEATRMVVPVAALFTPLKERPDLPPIQYEPVLCSRTTCRAVLNPLCQVDYRAKLWACNFCYQRNQV

SEQ ID NO: 62794 - protein, 140 aa, Homo sapiens
MTTYLEFIQQNEERDGVRFSWNVWPSSRLEATRMVVPVAALFTPLKERPDLPPIQYEPVLCSRTTCRAVLNPLCQVDYRAKLWACNFCYQRNQFPPSYAGISELNQPAELLPQFSSIEYVVLRGPQMPLIFLYVVDTCME

SEQ ID NO: 62795 - protein, 40 aa, Homo sapiens
MTTYLEFIQQNEERDGVRFSWNVWPSSRLEATRMVVPVAA

SEQ ID NO: 62796 - protein, 767 aa, Homo sapiens
MATYLEFIQQNEERDGVRFSWNVWPSSRLEATRMVVPLACLLTPLKERPDLPPVQYEPVLCSRPTCKAVLNPLCQVDYRAKLWACNFCFQRNQFPPAYGGISEVNQPAELMPQFSTIEYVIQRGAQSPLIFLYVVDTCLEEDDLQALKESLQMSLSLLPPDALVGLITFGRMVQVHELSCEGISKSYVFRGTKDLTAKQIQDMLGLTKPAMPMQQARPAQPQEHPFASSRFLQPVHKIDMNLTDLLGELQRDPWPVTQGKRPLRSTGVALSIAVGLLEGTFPNTGARIMLFTGGPPTQGPGMVVGDELKIPIRSWHDIEKDNARFMKKATKHYEMLANRTAANGHCIDIYACALDQTGLLEMKCCANLTGGYMVMGDSFNTSLFKQTFQRIFTKDFNGDFRMAFGATLDVKTSRELKIAGAIGPCVSLNVKGPCVSENELGVGGTSQWKICGLDPTSTLGIYFEVVNQHNTPIPQGGRGAIQFVTHYQHSSTQRRIRVTTIARNWADVQSQLRHIEAAFDQEAAAVLMARLGVFRAESEEGPDVLRWLDRQLIRLCQKFGQYNKEDPTSFRLSDSFSLYPQFMFHLRRSPFLQVFNNSPDESSYYRHHFARQDLTQSLIMIQPILYSYSFHGPPEPVLLDSSSILADRILLMDTFFQIVIYLGETIAQWRKAGYQDMPEYENFKHLLQAPLDDAQEILQARFPMPRYINTEHGGSQARFLLSKVNPSQTHNNLYAWGQETGAPILTDDVSLQVFMDHLKKLAVSSAC

SEQ ID NO: 62797 - protein, 767 aa, Homo sapiens; identical to SEQ ID NO: 62796

SEQ ID NO: 62798 - protein, 767 aa, Homo sapiens; identical to SEQ ID NO: 62796

SEQ ID NO: 62799 - protein, 767 aa, Homo sapiens; identical to SEQ ID NO: 62796

SEQ ID NO: 62800 - protein, 246 aa, Homo sapiens
QRRIRVTTIARNWADVQSQLRHIEAAFDQEAAAVLMARLGVFRAESEEGPDVLRWLDRQLIRLCQKFGQYNKEDPTSFRLSDSFSLYPQFMFHLRRSPFLQVFNNSPDESSYYRHHFARQDLTQSLIMIQPILYSYSFHGPPETIAQWRKAGYQDMPEYENFKHLLQAPLDDAQEILQARFPMPRYINTEHGGSQARFLLSKVNPSQTHNNLYAWGQETGAPILTDDVSLQVFMDHLKKLAVSSAC

SEQ ID NO: 62801 - protein, 331 aa, Homo sapiens
MATYLEFIQQNEERDGVRFSWNVWPSSRLEATRMVVPLACLLTPLKERPDLPPVQYEPVLCSRPTCKAVLNPLCQVDYRAKLWACNFCFQRNQFPPAYGGISEVNQPAELMPQFSTIEYVIQRGAQSPLIFLYVVDTCLEEDDLQALKESLQMSLSLLPPDALVGLITFGRMVQVHELSCEGISKSYVFRGTKDLTAKQIQDMLGLTKPAMPMQQARPAQPQEHPFASSRFLQPVHKIDMNLTDLLGELQRDPWPVTQGKRPLRSTGVALSIAVGLLEGTFPNTGARIMLFTGGPPTQGPGMVVGDELKIPIRSWHDIEKDNARFMKKATK

SEQ ID NO: 62802 - protein, 399 aa, Homo sapiens
MAERRRHKKRIQEVGEPSKEEKAVAKYLRFNCPTKSTNMMGHRVDYFIASKAVDCLLDSKWAKAKKGEEALFTTRESVVDYCNRLLKKQFFHRALKVMKMKYDKDIKKEKDKGKAESGKEEDKKSKKENIKDEKTKKEKEKKKDGEKEESKKEETPGTPKKKETKKKFKLEPHDDQVFLDGNEVYVWIYDPVHFKTFVMGLILVIAVIAATLFPLWPAEMRVGVYYLSVGAGCFVASILLLAVARCILFLIIWLITGGRHHFWFLPNLTADVGFIDSFRPLYTHEYKGPKADLKKDEKSETKKQQKSDSEEKSDSEKKEDEEGKVGPGNHGTEGSGGERHSDTDSDRREDDRSQHSSGNGNDFEMITKEELEQQTDGDCEEDEEEENDGETPKSSHEKS

SEQ ID NO: 62803 - protein, 399 aa, Homo sapiens; identical to SEQ ID NO: 62802

SEQ ID NO: 62804 - protein, 123 aa, Homo sapiens
MAERRRHKKRIQEVGEPSKDEKSETKKQQKSDSEEKSDSEKKEDEEGKVGPGNHGTEGSGGERHSDTDSDRREDDRSQHSSGNGNDFEMITKEELEQQTDGDCEEDEEEENDGETPKSSHEKS

SEQ ID NO: 62805 - protein, 760 aa, Homo sapiens
MAGQQFQYDDSGNTFFYFLTSFVGLIVIPATYYLWPRDQNAEQIRLKNIRKVYGRCMWYRLRLLKPQPNIIPTVKKIVLLAGWALFLFLAYKVSKTDREYQEYNPYEVLNLDPGATVAEIKKQYRLLSLKYHPDKGGDEVMFMRIAKAYAALTDEESRKNWEEFGNPDGPQATSFGIALPAWIVDQKNSILVLLVYGLAFMVILPVVVGSWWYRSIRYSGDQILIRTTQIYTYFVYKTRNMDMKRLIMVLAGASEFDPQYNKDATSRPTDNILIPQLIREIGSINLKKNEPPLTCPYSLKARVLLLSHLARMKIPETLEEDQQFMLKKCPALLQEMVNVICQLIVMARNREEREFRAPTLASLENCMKLSQMAVQGLQQFKSPLLQLPHIEEDNLRRVSNHKKYKIKTIQDLVSLKESDRHTLLHFLEDEKYEEVMAVLGSFPYVTMDIKSQVLDDEDSNNITVGSLVTVLVKLTRQTMAEVFEKEQSICAAEEQPAEDGQGETNKNRTKGGWQQKSKGPKKTAKSKKKKPLKKKPTPVLLPQSKQQKQKQANGVVGNEAAVKEDEEEVSDKGSDSEEEETNRDSQSEKDDGSDRDSDREQDEKQNKDDEAEWQELQQSIQRKERALLETKSKITHPVYSLYFPEEKQEWWWLYIADRKEQTLISMPYHVCTLKDTEEVELKFPAPGKPGNYQYTVFLRSDSYMGLDQIKPLKLEVHEAKPVPENHPQWDTAIEGDEDQEDSEGFEDSFEEEEEEEEDDD

SEQ ID NO: 62806 - protein, 417 aa, Homo sapiens
MFMRIAKAYAALTDEESRKNWEEFGNPDGPQATSFGIALPAWIVDQKNSILVLLVYGLAFMVILPVVVGSWWYRSIRYSGDQILIRTTQIYTYFVYKTRNMDMKRLIMVLAGASEFDPQYNKDATSRPTDNILIPQLIREIGSINLKKNEPPLTCPYSLKARVLLLSHLARMKIPETLEEDQQFMLKKCPALLQEMVNVICQLIVMARNREEREFRAPTLASLENCMKLSQMAVQGLQQFKSPLLQLPHIEEDNLRRVSNHKKYKIKTIQDLVSLKESDRHTLLHFLEDEKYEEVMAVLGSFPYVTMDIKSQVLDDEDSNNITVGSLVTVLVKLTRQTMAEVFEKEQSICAAEEQPAEDGQGETNKNRTKGGWQQKSKGPKKTAKKKKETFKKKTYTCAITTVKATETKAGKWSRWE

SEQ ID NO: 62807 - protein, 378 aa, Homo sapiens
EHEREFRAPTLASLENCMKLSQMAVQGLQQFKSPLLQLPHIEEDNLRRVSNHKKYKIKTIQDLVSLKESDRHTLLHFLEDEKYEEVMAVLGSFPYVTMDIKSQVLDDEDSNNITVGSLVTVLVKLTRQTMAEVFEKEQSICAAEEQPAEDGQGETNKNRTKGGWQQKSKGPKKTAKSKKKKPLKKKPTPVLLPQSKQQKQKQANGVVGNEAAVKEDEEEVSDKGSDSEEEWQELQQSIQRKERALLETKSKITHPVYSLYFPEEKQEWWWLYIADRKEQTLISMPYHVCTLKDTEEVELKFPAPGKPGNYQYTVFLRSDSYMGLDQIKPLKLEVHEAKPVPENHPQWDTAIEGDEDQEDSEGFEDSFEEEEEEEEDDD

SEQ ID NO: 62808 - protein, 781 aa, Homo sapiens
MVRVLRSMCLPQLCSHILSVCSGTTSDRNVYSVPGSQYLYNQPSCYRGFQTVKHRNENTCPLPQEMKALFKKKTYDEKKTYDQQKFDSERADGTISSEIKSARGSHHLSIYAENSLKSDGYHKRTDRKSRIIAKNVSTSKPEFEFTTLDFPELQGAENNMSEIQKQPKWGPVHSVSTDISLLREVVKPAAVLSKGEIVVKNNPNESVTANAATNSPSCTRELSWTPMGYVVRQTLSTELSAAPKNVTSMINLKTIASSADPKNVSIPSSEALSSDPSYNKEKHIIHPTQKSKASQGSDLEQNEASRKNKKKKEKSTSKYEVLTVQEPPRIEDAEEFPNLAVASERRDRIETPKFQSKQQPQDNFKNNVKKSQLPVQLDLGGMLTALEKKQHSQHAKQSSKPVVVSVGAVPVLSKECASGERGRRMSQMKTPHNPLDSSAPLMKKGKQREIPKAKKPTSLKKIILKERQERKQRLQENAVSPAFTSDDTQDGESGGDDQFPEQAELSGPEGMDELISTPSVEDKSEEPPGTELQRDTEASHLAPNHTTFPKIHSRRFRDYCSQMLSKEVDACVTDLLKELVRFQDRMYQKDPVKAKTKRRLVLGLREVLKHLKLKKLKCVIISPNCEKIQSKGGLDDTLHTIIDYACEQNIPFVFALNRKALGRSLNKAVPVSVVGIFSYDGAQDQFHKMVELTVAARQAYKTMLENVQQELVGEPRPQAPPSLPTQGPSCPAEDGPPALKEKEEPHYIEIWKKHLEAYSGCTLELEESLEASTSQMMNLNL

SEQ ID NO: 62809 - protein, 854 aa, Homo sapiens
MASEGPREPESEGIKLSADVKPFVPRFAGLNVAWLESSEACVFPSSAATYYPFVQEPPVTEQKIYTEDMAFGASTFPPQYLSSEITLHPYAYSPYTLDSTQNVYSVPGSQYLYNQPSCYRGFQTVKHRNENTCPLPQEMKALFKKKTYDEKKTYDQQKFDSERADGTISSEIKSARGSHHLSIYAENSLKSDGYHKRTDRKSRIIAKNVSTSKPEFEFTTLDFPELQGAENNMSEIQKQPKWGPVHSVSTDISLLREVVKPAAVLSKGEIVVKNNPNESVTANAATNSPSCTRELSWTPMGYVVRQTLSTELSAAPKNVTSMINLKTIASSADPKNVSIPSSEALSSDPSYNKEKHIIHPTQKSKASQGSDLEQNEASRKNKKKKEKSTSKYEVLTVQEPPRIEDAEEFPNLAVASERRDRIETPKFQSKQQPQDNFKNNVKKSQLPVQLDLGGMLTALEKKQHSQHAKQSSKPVVVSVGAVPVLSKECASGERGRRMSQMKTPHNPLDSSAPLMKKGKQREIPKAKKPTSLKKIILKERQERKQRLQENAVSPAFTSDDTQDGESGGDDQFPEQAELSGPEGMDELISTPSVEDKSEEPPGTELQRDTEASHLAPNHTTFPKIHSRRFRDYCSQMLSKEVDACVTDLLKELVRFQDRMYQKDPVKAKTKRRLVLGLREVLKHLKLKKLKCVIISPNCEKIQSKGGLDDTLHTIIDYACEQNIPFVFALNRKALGRSLNKAVPVSVVGIFSYDGAQDQFHKMVELTVAARQAYKTMLENVQQELVGEPRPQAPPSLPTQGPSCPAEDGPPALKEKEEPHYIEIWKKHLEAYSGCTLELEESLEASTSQMMNLNL

SEQ ID NO: 62810 - protein, 860 aa, Homo sapiens
PASRRPAAGLRDAASSAPRGMASEGPREPESEGIKLSADVKPFVPRFAGLNVAWLESSEACVFPSSAATYYPFVQEPPVTEQKIYTEDMAFGASTFPPQYLSSEITLHPYAYSPYTLDSTQNVYSVPGSQYLYNQPSCYRGFQTVKHRNENTCPLPQEMKALFKKKTYDEKKTYDQQKFDSERADGTISSEIKSARGSHHLSIYAENSLKSDGYHKRTDRKSRIIAKNVSTSKPEFEFTTLDFPELQGAENNMSEIQKQPKWGPVHSVSTDISLLREVVKPAAVLSKGEIVVKNNPNESVLMPLPILLHVQETLSTELSAAPKNVTSMINLKTIASSADPKNVSIPSSEALSSDPSYNKEKHIIHPTQKSKASQGSDLEQNEASRKNKKKKEKSTSKYEVLTVQEPPRIEDAEEFPNLAVASERRDRIETPKFQSKQQPQDNFKNNVKKSQLPVQLDLGGMLTALEKKQHSQHAKQSSKPVVVSVGAVPVLSKECASGERGRRMSQMKTPHNPLDSSAPLMKKGKQREIPKAKKPTSLKKIILKERQERKQRLQENAVSPAFTSDDTQDGESGGDDQFPEQAELSGPEGMDELISTPSVEDKSEEPPGTELQRDTEASHLAPNHTTFPKIHSRRFRDYCSQMLSKEVDACVTDLLKELVRFQDRMYQKDPVKAKTKRRLVLGLREVLKHLKLKKLKCVIISPNCEKIQSKGGLDDTLHTIIDYACEQNIPFVFALNRKALGRSLNKAVPVSVVGIFSYDGAQDQFHKMVELTVAARQAYKTMLENVQQELVGEPRPQAPPSLPTQGPSCPAEDGPPALKEKEEPHYIEIWKKHLEAYSGCTLELEESLEASTSQMMNLNL

SEQ ID NO: 62811 - protein, 275 aa, Homo sapiens
GTISSEIKSARGSHHLSIYAENSLKSDGYHKRTDRKSRIIAKNVSTSKPEFEFTTLDFPELQGAENNMSEIQKQPKWGPVHSVSTDISLLREVVKPAAVLSKGEIVVKNNPNESVTANAATNSPSCTRADPKNVSIPSSEALSSDPSYNKEKHIIHPTQKSKASQGSDLEQNEASRKNKKKKEKSTSKYEVLTVQEPPRIEDAEEFPNLAVASERRDRIETPKFQSKQQPQDNFKNNVKKSQLPVQLDLGGMLTALEKKQHSQHAKQSSKPVVVS

SEQ ID NO: 62812 - protein, 60 aa, Homo sapiens
MPLPILLHVQEQILKMLVYHLLKLYLRILPTTKKNTLFILPKSLKHHKVVTLNKMKPQER

SEQ ID NO: 62813 - protein, 786 aa, Homo sapiens
MAFGASTFPPQYLSSEITLHPYAYSPYTLDSTQNVYSVPGSQYLYNQPSCYRGFQTVKHRNENTCPLPQEMKALFKKKTYDEKKTYDQQKFDSERADGTISSEIKSARGSHHLSIYAENSLKSDGYHKRTDRKSRIIAKNVSTSKPEFEFTTLDFPELQGAENNMSEIQKQPKWGPVHSVSTDISLLREVVKPAAVLSKGEIVVKNNPNESVTANAATNSPSCTRELSWTPMGYVVRQTLSTELSAAPKNVTSMINLKTIASSADPKNVSIPSSEALSSDPSYNKEKHIIHPTQKSKASQGSDLEQNEASRKNKKKKEKSTSKYEVLTVQEPPRIEDAEEFPNLAVASERRDRIETPKFQSKQQPQDNFKNNVKKSQLPVQLDLGGMLTALEKKQHSQHAKQSSKPVVVSVGAVPVLSKECASGERGRRMSQMKTPHNPLDSSAPLMKKGKQREIPKAKKPTSLKKIILKERQERKQRLQENAVSPAFTSDDTQDGESGGDDQFPEQAELSGPEGMDELISTPSVEDKSEEPPGTELQRDTEASHLAPNHTTFPKIHSRRFRDYCSQMLSKEVDACVTDLLKELVRFQDRMYQKDPVKAKTKRRLVLGLREVLKHLKLKKLKCVIISPNCEKIQSKGGLDDTLHTIIDYACEQNIPFVFALNRKALGRSLNKAVPVSVVGIFSYDGAQDQFHKMVELTVAARQAYKTMLENVQQELVGEPRPQAPPSLPTQGPSCPAEDGPPALKEKEEPHYIEIWKKHLEAYSGCTLELEESLEASTSQMMNLNL

SEQ ID NO: 62814 - protein, 248 aa, Homo sapiens
MQTCPLAFPGHVSQALGTLLFLAASLSAQNEGWDSPICTEGVVSVSWGENTVMSCNISNAFSHVNIKLRAHGQESAIFNEVAPGYFSRDGWQLQVQGGVAQLVIKGARDSHAGLYMWHLVGHQRNNRQVTLEVSGAEPQSAPDTGFWPVPAVVTAVFILLVALVMFAWYRCRCSQQRREKKFFLLEPQMKVAALRAGAQQGLSRASAELWTPDSEPTPRPLALVFKPSPLGALELLSPQPLFPYAADP

SEQ ID NO: 62815 - protein, 295 aa, Homo sapiens
MLQGPGSLLLLFLASHCCLGSARGLFLFGQPDFSYKRSNCKPIPANLQLCHGIEYQNMRLPNLLGHETMKEVLEQAGAWIPLVMKQCHPDTKKFLCSLFAPVCLDDLDETIQPCHSLCVQVKDRCAPVMSAFGFPWPDMLECDRFPQDNDLCIPLASSDHLLPATEEAPKVCEACKNKNDDDNDIMETLCKNDFALKIKVKEITYINRDTKIILETKSKTIYKLNGVSERDLKKSVLWLKDSLQCTCEEMNDINAPYLVMGQKQGGELVITSVKRWQKGQREFKRISRSIRKLQC

SEQ ID NO: 62816 - protein, 103 aa, Homo sapiens
MASRWAVQLLLVAAWSMGCGEALKCYTCKEPMTSASCRTITRCKPEDTACMTTLVTVEAEYPFNQSPVVTRSCSSSCVATDPDSIGAAHLIFCCFRDLCNSEL

SEQ ID NO: 62817 - protein, 211 aa, Homo sapiens
MISRMEKMTMMMKILIMFALGMNYWSCSGFPVYDYDPSSLRDALSASVVKVNSQSLSPYLFRAFRSSLKRVEVLDENNLVMNLEFSIRETTCRKDSGEDPATCAFQRDYYVSTAVCRSTVKVSAQQVQGVHARCSWSSSTSESYSSEEMIFGDMLGSHKWRNNYLFGLISDESISEQFYDRSLGIMRRVLPPGNRRYPNHRHRARINTDFE

SEQ ID NO: 62818 - protein, 211 aa, Homo sapiens; identical to SEQ ID NO: 62817

SEQ ID NO: 62819 - protein, 121 aa, Homo sapiens
MAPRPLLLLLLLLGGSAARPAPPRARRHSDGTFTSELSRLREGARLQRLLQGLVGKRSEQDAENSMAWTRLSAGLLCPSGSNMPILQAWMPLDGTWSPWLPPGPMVSEPAGAAAEGTLRPR

SEQ ID NO: 62820 - protein, 440 aa, Homo sapiens
MRPHLSPPLQQLLLPVLLACAAHSTGALPRLCDVLQVLWEEQDQCLQELSREQTGDLGTEQPVPGCEGMWDNISCWPSSVPGRMVEVECPRFLRMLTSRNGSLFRNCTQDGWSETFPRPNLACGVNVNDSSNEKRHSYLLKLKVMYTVGYSSSLVMLLVALGILCAFRRLHCTRNYIHMHLFVSFILRALSNFIKDAVLFSSDDVTYCDAHRAGCKLVMVLFQYCIMANYSWLLVEGLYLHTLLAISFFSERKYLQGFVAFGWGSPAIFVALWAIARHFLEDVGCWDINANASIWWIIRGPVILSILINFILFINILRILMRKLRTQETRGNEVSHYKRLARSTLLLIPLFGIHYIVFAFSPEDAMEIQLFFELALGSFQGLVVAVLYCFLNGEVQLEVQKKWQQWHLREFPLHPVASFSNSTKASHLEQSQGTCRTSII

SEQ ID NO: 62821 - protein, 95 aa, Homo sapiens
MKLLMVLMLAALLLHCYADSGCKLLEDMVEKTINSDISIPEYKELLQEFIDSDAAAEAMGKFKQCFLNQSHRTLKNFGLMMHTVYDSIWCNMKSN

SEQ ID NO: 62822 - protein, 93 aa, Homo sapiens
MKLLMVLMLAALSQHCYAGSGCPLLENVISKTINPQVSKTEYKELLQEFIDDNATTNAIDELKECFLNQTDETLSNVEVFMQLIYDSSLCDLF

SEQ ID NO: 62823 - protein, 120 aa, Homo sapiens
MKLLMVLMLAALSQHCYAGSGCPLLENVISKTINPQVSKTEYKELLQEFIDDNATTNAIDELKECFLNQTDETLSNVEVFMVISFSSYKLFKSPDQGQVGSSFLTDNAKATSEQAFSYIG

SEQ ID NO: 62824 - protein, 104 aa, Homo sapiens
MKLAALLGLCVALSCSSAAAFLVGSAKPVAQPVAALESAAEAGAGTLANPLGTLNPLKLLLSSLGIPVNHLIEGSQKCVAELGPQAVGAVKALKALLGALTVFG

SEQ ID NO: 62825 - protein, 93 aa, Homo sapiens
MKLVTIFLLVTISLCSYSATAFLINKVPLPVDKLAPLPLDNILPFMDPLKLLLKTLGISVEHLVEGLRKCVNELGPEASEAVKKLLEALSHLV

SEQ ID NO: 62826 - protein, 617 aa, Homo sapiens
MAEAKTHWLGAALSLIPLIFLISGAEAASFQRNQLLQKEPDLRLENVQKFPSPEMIRALEYIENLRQQAHKEESSPDYNPYQGVSVPLQQKENGDESHLPERDSLSEEDWMRIILEALRQAENEPQSAPKENKPYALNSEKNFPMDMSDDYETQQWPERKLKHMQFPPMYEENSRDNPFKRTNEIVEEQYTPQSLATLESVFQELGKLTGPNNQKRERMDEEQKLYTDDEDDIYKANNIAYEDVVGGEDWNPVEEKIESQTQEEVRDSKENIEKNEQINDEMKRSGQLGIQEEDLRKESKDQLSDDVSKVIAYLKRLVNAAGSGRLQNGQNGERATRLFEKPLDSQSIYQLIEISRNLQIPPEDLIEMLKTGEKPNGSVEPERELDLPVDLDDISEADLDHPDLFQNRMLSKSGYPKTPGRAGTEALPDGLSVEDILNLLGMESAANQKTSYFPNPYNQEKVLPRLPYGAGRSRSNQLPKAAWIPHVENRQMAYENLNDKDQELGEYLARMLVKYPEIINSNQVKRVPGQGSSEDDLQEEEQIEQAIKEHLNQGSSQETDKLAPVSKRFPVGPPKNDDTPNRQYWDEDLLMKVLEYLNQEKAEKGREHIAKRAMENM

SEQ ID NO: 62827 - protein, 144 aa, Homo sapiens
MAEAKTHWLGAALSLIPLIFLISGAEAASFQRNQLLQKEPDLRLENVQKFPSPEMIRALEYIENLRQQAHKEESSPDYNPYQGVSVPLQQKENGDESHLPERDSLSEEDWMRIILEALRQAENEPQSAPKENKPYALNSEKNFP

SEQ ID NO: 62828 - protein, 125 aa, Homo sapiens
MAEAKTHWLGAALSLIPLIFLISGAEAASFQRNQLLQKEPDLRLENVQKFPSPEMIRALEYIENLRQQAHKEESSPDYNPYQGVSVPLQQKENGDESHLPERDSLSEEDWMRIILEALRQAENEP

SEQ ID NO: 62829 - protein, 477 aa, Homo sapiens
MAEAKTHWLGAALSLIPLIFLISGAEAASFQRNQLLQKEPDLRLENVQKFPSPEMIRALEYIENLRQQAHKEESSPDYNPYQGVSVPLQQKENGDESHLPERDSLRGEDWNPVEEKIESQTQEEVRDSKENIEKNEQINDEMKRSGQLGIQEEDLRKESKDQLSDDVSKVIAYLKRLVNAAGSGRLQNGQNGERATRLFEKPLDSQSIYQLIEISRNLQIPPEDLIEMLKTGEKPNGSVEPERELDLPVDLDDISEADLDHPDLFQNRMLSKSGYPKTPGRAGTEALPDGLSVEDILNLLGMESAANQKTSYFPNPYNQEKVLPRLPYGAGRSRSNQLPKAAWIPHVENRQMAYENLNDKDQELGEYLARMLVKYPEIINSNQVKRVPGQGSSEDDLQEEEQIEQAIKEHLNQGSSQETDKLAPVSKRFPVGPPKNDDTPNRQYWDEDLLMKVLEYLNQEKAEKGREHIAKRAMENM

SEQ ID NO: 62830 - protein, 468 aa, Homo sapiens
MGFLGTGTWILVLVLPIQAFPKPGGSQDKSLHNRELSAERPLNEQIAEAEEDKIKKTYPPENKPGQSNYSFVDNLNLLKAITEKEKIEKERQSIRSSPLDNKLNVEDVDSTKNRKLIDDYDSTKSGLDHKFQDDPDGLHQLDGTPLTAEDIVHKIAARIYEENDRAVFDKIVSKLLNLGLITESQAHTLEDEVAEVLQKLISKEANNYEEDPNKPTSWTENQAGKIPEKVTPMAAIQDGLAKGENDETVSNTLTLTNGLERRTKTYSEDNFEELQYFPNFYALLKSIDSEKEAKEKETLITIMKTLIDFVKMMVKYGTISPEEGVSYLENLDEMIALQTKNKLEKNATDNISKLFPAPSEKSHEETDSTKEEAAKMEKEYGSLKDSTKDDNSNPGGKTDEPKGKTEAYLEAIRKNIEWLKKHDKKGNKEDYDLSKMRDFINKQADAYVEKGILDKEEAEAIKRIYSSL

SEQ ID NO: 62831 - protein, 236 aa, Homo sapiens
MAAIQDGLAKGENDETVSNTLTLTNGLERRTKTYSEDNFEELQYFPNFYALLKSIDSEKEAKEKETLITIMKTLIDFVKMMVKYGTISPEEGVSYLENLDEMIALQTKNKLEKNATDNISKLFPAPSEKSHEETDSTKEEAAKMEKEYGSLKDSTKDDNSNPGGKTDEPKGKTEAYLEAIRKNIEWLKKHDKKGNKEDYDLSKMRDFINKQADAYVEKGILDKEEAEAIKRIYSSL

SEQ ID NO: 62832 - protein, 57 aa, Homo sapiens
MAAIQDGLAKGENDETVSNTLTLTNGLERRTKTYSEDNFEELQYFPNFYALLKSIDS

SEQ ID NO: 62833 - protein, 329 aa, Homo sapiens
MSAFDTNPFADPVDVNPFQDPSVTQLTNAPQGGLAEFNPFSETNAATTVPVTQLPGSSQPAVLQPSVEPTQPTPQAVVSAAQAGLLRQQEELDRKAAELERKERELQNTVANLHVRQNNWPPLPSWCPVKPCFYQDFSTEIPADYQRICKMLYYLWMLHSVTLFLNLLACLAWFSGNSSKGVDFGLSILWFLIFTPCAFLCWYRPIYKAFRSDNSFSFFVFFFVFFCQIGIYIIQLVGIPGLGDSGWIAALSTLDNHSLAISVIMMVVAGFFTLCAVLSVFLLQRVHSLYRRTGASFQQAQEEFSQGIFSSRTFHRAASSAAQGAFQGN

SEQ ID NO: 62834 - protein, 287 aa, Homo sapiens
MSAFDTNPFADTNAATTVPVTQLPGSSQPAVLQPSVEPTQPTPQAVVSAAQAGLLRQQEELDRKAAELERKERELQNTVANLHVRQNNWPPLPSWCPVKPCFYQDFSTEIPADYQRICKMLYYLWMLHSVTLFLNLLACLAWFSGNSSKGVDFGLSILWFLIFTPCAFLCWYRPIYKAFRSDNSFSFFVFFFVFFCQIGIYIIQLVGIPGLGDSGWIAALSTLDNHSLAISVIMMVVAGFFTLCAVLSVFLLQRVSGVGRADSKWEEAGNRFLPLPRDVFHHCSWAS

SEQ ID NO: 62835 - protein, 347 aa, Homo sapiens
MAQSRDGGNPFAEPSELDNPFQDPAVIQHRPSRQYATLDVYNPFETREPPPAYEPPAPAPLPPPSAPSLQPSRKLSPTEPKNYGSYSTQASAAAATAELLKKQEELNRKAEELDRRERELQHAALGGTATRQNNWPPLPSFCPVQPCFFQDISMEIPQEFQKTVSTMYYLWMCSTLALLLNFLACLASFCVETNNGAGFGLSILWVLLFTPCSFVCWYRPMYKAFRSDSSFNFFVFFFIFFVQDVLFVLQAIGIPGWGFSGWISALVVPKGNTAVSVLMLLVALLFTGIAVLGIVMLKRIHSLYRRTGASFQKAQQEFAAGVFSNPAVRTAAANAAAGAAENAFRAP

SEQ ID NO: 62836 - protein, 321 aa, Homo sapiens
MAQSRDGGNPFAEPSELDNPFQPPPAYEPPAPAPLPPPSAPSLQPSRKLSPTEPKNYGSYSTQASAAAATAELLKKQEELNRKAEELDRRERELQHAALGGTATRQNNWPPLPSFCPVQPCFFQDISMEIPQEFQKTVSTMYYLWMCSTLALLLNFLACLASFCVETNNGAGFGLSILWVLLFTPCSFVCWYRPMYKAFRSDSSFNFFVFFFIFFVQDVLFVLQAIGIPGWGFSGWISALVVPKGNTAVSVLMLLVALLFTGIAVLGIVMLKRIHSLYRRTGASFQKAQQEFAAGVFSNPAVRTAAANAAAGAAENAFRAP

SEQ ID NO: 62837 - protein, 229 aa, Homo sapiens
MSEKENNFPPLPKFIPVKPCFYQNFSDEIPVEHQVLVKRIYRLWMFYCATLGVNLIACLAWWIGGGSGTNFGLAFVWLLLFTPCGYVCWFRPVYKAFRADSSFNFMAFFFIFGAQFVLTVIQAIGFSGWGACGWLSAIGFFQYSPGAAVVMLLPAIMFSVSAAMMAIAIMKVHRIYRGAGGSFQKAQTEWNTGTWRNPPSREAQYNNFSGNSLPEYPTVPSYPGSGQWP

SEQ ID NO: 62838 - protein, 195 aa, Homo sapiens
MSEKENNFPPLPKFIPVKPCFYQNFSDEIPVEHQVLVKRIYRLWMFYCATLGVNLIACLAWWIGGGSGTNFGLAFVWLLLFTPCGYVCWFRPVYKAFRGWLSAIGFFQYSPGAAVVMLLPAIMFSVSAAMMAIAIMKVHRIYRGAGGSFQKAQTEWNTGTWRNPPSREAQYNNFSGNSLPEYPTVPSYPGSGQWP

SEQ ID NO: 62839 - protein, 195 aa, Homo sapiens
MIQRHIPVCGRSRPYQRGCVVQAGSSGSPGWSHFKIICGLAPAPSEAVLSARNNCEHTGGCRLQPALVGETEMSEKENNFPPLPKFIPVKPCFYQNFSDEIPVEHQVLVKRIYRLWMFYCATLGVNLIACLAWWIGGGSGTNFGLAFVWLLLFTPCGYVCWFRPVYKAFRADSSFNFMAFFFIFGAQFVLTVIQA

SEQ ID NO: 62840 - protein, 235 aa, Homo sapiens
MAEKVNNFPPLPKFIPLKPCFYQDFEADIPPQHVSMTKRLYYLWMLNSVTLAVNLVGCLAWLIGGGGATNFGLAFLWLILFTPCSYVCWFRPIYKAFKTDSSFSFMAFFFTFMAQLVISIIQAVGIPGWGVCGWIATISFFGTNIGSAVVMLIPTVMFTVMAVFSFIALSMVHKFYRGSGGSFSKAQEEWTTGAWKNPHVQQAAQNAAMGAAQGAMNQPQTQYSATPNYTYSNEM

SEQ ID NO: 62841 - protein, 235 aa, Homo sapiens; identical to SEQ ID NO: 62840

SEQ ID NO: 62842 - protein, 164 aa, Homo sapiens
MFLPRLRGRYSSPACQHDQAPLLPLDVTDSSFSFMAFFFTFMAQLVISIIQAVGIPGWGVCGWIATISFFGTNIGSAVVMLIPTVMFTVMAVFSFIALSMVHKFYRGSGGSFSKAQEEWTTGAWKNPHVQQAAQNAAMGAAQGAMNQPQTQYSATPNYTYSNEM

SEQ ID NO: 62843 - protein, 360 aa, Homo sapiens
MFVARSIAADHKDLIHDVSFDFHGRRMATCSSDQSVKVWDKSESGDWHCTASWKTHSGSVWRVTWAHPEFGQVLASCSFDRTAAVWEEIVGESNDKLRGQSHWVKRTTLVDSRTSVTDVKFAPKHMGLMLATCSADGIVRIYEAPDVMNLSQWSLQHEISCKLSCSCISWNPSSSRAHSPMIAVGSDDSSPNAMAKVQIFEYNENTRKYAKAETLMTVTDPVHDIAFAPNLGRSFHILAIATKDVRIFTLKPVRKELTSSGGPTKFEIHIVAQFDNHNSQVWRVSWNITGTVLASSGDDGCVRLWKANYMDNWKCTGILKGNGSPVNGSSQQGTSNPSLGSTIPSLQNSLNGSSAGRKHS

SEQ ID NO: 62844 - protein, 421 aa, Homo sapiens
MFVARSIAADHKDLIHDVSFDFHGRRMATCSSDQSVKVWDKSESGDWHCTASWKTHSGSVWRVTWAHPEFGQVLASCSFDRTAAVWEEIVGESNDKLRGQSHWVKRTTLVDSRTSVTDVKFAPKHMGLMLATCSADGIVRIYEAPDVMNLSQWSLQHEISCKLSCSCISWNPSSSRAHSPMIAVGSDDSSPNAMAKVQIFEYNENTRKYAKAETLMTVTDPVHDIAFAPNLGRSFHILAIATKDVRIFTLKPVRKELTSSGGPTKFEIHIVAQFDNHNSQVWRVSWNITGTVLASSGDDGCVRLWKANYMDNWKCTGILKGNGSPVNGSSQQGTSNPSLGSTIPSLQNSLNGSSAGRYFFTPLDSPRAGSRWSSYAQLLPPPPPPLVEHSCDADTANLQYPHPRRRYLSRPLNPLPENEGI

SEQ ID NO: 62845 - protein, 1024 aa, Homo sapiens
MPAARPPAAGLRGISLFLALLLGSPAAALERDALPEGDASPLGPYLLPSGAPERGSPGKEHPEERVVTAPPSSSQSAEVLGELVLDGTAPSAHHDIPALSPLLPEEARPKHALPPKKKLPSLKQVNSARKQLRPKATSAATVQRAGSQPASQGLDLLSSSTEKPGPPGDPDPIVASEEASEVPLWLDRKESAVPTTPAPLQISPFTSQPYVAHTLPQRPEPGEPGPDMAQEAPQEDTSPMALMDKGENELTGSASEESQETTTSTIITTTVITTEQAPALCSVSFSNPEGYIDSSDYPLLPLNNFLECTYNVTVYTGYGVELQVKSVNLSDGELLSIRGVDGPTLTVLANQTLLVEGQVIRSPTNTISVYFRTFQDDGLGTFQLHYQAFMLSCNFPRRPDSGDVTVMDLHSGGVAHFHCHLGYELQGAKMLTCINASKPHWSSQEPICSAPCGGAVHNATIGRVLSPSYPENTNGSQFCIWTIEAPEGQKLHLHFERLLLHDKDRMTVHSGQTNKSALLYDSLQTESVPFEGLLSEGNTIRIEFTSDQARAASTFNIRFEAFEKGHCYEPYIQNGNFTTSDPTYNIGTIVEFTCDPGHSLEQGPAIIECINVRDPYWNDTEPLCRAMCGGELSAVAGVVLSPNWPEPYVEGEDCIWKIHVGEEKRIFLDIQFLNLSNSDILTIYDGDEVMPHILGQYLGNSGPQKLYSSTPDLTIQFHSDPAGLIFGKGQGFIMNYIEVSRNDSCSDLPEIQNGWKTTSHTELVRGARITYQCDPGYDIVGSDTLTCQWDLSWSSDPPFCEKIMYCTDPGEVDHSTRLISDPVLLVGTTIQYTCNPGFVLEGSSLLTCYSRETGTPIWTSRLPHCVSEESLACDNPGLPENGYQILYKRLYLPGESLTFMCYEGFELMGEVTIRCILGQPSHWNGPLPVCKVNQDSFEHALEVAEAAAETSLEGGNMALAIFIPVLIISLLLGGAYIYITRCRYYSNLRLPLMYSHPYSQITVETEFDNPIYETGETREYEVSI

SEQ ID NO: 62846 - protein, 948 aa, Homo sapiens
MPAARPPAAGLRGISLFLALLLGSPAAALERDALPEGDASPLGPYLLPSGAPERGSPGKEHPEERVVTAPPSSSQSAEVLGELVLDGTAPSAHHDIPALSPLLPEEARPKHALPPKKKLPSLKQVNSARKQLRPKATSAATVQRAGSQPASQGLDLLSSSTEKPGPPGDPDPIVASEEASEVPLWLDRKESAVPTTPAPLQISPFTSQPYVAHTLPQRPEPGEPGPDMAQEAPQEDTSPMALMDKGENELTGSASEESQETTTSTIITTTVITTEQAPALCSVSFSNPEGYIDSSDYPLLPLNNFLECTYNVTVYTGYGVELQVKSVNLSDGELLSIRGVDGPTLTVLANQTLLVEGQVIRSPTNTISVYFRTFQDDGLGTFQLHYQAFMLSCNFPRRPDSGDVTVMDLHSGGVAHFHCHLGYELQGAKMLTCINASKPHWSSQEPICSAPCGGAVHNATIGRVLSPSYPENTNGSQFCIWTIEAPEGQKLHLHFERLLLHDKDRMTVHSGQTNKSALLYDSLQTESVPFEGLLSEGNTIRIEFTSDQARAASTFNIRFEAFEKGHCYEPYIQNGNFTTSDPTYNIGTIVEFTCDPGHSLEQGPAIIECINVRDPYWNDTEPLCRAMCGGELSAVAGVVLSPNWPEPYVEGEDCIWKIHVGEEKRIFLDIQFLNLSNSDILTIYDGDEVMPHILGQYLGNSGPQKLYSSTPDLTIQFHSDPAGLIFGKGQGFIMNYIEVSRNDSCSDLPEIQNGWKTTSHTELVRGARITYQCDPGYDIVGSDTLTCQWDLSWSSDPPFCEKIMYCTDPGEVDHSTRLISDPVLLVGTTIQYTCNPGFVLEGSSLLTCYSRETGTPIWTSRLPHCVLAEAAAETSLEGGNMALAIFIPVLIISLLLGGAYIYITRCRYYSNLRLPLMYSHPYSQITVETEFDNPIYETGETREYEVSI

SEQ ID NO: 62847 - protein, 949 aa, Homo sapiens
MPAARPPAAGLRGISLFLALLLGSPAAALERDALPEGDASPLGPYLLPSGAPERGSPGKEHPEERVVTAPPSSSQSAEVLGELVLDGTAPSAHHDIPALSPLLPEEARPKHALPPKKKLPSLKQVNSARKQLRPKATSAATVQRAGSQPASQGLDLLSSSTEKPGPPGDPDPIVASEEASEVPLWLDRKESAVPTTPAPLQISPFTSQPYVAHTLPQRPEPGEPGPDMAQEAPQEDTSPMALMDKGENELTGSASEESQETTTSTIITTTVITTEQAPALCSVSFSNPEGYIDSSDYPLLPLNNFLECTYNVTVYTGYGVELQVKSVNLSDGELLSIRGVDGPTLTVLANQTLLVEGQVIRSPTNTISVYFRTFQDDGLGTFQLHYQAFMLSCNFPRRPDSGDVTVMDLHSGGVAHFHCHLGYELQGAKMLTCINASKPHWSSQEPICSAPCGGAVHNATIGRVLSPSYPENTNGSQFCIWTIEAPEGQKLHLHFERLLLHDKDRMTVHSGQTNKSALLYDSLQTESVPFEGLLSEGNTIRIEFTSDQARAASTFNIRFEAFEKGHCYEPYIQNGNFTTSDPTYNIGTIVEFTCDPGHSLEQGPAIIECINVRDPYWNDTEPLCRAMCGGELSAVAGVVLSPNWPEPYVEGEDCIWKIHVGEEKRIFLDIQFLNLSNSDILTIYDGDEVMPHILGQYLGNSGPQKLYSSTPDLTIQFHSDPAGLIFGKGQGFIMNYIEVSRNDSCSDLPEIQNGWKTTSHTELVRGARITYQCDPGYDIVGSDTLTCQWDLSWSSDPPFCEKTEESLACDNPGLPENGYQILYKRLYLPGESLTFMCYEGFELMGEVTIRCILGQPSHWNGPLPVCKVAEAAAETSLEGGNMALAIFIPVLIISLLLGGAYIYITRCRYYSNLRLPLMYSHPYSQITVETEFDNPIYETGETREYEVSI

SEQ ID NO: 62848 - protein, 139 aa, Homo sapiens
MYCTDPGEVDHSTRLISDPVLLVGTTIQYTCNPGFVLEGSSLLTCYSRETGTPIWTSRLPHCVSEESLACDNPGLPENGYQILYKRLYLPGESLTFMCYEGFELMGEVTIRCILGQPSHWNGPLPVCKDVATIPTSACL

SEQ ID NO: 62849 - protein, 1013 aa, Homo sapiens
MPAARPPAAGLRGISLFLALLLGSPAAALERDALPEGDASPLGPYLLPSGAPERGSPGKEHPEERVVTAPPSSSQSAEVLGELVLDGTAPSAHHDIPALSPLLPEEARPKHALPPKKKLPSLKQVNSARKQLRPKATSAATVQRAGSQPASQGLDLLSSSTEKPGPPGDPDPIVASEEASEVPLWLDRKESAVPTTPAPLQISPFTSQPYVAHTLPQRPEPGEPGPDMAQEAPQEDTSPMALMDKGENELTGSASEESQETTTSTIITTTVITTEQAPALCSVSFSNPEGYIDSSDYPLLPLNNFLECTYNVTVYTGYGVELQVKSVNLSDGELLSIRGVDGPTLTVLANQTLLVEGQVIRSPTNTISVYFRTFQDDGLGTFQLHYQAFMLSCNFPRRPDSGDVTVMDLHSGGVAHFHCHLGYELQGAKMLTCINASKPHWSSQEPICSAPCGGAVHNATIGRVLSPSYPENTNGSQFCIWTIEAPEGQKLHLHFERLLLHDKDRMTVHSGQTNKSALLYDSLQTESVPFEGLLSEGNTIRIEFTSDQARAASTFNIRFEAFEKGHCYEPYIQNGNFTTSDPTYNIGTIVEFTCDPGHSLEQGPAIIECINVRDPYWNDTEPLCRAMCGGELSAVAGVVLSPNWPEPYVEGEDCIWKIHVGEEKRIFLDIQFLNLSNSDILTIYDGDEVMPHILGQYLGNSGPQKLYSSTPDLTIQFHSDPAGLIFGKGQGFIMNYIEVSRNDSCSDLPEIQNGWKTTSHTELVRGARITYQCDPGYDIVGSDTLTCQWDLSWSSDPPFCEKIMYCTDPGEVDHSTRLISDPVLLVGTTIQYTCNPGFVLEGSSLLTCYSRETGTPIWTSRLPHCVSEESLACDNPGLPENGYQILYKRLYLPGESLTFMCYEGFELMGEVTIRCILGQPSHWNGPLPVCKVAEAAAETSLEGGNMALAIFIPVLIISLLLGGAYIYITRCRYYSNLRLPLMYSHPYSQITVETEFDNPIYETGETREYEVSI

SEQ ID NO: 62850 - protein, 1023 aa, Homo sapiens
MPAARPPAAGLRGISLFLALLLGSPAAALERDALPEGDASPLGPYLLPSGAPERGSPGKEHPEERVVTAPPSSSQSAEVLGELVLDGTAPSAHHDIPALSPLLPEEARPKHALPPKKKLPSLKQVNSARKQLRPKATSAATVQRAGSQPASQGLDLLSSSTEKPGPPGDPDPIVASEEASEVPLWLDRKESAVPTTPAPLQISPFTSQPYVAHTLPQRPEPGEPGPDMAQEAPQEDTSPMALMDKGENELTGSASEESQETTTSTIITTTVITTEQAPALCSVSFSNPEGYIDSSDYPLLPLNNFLECTYNVTVYTGYGVELQVKSVNLSDGELLSIRGVDGPTLTVLANQTLLVEGQVIRSPTNTISVYFRTFQDDGLGTFQLHYQAFMLSCNFPRRPDSGDVTVMDLHSGGVAHFHCHLGYELQGAKMLTCINASKPHWSSQEPICSAPCGGAVHNATIGRVLSPSYPENTNGSQFCIWTIEAPEGQKLHLHFERLLLHDKDRMTVHSGQTNKSALLYDSLQTESVPFEGLLSEGNTIRIEFTSDQARAASTFNIRFEAFEKGHCYEPYIQNGNFTTSDPTYNIGTIVEFTCDPGHSLEQGPAIIECINVRDPYWNDTEPLCRAMCGGELSAVAGVVLSPNWPEPYVEGEDCIWKIHVGEEKRIFLDIQFLNLSNSDILTIYDGDEVMPHILGQYLGNSGPQKLYSSTPDLTIQFHSDPAGLIFGKGQGFIMNYIEVSRNDSCSDLPEIQNGWKTTSHTELVRGARITYQCDPGYDIVGSDTLTCQWDLSWSSDPPFCEKIMYCTDPGEVDHSTRLISDPVLLVGTTIQYTCNPGFVLEGSSLLTCYSRETGTPIWTSRLPHCVSEESLACDNPGLPENGYQILYKRLYLPGESLTFMCYEGFELMGEVTIRCILGQPSHWNGPLPVCKVNQDSFEHALEAEAAAETSLEGGNMALAIFIPVLIISLLLGGAYIYITRCRYYSNLRLPLMYSHPYSQITVETEFDNPIYETGETREYEVSI

SEQ ID NO: 62851 - protein, 85 aa, Homo sapiens
GFGTDVDYETAFIHYRLASEQQHSAQAMFNLGYMHEKGLGIKQDIHLAKRFYDMAASQPRCTSSSLPSPLQIGRRLFLAVHTGNK

SEQ ID NO: 62852 - protein, 794 aa, Homo sapiens
MRVRIGLTLLLCAVLLSLASASSDEEGSQDESLDSKTTLTSDESVKDHTTAGRVVAGQIFLDSEESELESSIQEEEDSLKSQEGESVTEDISFLESPNPENKDYEEPKKVRKPALTAIEGTAHGEPCHFPFLFLDKEYDECTSDGREDGRLWCATTYDYKADEKWGFCETEEEAAKRRQMQEAEMMYQTGMKILNGSNKKSQKREAYRYLQKAASMNHTKALERVSYALLFGDYLPQNIQAAREMFEKLTEEGSPKGQTALGFLYASGLGVNSSQAKALVYYTFGALGGNLIAHMVLGYRYWAGIGVLQSCESALTHYRLVANHVASDISLTGGSVVQRIRLPDEVENPGMNSGMLEEDLIQYYQFLAEKGDVQAQVGLGQLHLHGGRGVEQNHQRAFDYFNLAANAGNSHAMAFLGKMYSEGSDIVPQSNETALHYFKKAADMGNPVGQSGLGMAYLYGRGVQVNYDLALKYFQKAAEQGWVDGQLQLGSMYYNGIGVKRDYKQALKYFNLASQGGHILAFYNLAQMHASGTGVMRSCHTAVELFKNVCERGRWSERLMTAYNSYKDGDYNAAVIQYLLLAEQGYEVAQSNAAFILDQREASIVGENETYPRALLHWNRAASQGYTVARIKLGDYHFYGFGTDVDYETAFIHYRLASEQQHSAQAMFNLGYMHEKGLGIKQDIHLAKRFYDMAAEASPDAQVPVFLALCKLGVVYFLQYIRETNIRDMFTQLDMDQLLGPEWDLYLMTIIALLLGTVIAYRQRQHQDMPAPRPPGPRPAPPQQEGPPEQQPPQ

SEQ ID NO: 62853 - protein, 301 aa, Homo sapiens
MRVRIGLTLLLCAVLLSLASASSDEEGSQDESLDSKTTLTSDESVKDHTTAGRVVAGQIFLDSEESELESSIQEEEDSLKSQEGESVTEDISFLESPNPENKDYEEPKKVRKPALTAIEGTAHGEPCHFPFLFLDKEYDECTSDGREDGRLWCATTYDYKADEKWGFCETEEEAAKRRQMQEAEMMYQTGMKILNGSNKKSQKREAYRYLQKAASMNHTKALERVSYALLFGDYLPQNIQAAREMFEKLTEEGSPKGQTALGFLYASGLGVNSSQAKALVYYTFGALGGNLIAHMVLVSRL

SEQ ID NO: 62854 - protein, 688 aa, Homo sapiens
MKPLSLLIEILIILGVTIKTIKAEEHNKRQKERNVTTQVSVNEIKQYLSHILEQRTSSNVINKRENLLEKKKNQRKIRIKGIQNKDILKRNKNHLQKQAEKNFTDEGDQLFKMGIKVLQQSKSQKQKEEAYLLFAKAADMGNLKAMEKMADALLFGNFGVQNITAAIQLYESLAKEGSCKAQNALGFLSSYGIGMEYDQAKALIYYTFGSAGGNMMSQMILGYRYLSGINVLQNCEVALSYYKKVADYIADTFEKSEGVPVEKVRLTERPENLSSNSEILDWDIYQYYKFLAERGDVQIQVSLGQLHLIGRKGLDQDYYKALHYFLKAAKAGSANAMAFIGKMYLEGNAAVPQNNATAFKYFSMAASKGNAIGLHGLGLLYFHGKGVPLNYAEALKYFQKAAEKGWPDAQFQLGFMYYSGSGIWKDYKLAFKYFYLASQSGQPLAIYYLAKMYATGTGVVRSCRTAVELYKGVCELGHWAEKFLTAYFAYKDGDIDSSLVQYALLAEMGYEVAQSNSAFILESKKANILEKEKMYPMALLLWNRAAIQGNAFARVKIGDYHYYGYGTKKDYQTAATHYSIAANKYHNAQAMFNLAYMYEHGLGITKDIHLARRLYDMAAQTSPDAHIPVLFAVMKLETTHLLRDILFFNFTTRWNWLKLDNTIGPHWDLFVIGLIVPGLILLLRNHHG

SEQ ID NO: 62855 - protein, 575 aa, Homo sapiens
MKPLSLLIEILIILGVTIKTIKAEEHNKRQKERNVTTQVSVNEIKQYLSHILEQRTSSNVINKRENLLEKKKNQRKIRIKGIQNKDILKRNKNHLQKQAEKNFTDEGDQLFKMGIKVLQQSKSQKQKEEAYLLFAKAADMGNLKAMEKMADALLFGNFGVQNITAAIQLYESLAKEGSCKAQNALGFLSSYGIGMEYDQAKALIYYTFGSAGGNMMSQMILGYRYLSGINVLQNCEVALSYYKKVADYIADTFEKSEGVPVEKVRLTERPENLSSNSEILDWDIYQYYKFLAERGDVQIQVSLGQLHLIGRKGLDQDYYKALHYFLKAAKAGSANAMAFIGKMYLEGNAAVPQNNATAFKYFSMAASKGNAIGLHGLGLLYFHGKGVPLNYAEALKYFQKAAEKGWPDAQFQLGFMYYSGSGIWKDYKLAFKYFYLASQSGQPLAIYYLAKMYATGTGVVRSCRTAVEKRLTFLKKRRCIQWRFSYGIELPFKDIHLARRLYDMAAQTSPDAHIPVLFAVMKLETTHLLRDILFFNFTTRWNWLKLDNTIGPHWDLFVIGLIVPGLILLLRNHHG

SEQ ID NO: 62856 - protein, 610 aa, Homo sapiens
MIASQFLSALTLVLLIKESGAWSYNTSTEAMTYDEASAYCQQRYTHLVAIQNKEEIEYLNSILSYSPSYYWIGIRKVNNVWVWVGTQKPLTEEAKNWAPGEPNNRQKDEDCVEIYIKREKDVGMWNDERCSKKKLALCYTAACTNTSCSGHGECVETINNYTCKCDPGFSGLKCEQIVNCTALESPEHGSLVCSHPLGNFSYNSSCSISCDRGYLPSSMETMQCMSSGEWSAPIPACNVVECDAVTNPANGFVECFQNPGSFPWNTTCTFDCEEGFELMGAQSLQCTSSGNWDNEKPTCKAVTCRAVRQPQNGSVRCSHSPAGEFTFKSSCNFTCEEGFMLQGPAQVECTTQGQWTQQIPVCEAFQCTALSNPERGYMNCLPSASGSFRYGSSCEFSCEQGFVLKGSKRLQCGPTGEWDNEKPTCEAVRCDAVHQPPKGLVRCAHSPIGEFTYKSSCAFSCEEGFELHGSTQLECTSQGQWTEEVPSCQVVKCSSLAVPGKINMSCSGEPVFGTVCKFACPEGWTLNGSAARTCGATGHWSGLLPTCEAPTESNIPLVAGLSAAGLSLLTLAPFLLWLRKCLRKAKKFVPASSCQSLESDGSYQKPSYIL

SEQ ID NO: 62857 - protein, 484 aa, Homo sapiens
MIASQFLSALTLVLLIKESGAWSYNTSTEAMTYDEASAYCQQRYTHLVAIQNKEEIEYLNSILSYSPSYYWIGIRKVNNVWVWVGTQKPLTEEAKNWAPGEPNNRQKDEDCVEIYIKREKDVGMWNDERCSKKKLALCYTAACTNTSCSGHGECVETINNYTCKCDPGFSGLKCEQIVNCTALESPEHGSLVCSHPLGNFSYNSSCSISCDRGYLPSSMETMQCMSSGEWSAPIPACNVVECDAVTNPANGFVECFQNPGSFPWNTTCTFDCEEGFELMGAQSLQCTSSGNWDNEKPTCKAVTCRAVRQPQNGSVRCSHSPAGEFTFKSSCNFTCEEGFMLQGPAQVECTTQGQWTQQIPVCEVVKCSSLAVPGKINMSCSGEPVFGTVCKFACPEGWTLNGSAARTCGATGHWSGLLPTCEAPTESNIPLVAGLSAAGLSLLTLAPFLLWLRKCLRKAKKFVPASSCQSLESDGSYQKPSYIL

SEQ ID NO: 62858 - protein, 485 aa, Homo sapiens
MIASQFLSALTLVLLIKESGAWSYNTSTEAMTYDEASAYCQQRYTHLVAIQNKEEIEYLNSILSYSPSYYWIGIRKVNNVWVWVGTQKPLTEEAKNWAPGEPNNRQKDEDCVEIYIKREKDVGMWNDERCSKKKLALCYTAACTNTSCSGHGECVETINNYTCKCDPGFSGLKCEQMVECDAVTNPANGFVECFQNPGSFPWNTTCTFDCEEGFELMGAQSLQCTSSGNWDNEKPTCKAVTCRAVRQPQNGSVRCSHSPAGEFTFKSSCNFTCEEGFMLQGPAQVECTTQGQWTQQIPVCEAVRCDAVHQPPKGLVRCAHSPIGEFTYKSSCAFSCEEGFELHGSTQLECTSQGQWTEEVPSCQVVKCSSLAVPGKINMSCSGEPVFGTVCKFACPEGWTLNGSAARTCGATGHWSGLLPTCEAPTESNIPLVAGLSAAGLSLLTLAPFLLWLRKCLRKAKKFVPASSCQSLESDGSYQKPSYIL

SEQ ID NO: 62859 - protein, 547 aa, Homo sapiens
MIASQFLSALTLVLLIKESGAWSYNTSTEAMTYDEASAYCQQRYTHLVAIQNKEEIEYLNSILSYSPSYYWIGIRKVNNVWVWVGTQKPLTEEAKNWAPGEPNNRQKDEDCVEIYIKREKDVGMWNDERCSKKKLALCYTAACTNTSCSGHGECVETINNYTCKCDPGFSGLKCEQIVNCTALESPEHGSLVCSHPLGNFSYNSSCSISCDRGYLPSSMETMQCMSSGEWSAPIPACNVVECDAVTNPANGFVECFQNPGSFPWNTTCTFDCEEGFELMGAQSLQCTSSGNWDNEKPTCKAVTCRAVRQPQNGSVRCSHSPAGEFTFKSSCNFTCEEGFMLQGPAQVECTTQGQWTQQIPVCEAVRCDAVHQPPKGLVRCAHSPIGEFTYKSSCAFSCEEGFELHGSTQLECTSQGQWTEEVPSCQVVKCSSLAVPGKINMSCSGEPVFGTVCKFACPEGWTLNGSAARTCGATGHWSGLLPTCEAPTESNIPLVAGLSAAGLSLLTLAPFLLWLRKCLRKAKKFVPASSCQSLESDGSYQKPSYIL

SEQ ID NO: 62860 - protein, 547 aa, Homo sapiens
MIASQFLSALTLVLLIKESGAWSYNTSTEAMTYDEASAYCQQRYTHLVAIQNKEEIEYLNSILSYSPSYYWIGIRKVNNVWVWVGTQKPLTEEAKNWAPGEPNNRQKDEDCVEIYIKREKDVGMWNDERCSKKKLALCYTAACTNTSCSGHGECVETINNYTCKCDPGFSGLKCEQIVNCTALESPEHGSLVCSHPLGNFSYNSSCSISCDRGYLPSSMETMQCMSSGEWSAPIPACNVVECDAVTNPANGFVECFQNPGSFPWNTTCTFDCEEGFELMGAQSLQCTSSGNWDNEKPTCKAVTCRAVRQPQNGSVRCSHSPAGEFTFKSSCNFTCEEGFMLQGPAQVECTTQGQWTQQIPVCEAFQCTALSNPERGYMNCLPSASGSFRYGSSCEFSCEQGFVLKGSKRLQCGPTGEWDNEKPTCEVVKCSSLAVPGKINMSCSGEPVFGTVCKFACPEGWTLNGSAARTCGATGHWSGLLPTCEAPTESNIPLVAGLSAAGLSLLTLAPFLLWLRKCLRKAKKFVPASSCQSLESDGSYQKPSYIL

SEQ ID NO: 62861 - protein, 484 aa, Homo sapiens; identical to SEQ ID NO: 62857

SEQ ID NO: 62862 - protein, 485 aa, Homo sapiens; identical to SEQ ID NO: 62858

SEQ ID NO: 62863 - protein, 547 aa, Homo sapiens; identical to SEQ ID NO: 62859

SEQ ID NO: 62864 - protein, 547 aa, Homo sapiens; identical to SEQ ID NO: 62860

SEQ ID NO: 62865 - protein, 385 aa, Homo sapiens
MGCRRTREGPSKAMIFPWKCQSTQRDLWNIFKLWGWTMLCCDFLAHHGTDCWTYHYSEKPMNWQRARRFCRDNYTDLVAIQNKAEIEYLEKTLPFSRSYYWIGIRKIGGIWTWVGTNKSLTEEAENWGDGEPNNKKNKEDCVEIYIKRNKDAGKWNDDACHKLKAALCYTASCQPWSCSGHGECVEIINNYTCNCDVGYYGPQCQFVIQCEPLEAPELGTMDCTHPLGNFSFSSQCAFSCSEGTNLTGIEETTCGPFGNWSSPEPTCQVIQCEPLSAPDLGIMNCSHPLASFSFTSACTFICSEGTELIGKKKTICESSGIWSNPSPICQKLDKSFSMIKEGDYNPLFIPVAVMVTAFSGLAFIIWLARRLKKGKKSKRSMNDPY

SEQ ID NO: 62866 - protein, 830 aa, Homo sapiens
MANCQIAILYQRFQRVVFGISQLLCFSALISELTNQKEVAAWTYHYSTKAYSWNISRKYCQNRYTDLVAIQNKNEIDYLNKVLPYYSSYYWIGIRKNNKTWTWVGTKKALTNEAENWADNEPNNKRNNEDCVEIYIKSPSAPGKWNDEHCLKKKHALCYTASCQDMSCSKQGECLETIGNYTCSCYPGFYGPECEYVRECGELELPQHVLMNCSHPLGNFSFNSQCSFHCTDGYQVNGPSKLECLASGIWTNKPPQCLAAQCPPLKIPERGNMTCLHSAKAFQHQSSCSFSCEEGFALVGPEVVQCTASGVWTAPAPVCKAVQCQHLEAPSEGTMDCVHPLTAFAYGSSCKFECQPGYRVRGLDMLRCIDSGHWSAPLPTCEAISCEPLESPVHGSMDCSPSLRAFQYDTNCSFRCAEGFMLRGADIVRCDNLGQWTAPAPVCQALQCQDLPVPNEARVNCSHPFGAFRYQSVCSFTCNEGLLLVGASVLQCLATGNWNSVPPECQAIPCTPLLSPQNGTMTCVQPLGSSSYKSTCQFICDEGYSLSGPERLDCTRSGRWTDSPPMCEAIKCPELFAPEQGSLDCSDTRGEFNVGSTCHFSCDNGFKLEGPNNVECTTSGRWSATPPTCKGIASLPTPGVQCPALTTPGQGTMYCRHHPGTFGFNTTCYFGCNAGFTLIGDSTLSCRPSGQWTAVTPACRAVKCSELHVNKPIAMNCSNLWGNFSYGSICSFHCLEGQLLNGSAQTACQENGHWSTTVPTCQAGPLTIQEALTYFGGAVASTIGLIMGGTLLALLRKRFRQKDDGKCPLNPHSHLGTYGVFTNAAFDPSP

SEQ ID NO: 62867 - protein, 768 aa, Homo sapiens
MANCQIAILYQRFQRVVFGISQLLCFSALISELTNQKEVAAWTYHYSTKAYSWNISRKYCQNRYTDLVAIQNKNEIDYLNKVLPYYSSYYWIGIRKNNKTWTWVGTKKALTNEAENWADNEPNNKRNNEDCVEIYIKSPSAPGKWNDEHCLKKKHALCYTASCQDMSCSKQGECLETIGNYTCSCYPGFYGPECEYVRECGELELPQHVLMNCSHPLGNFSFNSQCSFHCTDGYQVNGPSKLECLASGIWTNKPPQCLAAQCPPLKIPERGNMTCLHSAKAFQHQSSCSFSCEEGFALVGPEVVQCTASGVWTAPAPVCKAISCEPLESPVHGSMDCSPSLRAFQYDTNCSFRCAEGFMLRGADIVRCDNLGQWTAPAPVCQALQCQDLPVPNEARVNCSHPFGAFRYQSVCSFTCNEGLLLVGASVLQCLATGNWNSVPPECQAIPCTPLLSPQNGTMTCVQPLGSSSYKSTCQFICDEGYSLSGPERLDCTRSGRWTDSPPMCEAIKCPELFAPEQGSLDCSDTRGEFNVGSTCHFSCDNGFKLEGPNNVECTTSGRWSATPPTCKGIASLPTPGVQCPALTTPGQGTMYCRHHPGTFGFNTTCYFGCNAGFTLIGDSTLSCRPSGQWTAVTPACRAVKCSELHVNKPIAMNCSNLWGNFSYGSICSFHCLEGQLLNGSAQTACQENGHWSTTVPTCQAGPLTIQEALTYFGGAVASTIGLIMGGTLLALLRKRFRQKDDGKCPLNPHSHLGTYGVFTNAAFDPSP

SEQ ID NO: 62868 - protein, 768 aa, Homo sapiens
MANCQIAILYQRFQRVVFGISQLLCFSALISELTNQKEVAAWTYHYSTKAYSWNISRKYCQNRYTDLVAIQNKNEIDYLNKVLPYYSSYYWIGIRKNNKTWTWVGTKKALTNEAENWADNEPNNKRNNEDCVEIYIKSPSAPGKWNDEHCLKKKHALCYTASCQDMSCSKQGECLETIGNYTCSCYPGFYGPECEYVRECGELELPQHVLMNCSHPLGNFSFNSQCSFHCTDGYQVNGPSKLECLASGIWTNKPPQCLAVQCQHLEAPSEGTMDCVHPLTAFAYGSSCKFECQPGYRVRGLDMLRCIDSGHWSAPLPTCEAISCEPLESPVHGSMDCSPSLRAFQYDTNCSFRCAEGFMLRGADIVRCDNLGQWTAPAPVCQALQCQDLPVPNEARVNCSHPFGAFRYQSVCSFTCNEGLLLVGASVLQCLATGNWNSVPPECQAIPCTPLLSPQNGTMTCVQPLGSSSYKSTCQFICDEGYSLSGPERLDCTRSGRWTDSPPMCEAIKCPELFAPEQGSLDCSDTRGEFNVGSTCHFSCDNGFKLEGPNNVECTTSGRWSATPPTCKGIASLPTPGVQCPALTTPGQGTMYCRHHPGTFGFNTTCYFGCNAGFTLIGDSTLSCRPSGQWTAVTPACRAVKCSELHVNKPIAMNCSNLWGNFSYGSICSFHCLEGQLLNGSAQTACQENGHWSTTVPTCQAGPLTIQEALTYFGGAVASTIGLIMGGTLLALLRKRFRQKDDGKCPLNPHSHLGTYGVFTNAAFDPSP

SEQ ID NO: 62869 - protein, 646 aa, Homo sapiens
MANCQIAILYQRFQRVVFGISQLLCFSALISELTNQKEVAAWTYHYSTKAYSWNISRKYCQNRYTDLVAIQNKNEIDYLNKVLPYYSSYYWIGIRKNNKTWTWVGTKKALTNEAENWADNEPNNKRNNEDCVEIYIKSPSAPGKWNDEHCLKKKHALCYTASCQDMSCSKQGECLETIGNYTCSCYPGFYGPECEYVRECGELELPQHVLMNCSHPLGNFSFNSQCSFHCTDGYQVNGPSKLECLASGIWTNKPPQCLAAQCPPLKIPERGNMTCLHSAKAFQHQSSCSFSCEEGFALVGPEVVQCTASGVWTAPAPVCKAISCEPLESPVHGSMDCSPSLRAFQYDTNCSFRCAEGFMLRGADIVRCDNLGQWTAPAPVCQALQCQDLPVPNEARVNCSHPFGAFRYQSVCSFTCNEGLLLVGASVLQCLATGNWNSVPPECQGKSIASLPTPGVQCPALTTPGQGTMYCRHHPGTFGFNTTCYFGCNAGFTLIGDSTLSCRPSGQWTAVTPACRAVKCSELHVNKPIAMNCSNLWGNFSYGSICSFHCLEGQLLNGSAQTACQENGHWSTTVPTCQAGPLTIQEALTYFGGAVASTIGLIMGGTLLALLRKRFRQKDDGKCPLNPHSHLGTYGVFTNAAFDPSP

SEQ ID NO: 62870 - protein, 830 aa, Homo sapiens; identical to SEQ ID NO: 62866

SEQ ID NO: 62871 - protein, 644 aa, Homo sapiens
MANCQIAILYQRFQRVVFGISQLLCFSALISELTNQKEVAAWTYHYSTKAYSWNISRKYCQNRYTDLVAIQNKNEIDYLNKVLPYYSSYYWIGIRKNNKTWTWVGTKKALTNEAENWADNEPNNKRNNEDCVEIYIKSPSAPGKWNDEHCLKKKHALCYTASCQDMSCSKQGECLETIGNYTCSCYPGFYGPECEYVRECGELELPQHVLMNCSHPLGNFSFNSQCSFHCTDGYQVNGPSKLECLASGIWTNKPPQCLAAQCPPLKIPERGNMTCLHSAKAFQHQSSCSFSCEEGFALVGPEVVQCTASGVWTAPAPVCKALQCQDLPVPNEARVNCSHPFGAFRYQSVCSFTCNEGLLLVGASVLQCLATGNWNSVPPECQAIPCTPLLSPQNGTMTCVQPLGSSSYKSTCQFICDEGYSLSGPERLDCTRSGRWTDSPPMCEGIASLPTPGVQCPALTTPGQGTMYCRHHPGTFGFNTTCYFGCNAGFTLIGDSTLSCRPSGQWTAVTPACRAVKCSELHVNKPIAMNCSNLWGNFSYGSICSFHCLEGQLLNGSAQTACQENGHWSTTVPTCQAGPLTIQEALTYFGGAVASTIGLIMGGTLLALLRKRFRQKDDGKCPLNPHSHLGTYGVFTNAAFDPSP

SEQ ID NO: 62872 - protein, 646 aa, Homo sapiens; identical to SEQ ID NO: 62869

SEQ ID NO: 62873 - protein, 768 aa, Homo sapiens; identical to SEQ ID NO: 62868

SEQ ID NO: 62874 - protein, 768 aa, Homo sapiens; identical to SEQ ID NO: 62867

SEQ ID NO: 62875 - protein, 644 aa, Homo sapiens; identical to SEQ ID NO: 62871

SEQ ID NO: 62876 - protein, 829 aa, Homo sapiens
ANCQIAILYQRFQRVVFGISQLLCFSALISELTNQKEVAAWTYHYSTKAYSWNISRKYCQNRYTDLVAIQNKNEIDYLNKVLPYYSSYYWIGIRKNNKTWTWVGTKKALTNEAENWADNEPNNKRNNEDCVEIYIKSPSAPGKWNDEHCLKKKHALCYTASCQDMSCSKQGECLETIGNYTCSCYPGFYGPECEYVRECGELELPQHVLMNCSHPLGNFSFNSQCSFHCTDGYQVNGPSKLECLASGIWTNKPPQCLAAQCPPLKIPERGNMTCLHSAKAFQHQSSCSFSCEEGFALVGPEVVQCTASGVWTAPAPVCKAVQCQHLEAPSEGTMDCVHPLTAFAYGSSCKFECQPGYRVRGLDMLRCIDSGHWSAPLPTCEAISCEPLESPVHGSMDCSPSLRAFQYDTNCSFRCAEGFMLRGADIVRCDNLGQWTAPAPVCQALQCQDLPVPNEARVNCSHPFGAFRYQSVCSFTCNEGLLLVGASVLQCLATGNWNSVPPECQAIPCTPLLSPQNGTMTCVQPLGSSSYKSTCQFICDEGYSLSGPERLDCTRSGRWTDSPPMCEAIKCPELFAPEQGSLDCSDTRGEFNVGSTCHFSCDNGFKLEGPNNVECTTSGRWSATPPTCKGIASLPTPGVQCPALTTPGQGTMYCRHHPGTFGFNTTCYFGCNAGFTLIGDSTLSCRPSGQWTAVTPACRAVKCSELHVNKPIAMNCSNLWGNFSYGSICSFHCLEGQLLNGSAQTACQENGHWSTTVPTCQAGPLTIQEALTYFGGAVASTIGLIMGGTLLALLRKRFRQKDDGKCPLNPHSHLGTYGVFTNAAFDPSP

SEQ ID NO: 62877 - protein, 646 aa, Homo sapiens
  VARIANT 1: note = MOD_RES - Any amino acid
XANCQIAILYQRFQRVVFGISQLLCFSALISELTNQKEVAAWTYHYSTKAYSWNISRKYCQNRYTDLVAIQNKNEIDYLNKVLPYYSSYYWIGIRKNNKTWTWVGTKKALTNEAENWADNEPNNKRNNEDCVEIYIKSPSAPGKWNDEHCLKKKHALCYTASCQDMSCSKQGECLETIGNYTCSCYPGFYGPECEYVRECGELELPQHVLMNCSHPLGNFSFNSQCSFHCTDGYQVNGPSKLECLASGIWTNKPPQCLAAQCPPLKIPERGNMTCLHSAKAFQHQSSCSFSCEEGFALVGPEVVQCTASGVWTAPAPVCKAISCEPLESPVHGSMDCSPSLRAFQYDTNCSFRCAEGFMLRGADIVRCDNLGQWTAPAPVCQALQCQDLPVPNEARVNCSHPFGAFRYQSVCSFTCNEGLLLVGASVLQCLATGNWNSVPPECQGKSIASLPTPGVQCPALTTPGQGTMYCRHHPGTFGFNTTCYFGCNAGFTLIGDSTLSCRPSGQWTAVTPACRAVKCSELHVNKPIAMNCSNLWGNFSYGSICSFHCLEGQLLNGSAQTACQENGHWSTTVPTCQAGPLTIQEALTYFGGAVASTIGLIMGGTLLALLRKRFRQKDDGKCPLNPHSHLGTYGVFTNAAFDPSP

SEQ ID NO: 62878 - protein, 753 aa, Homo sapiens
VVFGISQLLCFSALISELTNQKEVAAWTYHYSTKAYSWNISRKYCQNRYTDLVAIQNKNEIDYLNKVLPYYSSYYWIGIRKNNKTWTWVGTKKALTNEAENWADNEPNNKRNNEDCVEIYIKSPSAPGKWNDEHCLKKKHALCYTASCQDMSCSKQGECLETIGNYTCSCYPGFYGPECEYVRECGELELPQHVLMNCSHPLGNFSFNSQCSFHCTDGYQVNGPSKLECLASGIWTNKPPQCLAAQCPPLKIPERGNMTCLHSAKAFQHQSSCSFSCEEGFALVGPEVVQCTASGVWTAPAPVCKAISCEPLESPVHGSMDCSPSLRAFQYDTNCSFRCAEGFMLRGADIVRCDNLGQWTAPAPVCQALQCQDLPVPNEARVNCSHPFGAFRYQSVCSFTCNEGLLLVGASVLQCLATGNWNSVPPECQAIPCTPLLSPQNGTMTCVQPLGSSSYKSTCQFICDEGYSLSGPERLDCTRSGRWTDSPPMCEAIKCPELFAPEQGSLDCSDTRGEFNVGSTCHFSCDNGFKLEGPNNVECTTSGRWSATPPTCKGIASLPTPGVQCPALTTPGQGTMYCRHHPGTFGFNTTCYFGCNAGFTLIGDSTLSCRPSGQWTAVTPACRAVKCSELHVNKPIAMNCSNLWGNFSYGSICSFHCLEGQLLNGSAQTACQENGHWSTTVPTCQAGPLTIQEALTYFGGAVASTIGLIMGGTLLALLRKRFRQKDDGKCPLNPHSHLGTYGVFTNAAFDPSP

SEQ ID NO: 62879 - protein, 790 aa, Homo sapiens
MANCQIAILYQRFQRVVFGISQLLCFSALISELTNQKEVAAWTYHYSTKAYSWNISRKYCQNRYTDLVAIQNKNEIDYLNKVLPYYSSYYWIGIRKNNKTWTWVGTKKALTNEAENWADNEPNNKRNNEDCVEIYIKSPSAPGKWNDEHCLKKKHALCYTASCQDMSCSKQGECLETIGNYTCSCYPGFYGPECEYVRECGELELPQHVLMNCSHPLGNFSFNSQCSFHCTDGYQVNGPSKLECLASGIWTNKPPQCLAAQCPPLKIPERGNMTCLHSAKAFQHQSSCSFSCEEGFALVGPEVVQCTASGVWTAPAPVCKAVQCQHLEAPSEGTMDCVHPLTAFAYGSSCKFECQPGYRVRGLDMLRCIDSGHWSAPLPTCEAISCEPLESPVHGSMDCSPSLRAFQYDTNCSFRCAEGFMLRGADIVRCDNLGQWTAPAPVCQALQCQDLPVPNEARVNCSHPFGAFRYQSVCSFTCNEGLLLVGASVLQCLATGNWNSVPPECQAIPCTPLLSPQNGTMTCVQPLGSSSYKSTCQFICDEGYSLSGPERLDCTRSGRWTDSPPMCEAIKCPELFAPEQGSLDCSDTRGEFNVGSTCHFSCDNGFKLEGPNNVECTTSGRWSATPPTCKGIASLPTPGVQCPALTTPGQGTMYCRHHPGTFGFNTTCYFGCNAGFTLIGDSTLSCRPSGQWTAVTPACRAVKCSELHVNKPIAMNCSNLWGNFSYGSICSFHCLEGQLLNGSAQTACQENGHWSTTVPTCQDDGKCPLNPHSHLGTYGVFTNAAFDPSP

SEQ ID NO: 62880 - protein, 428 aa, Homo sapiens
MAVGASGLEGDKMAGAMPLQLLLLLILLGPGNSLQLWDTWADEAEKALGPLLARDRRQATEYEYLDYDFLPETEPPEMLRNSTDTTPLTGPGTPESTTVEPAARRSTGLDAGGAVTELTTELANMGNLSTDSAAMEIQTTQPAATEAQTTQPVPTEAQTTPLAATEAQTTRLTATEAQTTPLAATEAQTTPPAATEAQTTQPTGLEAQTTAPAAMEAQTTAPAAMEAQTTPPAAMEAQTTQTTAMEAQTTAPEATEAQTTQPTATEAQTTPLAAMEALSTEPSATEALSMEPTTKRGLFIPFSVSSVTHKGIPMAASNLSVNYPVGAPDHISVKQCLLAILILALVATIFFVCTVVLAVRLSRKGHMYPVRNYSPTEMVCISSLLPDGGEGPSATANGGLSKAKSPGLTPEPREDREGDDLTLHSFLP

SEQ ID NO: 62881 - protein, 402 aa, Homo sapiens
MPLQLLLLLILLGPGNSLQLWDTWADEAEKALGPLLARDRRQATEYEYLDYDFLPETEPPEMLRNSTDTTPLTGPGTPESTTVEPAARRSTGLDAGGAVTELTTELANMGNLSTDSAAMEIQTTQPAATEAQTTPLAATEAQTTRLTATEAQTTPLAATEAQTTPPAATEAQTTQPTGLEAQTTAPAAMEAQTTAPAAMEAQTTPPAAMEAQTTQTTAMEAQTTAPEATEAQTTQPTATEAQTTPLAAMEALSTEPSATEALSMEPTTKRGLFIPFSVSSVTHKGIPMAASNLSVNYPVGAPDHISVKQCLLAILILALVATIFFVCTVVLAVRLSRKGHMYPVRNYSPTEMVCISSLLPDGGEGPSATANGGLSKAKSPGLTPEPREDREGDDLTLHSFLP

SEQ ID NO: 62882 - protein, 412 aa, Homo sapiens
MPLQLLLLLILLGPGNSLQLWDTWADEAEKALGPLLARDRRQATEYEYLDYDFLPETEPPEMLRNSTDTTPLTGPGTPESTTVEPAARRSTGLDAGGAVTELTTELANMGNLSTDSAAMEIQTTQPAATEAQTTQPVPTEAQTTPLAATEAQTTRLTATEAQTTPLAATEAQTTPPAATEAQTTQPTGLEAQTTAPAAMEAQTTAPAAMEAQTTPPAAMEAQTTQTTAMEAQTTAPEATEAQTTQPTATEAQTTPLAAMEALSTEPSATEALSMEPTTKRGLFIPFSVSSVTHKGIPMAASNLSVNYPVGAPDHISVKQCLLAILILALVATIFFVCTVVLAVRLSRKGHMYPVRNYSPTEMVCISSLLPDGGEGPSATANGGLSKAKSPGLTPEPREDREGDDLTLHSFLP

SEQ ID NO: 62883 - protein, 472 aa, Homo sapiens
MATKCGNCGPGYSTPLEAMKGPREEIVYLPCIYRNTGTEAPDYLATVDVDPKSPQYCQVIHRLPMPNLKDELHHSGWNTCSSCFGDSTKSRTKLVLPSLISSRIYVVDVGSEPRAPKLHKVIEPKDIHAKCELAFLHTSHCLASGEVMISSLGDVKGNGKGGFVLLDGETFEVKGTWERPGGAAPLGYDFWYQPRHNVMISTEWAAPNVLRDGFNPADVEAGLYGSHLYVWDWQRHEIVQTLSLKDGLIPLEIRFLHNPDAAQGFVGCALSSTIQRFYKNEGGTWSVEKVIQVPPKKVKGWLLPEMPGLITDILLSLDDRFLYFSNWLHGDLRQYDISDPQRPRLTGQLFLGGSIVKGGPVQVLEDEELKSQPEPLVVKGKRVAGGPQMIQLSLDGKRLYITTSLYSAWDKQFYPDLIREGSVMLQVDVDTVKGGLKLNPNFLVDFGKEPLGPALAHELRYPGGDCSSDIWI

SEQ ID NO: 62884 - protein, 408 aa, Homo sapiens
MPNLKDELHHSGWNTCSSCFGDSTKSRTKLVLPSLISSRIYVVDVGSEPRAPKLHKVIEPKDIHAKCELAFLHTSHCLASGEVMISSLGDVKGNGKGGFVLLDGETFEVKGTWERPGGAAPLGYDFWYQPRHNVMISTEWAAPNVLRDGFNPADVEAGLYGSHLYVWDWQRHEIVQTLSLKDGLIPLEIRFLHNPDAAQGFVGCALSSTIQRFYKNEGGTWSVEKVIQVPPKKVKGWLLPEMPGLITDILLSLDDRFLYFSNWLHGDLRQYDISDPQRPRLTGQLFLGGSIVKGGPVQVLEDEELKSQPEPLVVKGKRVAGGPQMIQLSLDGKRLYITTSLYSAWDKQFYPDLIREGSVMLQVDVDTVKGGLKLNPNFLVDFGKEPLGPALAHELRYPGGDCSSDIWI

SEQ ID NO: 62885 - protein, 410 aa, Homo sapiens
MATKCGNCGPGYSTPLEAMKGPREEIVYLPCIYRNTGTEAPDYLATVDVDPKSPQYCQVIEPKDIHAKCELAFLHTSHCLASGEVMISSLGDVKGNGKGGFVLLDGETFEVKGTWERPGGAAPLGYDFWYQPRHNVMISTEWAAPNVLRDGFNPADVEAGLYGSHLYVWDWQRHEIVQTLSLKDGLIPLEIRFLHNPDAAQGFVGCALSSTIQRFYKNEGGTWSVEKVIQVPPKKVKGWLLPEMPGLITDILLSLDDRFLYFSNWLHGDLRQYDISDPQRPRLTGQLFLGGSIVKGGPVQVLEDEELKSQPEPLVVKGKRVAGGPQMIQLSLDGKRLYITTSLYSAWDKQFYPDLIREGSVMLQVDVDTVKGGLKLNPNFLVDFGKEPLGPALAHELRYPGGDCSSDIWI

SEQ ID NO: 62886 - protein, 453 aa, Homo sapiens
MPGSSGAGMEAAVAPGRDAPAPAASQPSGCGKHNSPERKVYMDYNATTPLEPEVIQAMTKAMWEAWGNPSSPYSAGRKAKDIINAARESLAKMIGGKPQDIIFTSGGTESNNLVIHSVVKHFHANQTSKGHTGGHHSPVKGAKPHFITSSVEHDSIRLPLEHLVEEQVAAVTFVPVSKVSGQAEVDDILAAVRPTTRLVTIMLANNETGIVMPVPEISQRIKALNQERVAAGLPPILVHTDAAQALGKQRVDVEDLGVDFLTIVGHKFYGPRIGALYIRGLGEFTPLYPMLFGGGQERNFRPGTENTPMIAGLGKAAELVTQNCEAYEAHMRDVRDYLEERLEAEFGQKRIHLNSQFPGTQRLPNTCNFSIRGPRLQGHVVLAQCRVLMASVGAACHSDHGDQPSPVLLSYGVPFDVARNALRLSVGRSTTRAEVDLVVQDLKQAVAQLEDQA

SEQ ID NO: 62887 - protein, 235 aa, Homo sapiens
FSNPFCGETFPRKPDLKGTHRWAPQPSEGGQAPFHYFLGGTRLHPAAPGAPGGRTSGSLLNVKMMKMKTFMMICFHLINTVTFVPVSKVSGQAEVDDILAAVRPTTRLVTIMLANNETGIVMPVPEISQRIKALNQERVAAGLPPILVHTDAAQALGKQRVDVEDLGVDFLTIVGHKFYGPRIGALYIRGLGEFTPLYPMLFGGGQERNFRPGTENTPMIAGLGKVSPGELEEMS

SEQ ID NO: 62888 - protein, 317 aa, Homo sapiens
MEAAVAPGRDAPAPAASQPSGCGKHNSPERKVYMDYNATTPLEPEVIQAMTKAMWEAWGNPSSPYSAGRKAKDIINAARESLAKMIGGKPQDIIFTSGGTESNNLVIHSVVKHFHANQTSKGHTGGHHSPVKGAKPHFITSSVEHDSIRLPLEHLVEEQVAAVTFVPVSKVSGQAEVDDILAAVRPTTRLVTIMLANNETGIVMPVPEISQRIKALNQERVAAGLPPILVHTDAAQALGKQRVDVEDLGVDFLTIVGHKFYGPRIGALYIRGLGEFTPLYPMLFGGGQERNFRPGTENTPMIAGLGKVSPGELEEMS

SEQ ID NO: 62889 - protein, 351 aa, Homo sapiens
MEAAVAPGRDAPAPAASQPSGCGKHNSPERKVYMDYNATTPLEPEVIQAMTKAMWEAWGNPSSPYSAAVTFVPVSKVSGQAEVDDILAAVRPTTRLVTIMLANNETGIVMPVPEISQRIKALNQERVAAGLPPILVHTDAAQALGKQRVDVEDLGVDFLTIVGHKFYGPRIGALYIRGLGEFTPLYPMLFGGGQERNFRPGTENTPMIAGLGKAAELVTQNCEAYEAHMRDVRDYLEERLEAEFGQKRIHLNSQFPGTQRLPNTCNFSIRGPRLQGHVVLAQCRVLMASVGAACHSDHGDQPSPVLLSYGVPFDVARNALRLSVGRSTTRAEVDLVVQDLKQAVAQLEDQA

SEQ ID NO: 62890 - protein, 239 aa, Homo sapiens
MEAAVAPGRDAPAPAASQPSGCGKHNSPERKVYMDYNATTPLEPEVIQAMTKAMWEAWGNPSSPYSAGRKAKDIINAARESLAKMIGGKPQDIIFTSGGTEAAELVTQNCEAYEAHMRDVRDYLEERLEAEFGQKRIHLNSQFPGTQRLPNTCNFSIRGPRLQGHVVLAQCRVLMASVGAACHSDHGDQPSPVLLSYGVPFDVARNALRLSVGRSTTRAEVDLVVQDLKQAVAQLEDQA

SEQ ID NO: 62891 - protein, 445 aa, Homo sapiens
MEAAVAPGRDAPAPAASQPSGCGKHNSPERKVYMDYNATTPLEPEVIQAMTKAMWEAWGNPSSPYSAGRKAKDIINAARESLAKMIGGKPQDIIFTSGGTESNNLVIHSVVKHFHANQTSKGHTGGHHSPVKGAKPHFITSSVEHDSIRLPLEHLVEEQVAAVTFVPVSKVSGQAEVDDILAAVRPTTRLVTIMLANNETGIVMPVPEISQRIKALNQERVAAGLPPILVHTDAAQALGKQRVDVEDLGVDFLTIVGHKFYGPRIGALYIRGLGEFTPLYPMLFGGGQERNFRPGTENTPMIAGLGKAAELVTQNCEAYEAHMRDVRDYLEERLEAEFGQKRIHLNSQFPGTQRLPNTCNFSIRGPRLQGHVVLAQCRVLMASVGAACHSDHGDQPSPVLLSYGVPFDVARNALRLSVGRSTTRAEVDLVVQDLKQAVAQLEDQA

SEQ ID NO: 62892 - protein, 321 aa, Homo sapiens
MSTRESFNPESYELDKSFRLTRFTELKGTGCKVPQDVLQKLLESLQENHFQEDEQFLGAVMPRLGIGMDTCVIPLRHGGLSLVQTTDYIYPIVDDPYMMGRIACANVLSDLYAMGVTECDNMLMLLGVSNKMTDRERDKVMPLIIQGFKDAAEEAGTSVTGGQTVLNPWIVLGGVATTVCQPNEFIMPDNAVPGDVLVLTKPLGTQVAVAVHQWLDIPEKWNKIKLVVTQEDVELAYQEAMMNMARLNRTGGLLICLPREQAARFCAEIKSPKYGEGHQAWIIGIVEKGNRTARIIDKPRIIEVAPQVATQNVNPTPGATS

SEQ ID NO: 62893 - protein, 392 aa, Homo sapiens
MSTRESFNPESYELDKSFRLTRFTELKGTGCKVPQDVLQKLLESLQENHFQEDEQFLGAVMPRLGIGMDTCVIPLRHGGLSLVQTTDYIYPIVDDPYMMGRIACANVLSDLYAMGVTECDNMLMLLGVSNKMTDRERDKVMPLIIQGFKDAAEEAGTSVTGGQTVLNPWIVLGGVATTVCQPNEFIMPDNAVPGDVLVLTKPLGTQVAVAVHQWLDIPEKWNKIKLVVTQEDVELAYQEAMMNMARLNRTAAGLMHTFNAHAATDITGFGILGHAQNLAKQQRNEVSFVIHNLPVLAKMAAVSKACGNMFGLMHGTCPETSGGLLICLPREQAARFCAEIKSPKYGEGHQAWIIGIVEKGNRTARIIDKPRIIEVAPQVATQNVNPTPGATS

SEQ ID NO: 62894 - protein, 321 aa, Homo sapiens; identical to SEQ ID NO: 62892

SEQ ID NO: 62895 - protein, 166 aa, Homo sapiens
MSTRESFNPESYELDKSFRLTRFTELKGTGCKVPQDVLQKLLESLQENHFQEDEQFLGAVMPRLGIGMDTCVIPLRHGGLSLVQTTDYIYPIVDDPYMMGRIACANVLSDLYAMGVTECDNMLMLLGVSNKMTDRERDKVMPLIIQGFKDAAEEAGTSVTGGQTVL

SEQ ID NO: 62896 - protein, 92 aa, Homo sapiens
MDTCVIPLRHGGLSLVQTTDYIYPIVDDPYMMGRIACANVLSDLYAMGVTECDNMLMLLGVSNKMTDRERDKVMPLIIQGFKDAAEEAGTSV

SEQ ID NO: 62897 - protein, 325 aa, Homo sapiens
MDTCVIPLRHGGLSLVQTTDYIYPIVDDPYMMGRIACANVLSDLYAMGVTECDNMLMLLGVSNKMTDRERDKVMPLIIQGFKDAAEEAGTSVTGGQTVLNPWIVLGGVATTVCQPNEFIMPDNAVPGDVLVLTKPLGTQVAVAVHQWLDIPEKWNKIKLVVTQEDVELAYQEAMMNMARLNRTAAGLMHTFNAHAATDITGFGILGHAQNLAKQQRNEVSFVIHNLPVLAKMAAVSKACGNMFGLMHGTCPETSGGLLICLPREQAARFCAEIKSPKYGEGHQAWIIGIVEKGNRTARIIDKPRIIEVAPQVATQNVNPTPGATS

SEQ ID NO: 62898 - protein, 324 aa, Homo sapiens
MSTRESFNPESYELDKSFRLTRFTELKGTGCKVPQDVLQKLLESLQENHFQEDEQFLGAVMPRLGIGMDTCVIPLRHGGLSLVQTTDYIYPIVDDPYMMGRIACANVLSDLYAMGVTECDNMLMLLGVSNKMTDRERDKVMPLIIQGFKDAAEEAGTSVTGGQTVLNPWIVLGGVATTVCQPNEFIMPDNAVPGDVLVLTKPLGTQVAVAVHQWLDIPEKWNKIKLVVTQEDVELAYQEAMMNMARLNRTAAGLMHTFNAHAATDITGFGILGHAQNLAKQQRNEVSFVIHNLPVLAKMAAVSKACGNMFGLMHGTCPETSDVQ

SEQ ID NO: 62899 - protein, 399 aa, Homo sapiens
MAEASATGACGEAMAAAEGSSGPAGLTLGRLTGFSGMKGLVGGQEEASQEAGLPAGAGPSPTFPALGIGMDSCVIPLRHGGLSLVQTTDFFYPLVEDPYMMGRIACANVLSDLYAMGITECDNMLMLLSVSQSMSEEEREKVTPLMVKGFRDAAEEGGTAVTGGQTVVNPWIIIGGVATVVCQPNEFIMPDSAVVGDVLVLTKPLGTQVAVNAHQWLDNPERWNKVKMVVSREEVELAYQEAMFNMATLNRTAAGLMHTFNAHAATDITGFGILGHSQNLAKQQRNEVSFVIHNLPIIAKMAAVSKASGRFGLLQGTSAETSGGLLICLPREQAARFCSEIKSSKYGEGHQAWIVGIVEKGNRTARIIDKPRVIEVLPRGATAAVLAPDSSNASSEPSS

SEQ ID NO: 62900 - protein, 483 aa, Homo sapiens
MAEASATGACGEAMAAAEGSSGPAGLTLGRSFSNYRPFEPQALGLSPSWRLTGFSGMKGUGCKVPQEALLKLLAGLTRPDVRPPLGRGLVGGQEEASQEAGLPAGAGPSPTFPALGIGMDSCVIPLRHGGLSLVQTTDFFYPLVEDPYMMGRIACANVLSDLYAMGITECDNMLMLLSVSQSMSEEEREKVTPLMVKGFRDAAEEGGTAVTGGQTVVNPWIIIGGVATVVCQPNEFIMPDSAVVGDVLVLTKPLGTQVAVNAHQWLDNPERWNKVKMVVSREEVELAYQEAMFNMATLNRTAAGLMHTFNAHAATDITGFGILGHSQNLAKQQRNEVSFVIHNLPIIAKMAAVSKASGRFGLLQGTSAETSGGLLICLPREQAARFCSEIKSSKYGEGHQAWIVGIVEKGNRTARIIDKPRVIEVLPRGATAAVLAPDSSNASSEPSSUDERTEVVWTLEPLSTITDGSQELIVRNFQRRLPA

SEQ ID NO: 62901 - protein, 448 aa, Homo sapiens
MAEASATGACGEAMAAAEGSSGPAGLTLGRSFSNYRPFEPQALGLSPSWRLTGFSGMKGUGCKVPQEALLKLLAGLTRPDVRPPLGRGLVGGQEEASQEAGLPAGAGPSPTFPALGIGMDSCVIPLRHGGLSLVQTTDFFYPLVEDPYMMGRIACANVLSDLYAMGITECDNMLMLLSVSQSMSEEEREKVTPLMVKGFRDAAEEGGTAVTGGQTVVNPWIIIGGVATVVCQPNEFIMPDSAVVGDVLVLTKPLGTQVAVNAHQWLDNPERWNKVKMVVSREEVELAYQEAMFNMATLNRTAAGLMHTFNAHAATDITGFGILGHSQNLAKQQRNEVSFVIHNLPIIAKMAAVSKASGRFGLLQGTSAETSGGLLICLPREQAARFCSEIKSSKYGEGHQAWIVGIVEKGNRTARIIDKPRVIEVLPRGATAAVLAPDSSNASSEPSS

SEQ ID NO: 62902 - protein, 391 aa, Homo sapiens
MAEASATGACGEAMAAAEGSSGPAGLTLGRSFSNYRPFEPQEAGLPAGAGPSPTFPALGIGMDSCVIPLRHGGLSLVQTTDFFYPLVEDPYMMGRIACANVLSDLYAMGITECDNMLMLLSVSQSMSEEEREKVTPLMVKGFRDAAEEGGTAVTGGQTVVNPWIIIGGVATVVCQPNEFIMPDSAVVGDVLVLTKPLGTQVAVNAHQWLDNPERWNKVKMVVSREEVELAYQEAMFNMATLNRTAAGLMHTFNAHAATDITGFGILGHSQNLAKQQRNEVSFVIHNLPIIAKMAAVSKASGRFGLLQGTSAETSGGLLICLPREQAARFCSEIKSSKYGEGHQAWIVGIVEKGNRTARIIDKPRVIEVLPRGATAAVLAPDSSNASSEPSS

SEQ ID NO: 62903 - protein, 556 aa, Homo sapiens
MGRARPGQRGPPSPGPAAQPPAPPRRRARSLALLGALLAAAAAAAVRVCARHAEAQAAARQELALKTLGTDGLFLFSSLDTDGDMYISPEEFKPIAEKLTGSTPAASCEEEELPPDPSEETLTIEARFQPLLPETMTKSKDGFLGVSRLALSGLRNWTAAASPSAVFATRHFQPFLPPPGQELGEPWWIIPSELSMFTGYLSNNRFYPPPPKGKEVIIHRLLSMFHPRPFVKTRFAPQGAVACLTAISDFYYTVMFRIHAEFQLSEPPDFPFWFSPAQFTGHIILSKDATHVRDFRLFVPNHRSLNVDMEWLYGASESSNMEVDIGYIPQMELEATGPSVPSVILDEDGSMIDSHLPSGEPLQFVFEEIKWQQELSWEEAARRLEVAMYPFKKVSYLPFTEAFDRAKAENKLVHSILLWGALDDQSCHCSGRTLRETVLESSPILTLLNESFISTWSLVKELEELQNNQENSSHQKLAGLHLEKYSFPVEMMICLPNGTVVHHINANYFLDITSVKPEEIESNLFSFSSTFEDPSTATYMQFLKEGLRRGLPLLQP

SEQ ID NO: 62904 - protein, 590 aa, Homo sapiens
MGRARPGQRGPPSPGPAAQPPAPPRRRARSLALLGALLAAAAAAAVRVCARHAEAQAAARQELALKTLGTDGLFLFSSLDTDGDMYISPEEFKPIAEKLTGSCSVTQTGVQWCSHSSLQPQLPWLNUSSCLSLLRSTPAASCEEEELPPDPSEETLTIEARFQPLLPETMTKSKDGFLGVSRLALSGLRNWTAAASPSAVFATRHFQPFLPPPGQELGEPWWIIPSELSMFTGYLSNNRFYPPPPKGKEVIIHRLLSMFHPRPFVKTRFAPQGAVACLTAISDFYYTVMFRIHAEFQLSEPPDFPFWFSPAQFTGHIILSKDATHVRDFRLFVPNHRSLNVDMEWLYGASESSNMEVDIGYIPQMELEATGPSVPSVILDEDGSMIDSHLPSGEPLQFVFEEIKWQQELSWEEAARRLEVAMYPFKKVSYLPFTEAFDRAKAENKLVHSILLWGALDDQSCUGSGRTLRETVLESSPILTLLNESFISTWSLVKELEELQNNQENSSHQKLAGLHLEKYSFPVEMMICLPNGTVVHHINANYFLDITSVKPEEIESNLFSFSSTFEDPSTATYMQFLKEGLRRGLPLLQP

SEQ ID NO: 62905 - protein, 556 aa, Homo sapiens
MGRARPGQRGPPSPGPAAQPPAPPRRRARSLALLGALLAAAAAAAVRVCARHAEAQAAARQELALKTLGTDGLFLFSSLDTDGDMYISPEEFKPIAEKLTGSTPAASCEEEELPPDPSEETLTIEARFQPLLPETMTKSKDGFLGVSRLALSGLRNWTAAASPSAVFATRHFQPFLPPPGQELGEPWWIIPSELSMFTGYLSNNRFYPPPPKGKEVIIHRLLSMFHPRPFVKTRFAPQGAVACLTAISDFYYTVMFRIHAEFQLSEPPDFPFWFSPAQFTGHIILSKDATHVRDFRLFVPNHRSLNVDMEWLYGASESSNMEVDIGYIPQMELEATGPSVPSVILDEDGSMIDSHLPSGEPLQFVFEEIKWQQELSWEEAARRLEVAMYPFKKVSYLPFTEAFDRAKAENKLVHSILLWGALDDQSCUGSGRTLRETVLESSPILTLLNESFISTWSLVKELEELQNNQENSSHQKLAGLHLEKYSFPVEMMICLPNGTVVHHINANYFLDITSVKPEEIESNLFSFSSTFEDPSTATYMQFLKEGLRRGLPLLQP

SEQ ID NO: 62906 - protein, 381 aa, Homo sapiens
MWRSLGLALALCLLPSGGTESQDQSSLCKQPPAWSIRDQDPMLNSNGSVTVVALLQASUYLCILQASKLEDLRVKLKKEGYSNISYIVVNHQGISSRLKYTHLKNKVSEHIPVYQQEENQTDVWTLLNGSKDDFLIYDRCGRLVYHLGLPFSFLTFPYVEEAIKIAYCEKKCGNCSLTTLKDEDFCKRVSLATVDKTVETPSPHYHHEHHHNHGHQHLGSSELSENQQPGAPNAPTHPAPPGLHHHHKHKGQHRQGHPENRDMPASEDLQDLQKKLCRKRCINQLLCKLPTDSELAPRSUCCHCRHLIFEKTGSAITUQCKENLPSLCSUQGLRAEENITESCQURLPPAAUQISQQLIPTEASASURUKNQAKKUEUPSN

SEQ ID NO: 62907 - protein, 209 aa, Homo sapiens
MWRSLGLALALCLLPSGGTESQDQSSLCKQPPAWSIRDQDPMLNSNGSVTVVALLQASUYLCILQASKLEDLRVKLKKEGYSNISYIVVNHQGISSRLKYTHLKNKVSEHIPVYQQEENQTDVWTLLNGSKDDFLIYDRCGRLVYHLGLPFSFLTFPYVEEAIKIAYCEKKCGNCSLTTLKDEDFCKRVSLATVDKTVETPSPHYHHEH

SEQ ID NO: 62908 - protein, 381 aa, Homo sapiens; identical to SEQ ID NO: 62906

SEQ ID NO: 62909 - protein, 310 aa, Homo sapiens
MWRSLGLALALCLLPSGGTESQDQSSLCKQPPAWSIRDQDPMLNSNGSVTVVALLQASUYLCILQASKLEDLRVKLKKEGYSNISYIVVNHQGISSRLKYTHLKNKVSEHIPVYQQEENQTDVWTLLNGSKDDFLIYDRCGRLVYHLGLPFSFLTFPYVEEAIKIAYCEKKCGNCSLTTLKDEDFCKRVSLATVDKTVETPSPHYHHEHHHNHGHQHLGSSELSENQQPGAPNAPTHPAPPGLHHHHKHKGQHRQGHPENRDMPASEDLQDLQKKLCRKRCINQLLCKLPTDSELAPRSUCCHCRHLIFE

SEQ ID NO: 62910 - protein, 381 aa, Homo sapiens; identical to SEQ ID NO: 62906

SEQ ID NO: 62911 - protein, 87 aa, Homo sapiens
MALAVRVVYCGAUGYKSKYLQLKKKLEDEFPGRLDICGEGTPQATGFFEVMVAGKLIHSKKKGDGYVDTESKFLKLVAAIKAALAQG

SEQ ID NO: 62912 - protein, 88 aa, Homo sapiens [sequence omitted]

SEQ ID NO: 62913 - protein, 116 aa, Homo sapiens
MSFCSFFGGEVFQNHFEPGVYVCAKCGYELFSSRSKYAHSSPWPAFTETIHADSVAKRPEHNRSEALKVSCGKCGNGLGHEFLNDGPKPGQSRFUIFSSSLKFVPKGKETSASQGH

SEQ ID NO: 62914 - protein, 226 aa, Homo sapiens
MSFCSFFGGEVFQNHFEPGVYVCAKCGYELFSSRSKYAHSSPWPAFTETIHADSVAKRPEHNRSEALKVRGHRGGGGTGAARESREPVPPSSLCLPHSSRGLEASIPGLLPLPGSCHPRLSGEPGLLVQMWETGQVSCTGSRTKVNLLCRRSAWEIGVWEETPSASPSKGLHCGCIMARSSPSCLVIFPGVLWQVWQWVGPRVPERRPQAGAVPILNIQQLAEVCP

SEQ ID NO: 62915 - protein, 775 aa, Homo sapiens
MASAGHIITLLLWGYLLELWTGGHTADTTHPRLRLSHKELLNLNRTSIFHSPFGFLDLHTMLLDEYQERLFVGGRDLVYSLSLERISDGYKEIHWPSTALKMEECIMKGKDAGECANYVRVLHHYNRTHLLTCGTGAFDPVCAFIRVGYHLEDPLFHLESPRSERGRGRCPFDPSSSFISTLIGSELFAGLYSDYWSRDAAIFRSMGRLAHIRTEHDDERLLKEPKFVGSYMIPDNEDRDDNKVYFFFTEKALEAENNAHAIYTRVGRLCVNDVGGQRILVNKWSTFLKARLVCSVPGMNGIDTYFDELEDVFLLPTRDHKNPVIFGLFNTTSNIFRGHAICVYHMSSIRAAFNGPYAHKEGPEYHWSVYEGKVPYPRPGSCASKVNGGRYGTTKDYPDDAIRFARSHPLMYQAIKPAHKKPILVKTDGKYNLKQIAVDRVEAEDGQYDVLFIGTDNGIVLKVITIYNQEMESMEEVILEELQIFKDPVPIISMEISSKRQQLYIGSASAVAQVRFHHCDMYGSACADCCLARDPYCAWDGISCSRYYPTGTHAKRRFRRQDVRHGNAAQQCFGQQFVGDALDKTEEHLAYGIENNSTLLECTPRSLQAKVIWFVQKGRETRKEEVKTDDRVVKMDLGLLFLRLHKSDAGTYFCQTVEHSFVHTVRKITLEVVEEEKVEDMFNKDDEEDRHHRMPCPAQSSISQGAKPWYKEFLQLIGYSNFQRVEEYCEKVWCTDRKRKKLKMSPSKWKYANPQEKKLRSKPEHYRLPRHTLDS

SEQ ID NO: 62916 - protein, 715 aa, Homo sapiens
MLLDEYQERLFVGGRDLVYSLSLERISDGYKEIHWPSTALKMEECIMKGKDAGECANYVRVLHHYNRTHLLTCGTGAFDPVCAFIRVGYHLEDPLFHLESPRSERGRGRCPFDPSSSFISTLIGSELFAGLYSDYWSRDAAIFRSMGRLAHIRTEHDDERLLKEPKFVGSYMIPDNEDRDDNKVYFFFTEKALEAENNAHAIYTRVGRLCVNDVGGQRILVNKWSTFLKARLVCSVPGMNGIDTYFDELEDVFLLPTRDHKNPVIFGLFNTTSNIFRGHAICVYHMSSIRAAFNGPYAHKEGPEYHWSVYEGKVPYPRPGSCASKVNGGRYGTTKDYPDDAIRFARSHPLMYQAIKPAHKKPILVKTDGKYNLKQIAVDRVEAEDGQYDVLFIGTDNGIVLKVITIYNQEMESMEEVILEELQIFKDPVPIISMEISSKRQQLYIGSASAVAQVRFHHCDMYGSACADCCLARDPYCAWDGISCSRYYPTGTHAKRRFRRQDVRHGNAAQQCFGQQFVGDALDKTEEHLAYGIENNSTLLECTPRSLQAKVIWFVQKGRETRKEEVKTDDRVVKMDLGLLFLRLHKSDAGTYFCQTVEHSFVHTVRKITLEVVEEEKVEDMFNKDDEEDRHHRMPCPAQSSISQGAKPWYKEFLQLIGYSNFQRVEEYCEKVWCTDRKRKKLKMSPSKWKYANPQEKKLRSKPEHYRLPRHTLDS

SEQ ID NO: 62917 - protein, 766 aa, Homo sapiens
MASAGHIITLLLWGYLLELWTGGHTADTTHPRLRLSHKELLNLNRTSIFHSPFGFLDLHTMLLDEYQERLFVGGRDLVYSLSLERISDGYKEIHWPSTALKMEECIMKGKDAGECANYVRVLHHYNRTHLLTCGTGAFDPVCAFIRVGYHLEDPLFHLESPRSERGRGRCPFDPSSSFISTLIGSELFAGLYSDYWSRDAAIFRSMGRLAHIRTEHDDERLLKEPKFVGSYMIPDNEDRDDNKVYFFFTEKALEAENNAHAIYTRVGRLCVNDVGGQRILVNKWSTFLKARLVCSVPGMNGIDTYFDELEDVFLLPTRDHKNPVIFGLFNTTSNIFRGHAICVYHMSSIRAAFNGPYAHKEGPEYHWSVYEGKVPYPRPGSCASKVNGGRYGTTKDYPDDAIRFARSHPLMYQAIKPAHKKPILVKTDGKYNLKQIAVDRVEAEDGQYDVLFIGTDNGIVLKVITIYNQEMESMEEVILEELQIFKDPVPIISMEISSKRQQLYIGSASAVAQVRFHHCDMYGSACADCCLARDPYCAWDGISCSRYYPTGTHAKRRFRRQDVRHGNAAQQCFGQQFVGDALDKTEEHLAYGIENNSTLLECTPRSLQAKVIWFVQKGRETRKEEVKTDDRVVKMDLGLLFLRLHKSDAGTYFCQTVEHSFVHTVRKITLEVVEEEKVEDMFNKDDEEDRHHRMPCPAQSSISQGAKPWYKEFLQLIGYSNFQRVEEYCEKVWCTDRKRKKLKMSPSKWKYANPQHYRLPRHTLDS

SEQ ID NO: 62918 - protein, 761 aa, Homo sapiens
MALPALGLDPWSLLGLFLFQLLQLLLPTTTAGGGGQGPMPRVRYYAGDERRALSFFHQKGLQDFDTLLLSGDGNTLYVGAREAILALDIQDPGVPRLKNMIPWPASDRKKSECAFKKKSNETQCFNFIRVLVSYNVTHLYTCGTFAFSPACTFIELQDSYLLPISEDKVMEGKGQSPFDPAHKHTAVLVDGMLYSGTMNNFLGSEPILMRTLGSQPVLKTDNFLRWLHHDASFVAAIPSTQVVYFFFEETASEFDFFERLHTSRVARVCKNDVGGEKLLQKKWTTFLKAQLLCTQPGQLPFNVIRHAVLLPADSPTAPHIYAVFTSQWQVGGTRSSAVCAFSLLDIERVFKGKYKELNKETSRWTTYRGPETNPRPGSCSVGPSSDKALTFMKDHFLMDEQVVGTPLLVKSGVEYTRLAVETAQGLDGHSHLVMYLGTTTGSLHKAVVSGDSSAHLVEEIQLFPDPEPVRNLQLAPTQGAVFVGFSGGVWRVPRANCSVYESCVDCVLARDPHCAWDPESRTCCLLSAPNLNSWKQDMERGNPEWACASGPMSRSLRPQSRPQIIKEVLAVPNSILELPCPHLSALASYYWSHGPAAVPEASSTVYNGSLLLIVQDGVGGLYQCWATENGFSYPVISYWVDSQDQTLALDPELAGIPREHVKVPLTRVSGGAALAAQQSYWPHFVTVTVLFALVLSGALIILVASPLRALRARGKVQGCETLRPGEKAPLSREQHLQSPKECRTSASDVDADNNCLGTEVA

SEQ ID NO: 62919 - protein, 761 aa, Homo sapiens; identical to SEQ ID NO: 62918

SEQ ID NO: 62920 - protein, 723 aa, Homo sapiens
MPRVRYYAGDERRALSFFHQKGLQDFDTLLLSGDGNTLYVGAREAILALDIQDPGVPRLKNMIPWPASDRKKSECAFKKKSNETQCFNFIRVLVSYNVTHLYTCGTFAFSPACTFIELQDSYLLPISEDKVMEGKGQSPFDPAHKHTAVLVDGMLYSGTMNNFLGSEPILMRTLGSQPVLKTDNFLRWLHHDASFVAAIPSTQVVYFFFEETASEFDFFERLHTSRVARVCKNDVGGEKLLQKKWTTFLKAQLLCTQPGQLPFNVIRHAVLLPADSPTAPHIYAVFTSQWQVGGTRSSAVCAFSLLDIERVFKGKYKELNKETSRWTTYRGPETNPRPGSCSVGPSSDKALTFMKDHFLMDEQVVGTPLLVKSGVEYTRLAVETAQGLDGHSHLVMYLGTTTGSLHKAVVSGDSSAHLVEEIQLFPDPEPVRNLQLAPTQGAVFVGFSGGVWRVPRANCSVYESCVDCVLARDPHCAWDPESRTCCLLSAPNLNSWKQDMERGNPEWACASGPMSRSLRPQSRPQIIKEVLAVPNSILELPCPHLSALASYYWSHGPAAVPEASSTVYNGSLLLIVQDGVGGLYQCWATENGFSYPVISYWVDSQDQTLALDPELAGIPREHVKVPLTRVSGGAALAAQQSYWPHFVTVTVLFALVLSGALIILVASPLRALRARGKVQGCETLRPGEKAPLSREQHLQSPKECRTSASDVDADNNCLGTEVA

SEQ ID NO: 62921 - protein, 629 aa, Homo sapiens
MIPWPASDRKKSECAFKKKSNEELQDSYLLPISEDKVMEGKGQSPFDPAHKHTAVLVDGMLYSGTMNNFLGSEPILMRTLGSQPVLKTDNFLRWLHHDASFVAAIPSTQVVYFFFEETASEFDFFERLHTSRVARVCKNDVGGEKLLQKKWTTFLKAQLLCTQPGQLPFNVIRHAVLLPADSPTAPHIYAVFTSQWQVGGTRSSAVCAFSLLDIERVFKGKYKELNKETSRWTTYRGPETNPRPGSCSVGPSSDKALTFMKDHFLMDEQVVGTPLLVKSGVEYTRLAVETAQGLDGHSHLVMYLGTTTGSLHKAVVSGDSSAHLVEEIQLFPDPEPVRNLQLAPTQGAVFVGFSGGVWRVPRANCSVYESCVDCVLARDPHCAWDPESRTCCLLSAPNLNSWKQDMERGNPEWACASGPMSRSLRPQSRPQIIKEVLAVPNSILELPCPHLSALASYYWSHGPAAVPEASSTVYNGSLLLIVQDGVGGLYQCWATENGFSYPVISYWVDSQDQTLALDPELAGIPREHVKVPLTRVSGGAALAAQQSYWPHFVTVTVLFALVLSGALIILVASPLRALRARGKVQGCETLRPGEKAPLSREQHLQSPKECRTSASDVDADNNCLGTEVA

SEQ ID NO: 62922 - protein, 761 aa, Homo sapiens; identical to SEQ ID NO: 62918

SEQ ID NO: 62923 - protein, 629 aa, Homo sapiens; identical to SEQ ID NO: 62921

SEQ ID NO: 62924 - protein, 220 aa, Homo sapiens
MIPWPASDRKKSECAFKKKSNETQCFNFIRVLVSYNVTHLYTCGTFAFSPACTFIELQDSYLLPISEDKVMEGKGQSPFDPAHKHTAVLVDGMLYSGTMNNFLGSEPILMRTLGSQPVLKTDNFLRWLHHDASFVAAIPSTQVVYFFFEETASEFDFFERLHTSRVARVCKNDVGGEKLLQKKWTTFLKAQLLCTQPGQLPFNVIRHAVLLPADSPTAPH

SEQ ID NO: 62925 - protein, 321 aa, Homo sapiens
MALPALGLDPWSLLGLFLFQLLQLLLPTTTAGGGGQGPMPRVRYYAGDERRALSFFHQKGLQDFDTLLLSGDGNTLYVGAREAILALDIQDPGVPRLKNMIPWPASDRKKSECAFKKKSNETQCFNFIRVLVSYNVTHLYTCGTFAFSPACTFIELQDSYLLPISEDKVMEGKGQSPFDPAHKHTAVLVDGMLYSGTMNNFLGSEPILMRTLGSQPVLKTDNFLRWLHHDASFVAAIPSTQVVYFFFEETASEFDFFERLHTSRVARVCKNDVGGEKLLQKKWTTFLKAQLLCTQPGQLPFNVIRHAVLLPADSPTAPHIY

SEQ ID NO: 62926 - protein, 236 aa, Homo sapiens
MALPALGLDPWSLLGLFLFQLLQLLLPTTTAGGGGQGPMPRVRYYAGDERRALSFFHQKGLQDFDTLLLSGDGNTLYVGAREAILALDIQDPGVPRLKNMIPWPASDRKKSECAFKKKSNEELQDSYLLPISEDKVMEGKGQSPFDPAHKHTAVLVDGMLYSGTMNNFLGSEPILMRTLGSQPVLKTDNFLRWLHHDASFVAAIPSTQVVYFFFEETASEFDFFERLHTSRVARVC

SEQ ID NO: 62927 - protein, 723 aa, Homo sapiens; identical to SEQ ID NO: 62920

SEQ ID NO: 62928 - protein, 1074 aa, Homo sapiens
MKGTCVIAWLFSSLGLWRLAHPEAQGTTQCQRTEHPVISYKEIGPWLREFRAKNAVDFSQLTFDPGQKELVVGARNYLFRLQLEDLSLIQAVEWECDEATKKACYSKGKSKEECQNYIRVLLVGGDRLFTCGTNAFTPVCTNRSLSNLTEIHDQISGMARCPYSPQHNSTALLTAGGELYAATAMDFPGRDPAIYRSLGILPPLRTAQYNSKWLNEPNFVSSYDIGNFTYFFFRENAVEHDCGKTVFSRAARVCKNDIGGRFLLEDTWTTFMKARLNCSRPGEVPFYYNELQSTFFLPELDLIYGIFTTNVNSIAASAVCVFNLSAIAQAFSGPFKYQENSRSAWLPYPNPNPHFQCGTVDQGLYVNLTERNLQDAQKFILMHEVVQPVTTVPSFMEDNSRFSHVAVDVVQGREALVHIIYLATDYGTIKKVRVPLNQTSSSCLLEEIELFPERRREPIRSLQILHSQSVLFVGLREHVVKIPLKRCQFYRTRSTCIGAQDPYCGWDVVMKKCTSLEESLSMTQWEQSISACPTRNLTVDGHFGVWSPWTPCTHTDGSAVGSCLCRTRSCDSPAPQCGGWQCEGPGMEIANCSRNGGWTPWTSWSPCSTTCGIGFQVRQRSCSNPTPRHGGRVCVGQNREERYCNEHLLCPPHMFWTGWGPWERCTAQCGGGIQARRRICENGPDCAGCNVEYQSCNTNPCPELKKTTPWTPWTPVNISDNGGHYEQRFRYTCKARLADPNLLEVGRQRIEMRYCSSDGTSGCSTDGLSGDFLRAGRYSAHTVNGAWSAWTSWSQCSRDCSRGIRNRKRVCNNPEPKYGGMPCLGPSLEYQECNILPCPVDGVWSCWSPWTKCSATCGGGHYMRTRSCSNPAPAYGGDICLGLHTEEALCNTQPCPESWSEWSDWSECEASGVQVRARQCILLFPMGSQCSGNTTESRPCVFDSNFIPEVSVARSSSVEEKRCGEFNMFHMIAVGLSSSILGCLLTLLVYTYCQRYQQQSHDATVIHPVSPAPLNTSITNHINKLDKYDSVEAIKAFNKNNLILEERNKYFNPHLTGKTYSNAYFTDLNNYDEY

SEQ ID NO: 62929 - protein, 254 aa, Homo sapiens
MKGTCVIAWLFSSLGLWRLAHPEAQGTTQCQRTEHPVISYKEIGPWLREFRAKNAVDFSQLTFDPGQKELVVGARNYLFRLQLEDLSLIQAVEWECDEATKKACYSKGKSKEECQNYIRVLLVGGDRLFTCGTNAFTPVCTNRSLSNLTEIHDQISGMARCPYSPQHNSTALLTAGGELYAATAMDFPGRDPAIYRSLGILPPLRTAQYNSKWLNEPNFVSSYDIGNFTYFFFRENAVEHDCGKTVFSRAARVC

SEQ ID NO: 62930 - protein, 666 aa, Homo sapiens
MTPPPPGRAAPSAPRARVPGPPARLGLPLRLRLLLLLWAAAASAQGHLRSGPRIFAVWKGHVGQDRVDFGQTEPHTVLFHEPGSSSVWVGGRGKVYLFDFPEGKNASVRTVNIGSTKGSCLDKRDCENYITLLERRSEGLLACGTNARHPSCWNLVNGTVVPLGEMRGYAPFSPDENSLVLFEGDEVYSTIRKQEYNGKIPRFRRIRGESELYTSDTVMQNPQFIKATIVHQDQAYDDKIYYFFREDNPDKNPEAPLNVSRVAQLCRGDQGGESSLSVSKWNTFLKAMLVCSDAATNKNFNRLQDVFLLPDPSGQWRDTRVYGVFSNPWNYSAVCVYSLGDIDKVFRTSSLKGYHSSLPNPRPGKCLPDQQPIPTETFQVADRHPEVAQRVEPMGPLKTPLFHSKYHYQKVAVHRMQASHGETFHVLYLTTDRGTIHKVVEPGEQEHSFAFNIMEIQPFRRAAAIQTMSLDAERRKLYVSSQWEVSQVPLDLCEVYGGGCHGCLMSRDPYCGWDQGRCISIYSSERSVLQSINPAEPHKECPNPKPDKAPLQKVSLAPNSRYYLSCPMESRHATYSWRHKENVEQSCEPGHQSPNCILFIENLTAQQYGHYFCEAQEGSYFREAQHWQLLPEDGIMAEHLLGHACALAASLWLGVLPTLTLGLLVH

SEQ ID NO: 62931 - protein, 501 aa, Homo sapiens
MRGYAPFSPDENSLVLFEGDEVYSTIRKQEYNGKIPRFRRIRGESELYTSDTVMQNPQFIKATIVHQDQAYDDKIYYFFREDNPDKNPEAPLNVSRVAQLCRGDQGGESSLSVSKWNTFLKAMLVCSDAATNKNFNRLQDVFLLPDPSGQWRDTRVYGVFSNPWNYSAVCVYSLGDIDKVFRTSSLKGYHSSLPNPRPGKCLPDQQPIPTETFQVADRHPEVAQRVEPMGPLKTPLFHSKYHYQKVAVHRMQASHGETFHVLYLTTDRGTIHKVVEPGEQEHSFAFNIMEIQPFRRAAAIQTMSLDAERRKLYVSSQWEVSQVPLDLCEVYGGGCHGCLMSRDPYCGWDQGRCISIYSSERSVLQSINPAEPHKECPNPKPDKAPLQKVSLAPNSRYYLSCPMESRHATYSWRHKENVEQSCEPGHQSPNCILFIENLTAQQYGHYFCEAQEGSYFREAQHWQLLPEDGIMAEHLLGHACALAASLWLGVLPTLTLGLLVH

SEQ ID NO: 62932 - protein, 652 aa, Homo sapiens
MTPPPPGRAAPSAPRARVPGPPARLGLPLRLRLLLLLWAAAASAQGHLRSGPRIFAVWKGHVGQDRVDFGQTEPHTVLFHEPGSSSVWVGGRGKVYLFDFPEGKNASVRTDCENYITLLERRSEGLLACGTNARHPSCWNLVNGTVVPLGEMRGYAPFSPDENSLVLFEGDEVYSTIRKQEYNGKIPRFRRIRGESELYTSDTVMQNPQFIKATIVHQDQAYDDKIYYFFREDNPDKNPEAPLNVSRVAQLCRGDQGGESSLSVSKWNTFLKAMLVCSDAATNKNFNRLQDVFLLPDPSGQWRDTRVYGVFSNPWNYSAVCVYSLGDIDKVFRTSSLKGYHSSLPNPRPGKCLPDQQPIPTETFQVADRHPEVAQRVEPMGPLKTPLFHSKYHYQKVAVHRMQASHGETFHVLYLTTDRGTIHKVVEPGEQEHSFAFNIMEIQPFRRAAAIQTMSLDAERRKLYVSSQWEVSQVPLDLCEVYGGGCHGCLMSRDPYCGWDQGRCISIYSSERSVLQSINPAEPHKECPNPKPDKAPLQKVSLAPNSRYYLSCPMESRHATYSWRHKENVEQSCEPGHQSPNCILFIENLTAQQYGHYFCEAQEGSYFREAQHWQLLPEDGIMAEHLLGHACALAASLWLGVLPTLTLGLLVH

SEQ ID NO: 62933 - protein, 402 aa, Homo sapiens
MKPNIIFVLSLLLILEKQAAVMGQKGGSKGRLPSEFSQFPHGQKGQHYSGQKGKQQTESKGSFSIQYTYHVDANDHDQSRKSQQYDLNALHKTTKSQRHLGGSQQLLHNKQEGRDHDKSKGHFHRVVIHHKGGKAHRGTQNPSQDQGNSPSGKGISSQYSNTEERLWVHGLSKEQTSVSGAQKGRKQGGSQSSYVLQTEELVANKQQRETKNSHQNKGHYQNVVEVREEHSSKVQTSLCPAHQDKLQHGSKDIFSTQDELLVYNKNQHQTKNLNQDQQHGRKANKISYQSSSTEERRLHYGENGVQKDVSQRSIYSQTEKLVAGKSQIQAPNPKQEPWHGENAKGESGQSTNREQDLLSHEQKGRHQHGSHGGLDIVIIEQEDDSDRHLAQHLNNDRNPLFT

SEQ ID NO: 62934 - protein, 462 aa, Homo sapiens
MKPNIIFVLSLLLILEKQAAVMGQKGGSKGRLPSEFSQFPHGQKGQHYSGQKGKQQTESKGSFSIQYTYHVDANDHDQSRKSQQYDLNALHKTTKSQRHLGGSQQLLHNKQEGRDHDKSKGHFHRVVIHHKGGKAHRGTQNPSQDQGNSPSGKGISSQYSNTEERLWVHGLSKEQTSVSGAQKGRKQGGSQSSYVLQTEELVANKQQRETKNSHQNKGHYQNVVEVREEHSSKVQTSLCPAHQDKLQHGSKDIFSTQDELLVYNKNQHQTKNLNQDQQHGRKANKISYQSSSTEERRLHYGENGVQKDVSQSSIYSQTEEKAQGKSQKQITIPSQEQEHSQKANKISYQSSSTEERRLHYGENGVQKDVSQRSIYSQTEKLVAGKSQIQAPNPKQEPWHGENAKGESGQSTNREQDLLSHEQKGRHQHGSHGGLDIVIIEQEDDSDRHLAQHLNNDRNPLFT

SEQ ID NO: 62935 - protein, 582 aa, Homo sapiens
MKSIILFVLSLLLILEKQAAVMGQKGGSKGQLPSGSSQFPHGQKGQHYFGQKDQQHTKSKGSFSIQHTYHVDINDHDWTRKSQQYDLNALHKATKSKQHLGGSQQLLNYKQEGRDHDKSKGHFHMIVIHHKGGQAHHGTQNPSQDQGNSPSGKGLSSQCSNTEKRLWVHGLSKEQASASGAQKGRTQGGSQSSYVLQTEELVVNKQQRETKNSHQNKGHYQNVVDVREEHSSKLQTSLHPAHQDRLQHGPKDIFTTQDELLVYNKNQHQTKNLSQDQEHGRKAHKISYPSSRTEERQLHHGEKSVQKDVSKGSISIQTEEKIHGKSQNQVTIHSQDQEHGHKENKISYQSSSTEERHLNCGEKGIQKGVSKGSISIQTEEQIHGKSQNQVRIPSQAQEYGHKENKISYQSSSTEERRLNSGEKDVQKGVSKGSISIQTEEKIHGKSQNQVTIPSQDQEHGHKENKMSYQSSSTEERRLNYGGKSTQKDVSQSSISFQIEKLVEGKSQIQTPNPNQDQWSGQNAKGKSGQSADSKQDLLSHEQKGRYKQESSESHNIVITEHEVAQDDHLTQQYNEDRNPIST

SEQ ID NO: 62936 - protein, 2677 aa, Homo sapiens
MSTCCWCTPGGASTIDFLKRYASNTPSGEFQTADEDLCYCLECVAEYHKARDELPFLHEVLWELETLRLINHFEKSMKAEIGDDDELYIVDNNGEMPLFDITGQDFENKLRVPLLEILKYPYLLLHERVNELCVEALCRMEQANCSFQVFDKHPGIYLFLVHPNEMVRRWAILTARNLGKVDRDDYYDLQEVLLCLFKVIELGLLESPDIYTSSVLEKGKLILLPSHMYDTTNYKSYWLGICMLLTILEEQAMDSLLLGSDKQNDFMQSILHTMEREADDDSVDPFWPALHCFMVILDRLGSKVWGQLMDPIVAFQTIINNASYNREIRHIRNSSVRTKLEPESYLDDMVTCSQIVYNYNPEKTKKDSGWRTAICPDYCPNMYEEMETLASVLQSDIGQDMRVHNSTFLWFIPFVQSLMDLKDLGVAYIAQVVNHLYSEVKEVLNQTDAVCDKVTEFFLLILVSVIELHRNKKCLHLLWVSSQQWVEAVVKCAKLPTTAFTRSSEKSSGNCSKGTAMISSLSLHSMPSNSVQLAYVQLIRSLLKEGYQLGQQSLCKRFWDKLNLFLRGNLSLGWQLTSQETHELQSCLKQIIRNIKFKAPPCNTFVDLTSACKISPASYNKEESEQMGKTSRKDMHCLEASSPTFSKEPMKVQDSVLIKADNTIEGDNNEQNYIKDVKLEDHLLAGSCLKQSSKNIFTERAEDQIKISTRKQKSVKEISSYTPKDCTSRNGPERGCDRGIIVSTRLLTDSSTDALEKVSTSNEDFSLKDDALAKTSKRKTKVQKDEICAKLSHVIKKQHRKSTLVDNTINLDENLTVSNIESFYSRKDTGVQKGDGFIHNLSLDPSGVLDDKNGEQKSQNNVLPKEKQLKNEELVIFSFHENNCKIQEFHVDGKELIPFTEMTNASEKKSSPFKDLMTVPESRDEEMSNSTSVIYSNLTREQAPDISPKSDTLTDSQIDRDLHKLSLLAQASVITFPSDSPQNSSQLQRKVKEDKRCFTANQNNVGDTSRGQVIIISDSDDDDDERILSLEKLTKQDKICLEREHPEQHVSTVNSKEEKNPVKEEKTETLFQFEESDSQCFEFESSSEVFSVWQDHPDDNNSVQDGEKKCLAPIANTTNGQGCTDYVSEVVKKGAEGIEEHTRPRSISVEEFCEIEVKKPKRKRSEKPMAEDPVRPSSSVRNEGQSDTNKRDLVGNDFKSIDRRTSTPNSRIQRATTVSQKKSSKLCTCTEPIRKVPVSKTPKKTHSDAKKGQNRSSNYLSCRTTPAIVPPKKFRQCPEPTSTAEKLGLKKGPRKAYELSQRSLDYVAQLRDHGKTVGVVDTRKKTKLISPQNLSVRNNKKLLTSQELQMQRQIRPKSQKNRRRLSDCESTDVKRAGSHTAQNSDIFVPESDRSDYNCTGGTEVLANSNRKQLIKCMPSEPETIKAKHGSPATDDACPLNQCDSVVLNGTVPTNEVIVSTSEDPLGGGDPTARHIEMAALKEGEPDSSSDAEEDNLFLTQNDPEDMDLCSQMENDNYKLIELIHGKDTVEVEEDSVSRPQLESLSGTKCKYKDCLETTKNQGEYCPKHSEVKAADEDVFRKPGLPPPASKPLRPTTKIFSSKSTSRIAGLSKSLETSSALSPSLKNKSKGIQSILKVPQPVPLIAQKPVGEMKNSCNVLHPQSPNNSNRQGCKVPFGESKYFPSSSPVNILLSSQSVSDTFVKEVLKWKYEMFLNFGQCGPPASLCQSISRPVPVRFHNYGDYFNVFFPLMVLNTFETVAQEWLNSPNRENFYQLQVRKFPADYIKYWEFAVYLEECELAKQLYPKENDLVFLAPERINEEKKDTERNDIQDLHEYHSGYVHKFRRTSVMRNGKTECYLSIQTQENFPANLNELVNCIVISSLVTTQRKLKAMSLLGSRNQLARAVLNPNPMDFCTKDLLTTTSERIIAYLRDFNEDQKKAIETAYAMVKHSPSVAKICLIHGPPGTGKSKTIVGLLYRLLTENQRKGHSDENSNAKIKQNRVLVCAPSNAAVDELMKKIILEFKEKCKDKKNPLGNCGDINLVRLGPEKSINSEVLKFSLDSQVNHRMKKELPSHVQAMHKRKEFLDYQLDELSRQRALCRGGREIQRQELDENISKVSKERQELASKIKEVQGRPQKTQSIIILESHIICCTLSTSGGLLLESAFRGQGGVPFSCVIVDEAGQSCEIETLTPLIHRCNKLILVGDPKQLPPTVISMKAQEYGYDQSMMARFCRLLEENVEHNMISRLPILQLTVQYRMHPDICLFPSNYVYNRNLKTNRQTEAIRCSSDWPFQPYLVFDVGDGSERRDNDSYINVQEIKLVMEIIKLIKDKRKDVSFRNIGIITHYKAQKTMIQKDLDKEFDRKGPAEVDTVDAFQGRQKDCVIVTCVRANSIQGSIGFLASLQRLNVTITRAKYSLFILGHLRTLMENQHWNQLIQDAQKRGAIIKTCDKNYRHDAVKILKLKPVLQRSLTHPPTIAPEGSRPQGGLPSSKLDSGFAKTSVAASLYHTPSDSKEITLTVTSKDPERPPVHDQLQDPRLLKRMGIEVKGGIFLWDPQPSSPQHPGATPPTGEPGFPVVHQDLSHIQQPAAVVAALSSHKPPVRGEPPAASPEASTCQSKCDDPEEELCHRREARAFSEGEQEKCGSETHHTRRNSRWDKRTLEQEDSSSKKRKLL

SEQ ID NO: 62937 - protein, 2706 aa, Homo sapiens
MSTCCWCTPGGASTIDFLKRYASNTPSGEFQTADEDLCYCLECVAEYHKARDELPFLHEVLWELETLRLINHFEKSMKAEIGDDDELYIVDNNGEMPLFDITGQDFENKLRVPLLEILKYPYLLLHERVNELCVEALCRMEQANCSFQVFDKHPGIYLFLVHPNEMVRRWAILTARNLGKVDRDDYYDLQEVLLCLFKVIELGLLESPDIYTSSVLEKGKLILLPSHMYDTTNYKSYWLGICMLLTILEEQAMDSLLLGSDKQNDFMQSILHTMEREADDDSVDPFWPALHCFMVILDRLGSKVWGQLMDPIVAFQTIINNASYNREIRHIRNSSVRTKLEPESYLDDMVTCSQIVYNYNPEKTKKDSGWRTAICPDYCPNMYEEMETLASVLQSDIGQDMRVHNSTFLWFIPFVQSLMDLKDLGVAYIAQVVNHLYSEVKEVLNQTDAVCDKVTEFFLLILVSVIELHRNKKCLHLLWVSSQQWVEAVVKCAKLPTTAFTRSSEKSSGNCSKGTAMISSLSLHSMPSNSVQLAYVQLIRSLLKEGYQLGQQSLCKRFWDKLNLFLRGNLSLGWQLTSQETHELQSCLKQIIRNIKFKAPPCNTFVDLTSACKISPASYNKEESEQMGKTSRKDMHCLEASSPTFSKEPMKVQDSVLIKADNTIEGDNNEQNYIKDVKLEDHLLAGSCLKQSSKNIFTERAEDQIKISTRKQKSVKEISSYTPKDCTSRNGPERGCDRGIIVSTRLLTDSSTDALEKVSTSNEDFSLKDDALAKTSKRKTKVQKDEICAKLSHVIKKQHRKSTLVDNTINLDENLTVSNIESFYSRKDTGVQKGDGFIHNLSLDPSGVLDDKNGEQKSQNNVLPKEKQLKNEELVIFSFHENNCKIQEFHVDGKELIPFTEMTNASEKKSSPFKDLMTVPESRDEEMSNSTSVIYSNLTREQAPDISPKSDTLTDSQIDRDLHKLSLLAQASVITFPSDSPQNSSQLQRKVKEDKRCFTANQNNVGDTSRGQVIIISDSDDDDDERILSLEKLTKQDKICLEREHPEQHVSTVNSKEEKNPVKEEKTETLFQFEESDSQCFEFESSSEVFSVWQDHPDDNNSVQDGEKKCLAPIANTTNGQGCTDYVSEVVKKGAEGIEEHTRPRSISVEEFCEIEVKKPKRKRSEKPMAEDPVRPSSSVRNEGQSDTNKRDLVGNDFKSIDRRTSTPNSRIQRATTVSQKKSSKLCTCTEPIRKVPVSKTPKKTHSDAKKGQNRSSNYLSCRTTPAIVPPKKFRQCPEPTSTAEKLGLKKGPRKAYELSQRSLDYVAQLRDHGKTVGVVDTRKKTKLISPQNLSVRNNKKLLTSQELQMQRQIRPKSQKNRRRLSDCESTDVKRAGSHTAQNSDIFVPESDRSDYNCTGGTEVLANSNRKQLIKCMPSEPETIKAKHGSPATDDACPLNQCDSVVLNGTVPTNEVIVSTSEDPLGGGDPTARHIEMAALKEGEPDSSSDAEEDNLFLTQNDPEDMDLCSQMENDNYKLIELIHGKDTVEVEEDSVSRPQLESLSGTKCKYKDCLETTKNQGEYCPKHSEVKAADEDVFRKPGLPPPASKPLRPTTKIFSSKSTSRIAGLSKSLETSSALSPSLKNKSKGIQSILKVPQPVPLIAQKPVGEMKNSCNVLHPQSPNNSNRQGCKVPFGESKYFPSSSPVNILLSSQSVSDTFVKEVLKWKYEMFLNFGQCGPPASLCQSISRPVPVRFHNYGDYFNVFFPLMVLNTFETVAQEWLNSPNRENFYQLQVRKFPADYIKYWEFAVYLEECELAKQLYPKENDLVFLAPERINEEKKDTERNDIQDLHEYHSGYVHKFRRTSVMRNGKTECYLSIQTQENFPANLNELVNCIVISSLVTTQRKLKAMSLLGSRNQLARAVLNPNPMDFCTKDLLTTTSERIIAYLRDFNEDQKKAIETAYAMVKHSPSVAKICLIHGPPGTGKSKTIVGLLYRLLTENQRKGHSDENSNAKIKQNRVLVCAPSNAAVDELMKKIILEFKEKCKDKKNPLGNCGDINLVRLGPEKSINSEVLKFSLDSQVNHRMKKELPSHVQAMHKRKEFLDYQLDELSRQRALCRGGREIQRQELDENISKVSKERQELASKIKEVQGRPQKTQSIIILESHIICCTLSTSGGLLLESAFRGQGGVPFSCVIVDEAGQSCEIETLTPLIHRCNKLILVGDPKQLPPTVISMKAQEYGYDQSMMARFCRLLEENVEHNMISRLPILQLTVQYRMHPDICLFPSNYVYNRNLKTNRQTEAIRCSSDWPFQPYLVFDVGDGSERRDNDSYINVQEIKLVMEIIKLIKDKRKDVSFRNIGIITHYKAQKTMIQKDLDKEFDRKGPAEVDTVDAFQGRQKDCVIVTCVRANSIQGSIGFLASLQRLNVTITRAKYSLFILGHLRTLMQLLPRSFCVHVNHSPFFSPEPKYLHWALKENQHWNQLIQDAQKRGAIIKTCDKNYRHDAVKILKLKPVLQRSLTHPPTIAPEGSRPQGGLPSSKLDSGFAKTSVAASLYHTPSDSKEITLTVTSKDPERPPVHDQLQDPRLLKRMGIEVKGGIFLWDPQPSSPQHPGATPPTGEPGFPVVHQDLSHIQQPAAVVAALSSHKPPVRGEPPAASPEASTCQSKCDDPEEELCHRREARAFSEGEQEKCGSETHHTRRNSRWDKRTLEQEDSSSKKRKLL

SEQ ID NO: 62938 - protein, 2644 aa, Homo sapiens
MSTCCWCTPGGASTIDFLKRYASNTPSGEFQTADEDLCYCLECVAEYHKARDELPFLHEVLWELETLRLINHFEKSMKAEIGDDDELYIVDNNGEMPLFDITGQDFENKLRVPLLEILKYPYLLLHERVNELCVEALCRMEQANCSFQVFDKHPGIYLFLVHPNEMVRRWAILTARNLGKVDRDDYYDLQEVLLCLFKVIELGLLESPDIYTSSVLEKGKLILLPSHMYDTTNYKSYWLGICMLLTILEEQAMDSLLLGSDKQNDFMQSILHTMEREADDDSVDPFWPALHCFMVILDRLGSKVWGQLMDPIVAFQTIINNASYNREIRHIRNSSVRTKLEPESYLDDMVTCSQIVYNYNPEKTKKDSGWRTAICPDYCPNMYEEMETLASVLQSDIGQDMRVHNSTFLWFIPFVQSLMDLKDLGVAYIAQVVNHLYSEVKEVLNQTDAVCDKVTEFFLLILVSVIELHRNKKCLHLLWVSSQQWVEAVVKCAKLPTTAFTRSSEKSSGNCSKGTAMISSLSLHSMPSNSVQLAYVQLIRSLLKEGYQLGQQSLCKRFWDKLNLFLRGNLSLGWQLTSQETHELQSCLKQIIRNIKFKAPPCNTFVDLTSACKISPASYNKEESEQMGKTSRKDMHCLEASSPTFSKEPMKVQDSVLIKADNTIEGDNNEQNYIKDVKLEDHLLAGSCLKQSSKNIFTERAEDQIKISTRKQKSVKEISSYTPKDCTSRNGPERGCDRGIIVSTRLLTDSSTDALEKVSTSNEDFSLKDDALAKTSKRKTKVQKDEICAKLSHVIKKQHRKSTLVDNTINLDENLTVSNIESFYSRKDTGVQKGDGFIHNLSLDPSGVLDDKNGEQKSQNNVLPKEKQLKNEELVIFSFHENNCKIQEFHVDGKELIPFTEMTNASEKKSSPFKDLMTVPESRDEEMSNSTSVIYSNLTREQAPDISPKSDTLTDSQIDRDLHKLSLLAQASVITFPSDSPQNSSQLQRKVKEDKRCFTANQNNVGDTSRGQVIIISDSDDDDDERILSLEKLTKQDKICLEREHPEQHVSTVNSKEEKNPVKEEKTETLFQFEESDSQCFEFESSSEVFSVWQDHPDDNNSVQDGEKKCLAPIANTTNGQGCTDYVSEVVKKGAEGIEEHTRPRSISVEEFCEIEVKKPKRKRSEKPMAEDPVRPSSSVRNEGQSDTNKRDLVGNDFKSIDRRTSTPNSRIQRATTVSQKKSSKLCTCTEPIRKVPVSKTPKKTHSDAKKGQNRSSNYLSCRTTPAIVPPKKFRQCPEPTSTAEKLGLKKGPRKAYELSQRSLDYVAQLRDHGKTVGVVDTRKKTKLISPQNLSVRNNKKLLTSQELQMQRQIRPKSQKNRRRLSDCESTDVKRAGSHTAQNSDIFVPESDRSDYNCTGGTEVLANSNRKQLIKCMPSEPETIKAKHGSPATDDACPLNQCDSVVLNGTVPTNEVIVSTSEDPLGGGDPTARHIEMAALKEGEPDSSSDAEEDNLFLTQNDPEDMDLCSQMENDNYKLIELIHGKDTVEVEEDSVSRPQLESLSGTKCKYKDCLETTKNQGEYCPKHSEVKAADEDVFRKPGLPPPASKPLRPTTKIFSSKSTSRIAGLSKSLETSSALSPSLKNKSKGIQSILKVPQPVPLIAQKPVGEMKNSCNVLHPQSPNNSNRQGCKVPFGESKYFPSSSPVNILLSSQSVSDTFVKEVLKWKYEMFLNFGQCGPPASLCQSISRPVPVRFHNYGDYFNVFFPLMVLNTFETVAQEWLNSPNRENFYQLQVRKFPADYIKYWEFAVYLEECELAKQLYPKENDLVFLAPERINEEKKDTERNDIQDLHEYHSGYVHKFRRTSVMRNGKTECYLSIQTQENFPANLNELVNCIVISSLVTTQRKLKAMSLLGSRNQLARAVLNPNPMDFCTKDLLTTTSERIIAYLRDFNEDQKKAIETAYAMVKHSPSVAKICLIHGPPGTGKSKTIVGLLYRLLTENQRKGHSDENSNAKIKQNRVLVCAPSNAAVDELMKKIILEFKEKCKDKKNPLGNCGDINLVRLGPEKSINSEVLKFSLDSQVNHRMKKELPSHVQAMHKRKEFLDYQLDELSRQRALCRGGREIQRQELDENISKVSKERQELASKIKEVQGRPQKTQSIIILESHIICCTLSTSGGLLLESAFRGQGGVPFSCVIVDEAGQSCEIETLTPLIHRCNKLILVGDPKQLPPTVISMKAQEYGYDQSMMARFCRLLEENVEHNMISRLPILQLTVQYRMHPDICLFPSNYVYNRNLKTNRQTEAIRCSSDWPFQPYLVFDVGDGSERRDNDSYINVQEIKLVMEIIKLIKDKRKDVSFRNIGIITHYKAQKTMIQKDLDKEFDRKGFLASLQRLNVTITRAKYSLFILGHLRTLMENQHWNQLIQDAQKRGAIIKTCDKNYRHDAVKILKLKPVLQRSLTHPPTIAPEGSRPQGGLPSSKLDSGFAKTSVAASLYHTPSDSKEITLTVTSKDPERPPVHDQLQDPRLLKRMGIEVKGGIFLWDPQPSSPQHPGATPPTGEPGFPVVHQDLSHIQQPAAVVAALSSHKPPVRGEPPAASPEASTCQSKCDDPEEELCHRREARAFSEGEQEKCGSETHHTRRNSRWDKRTLEQEDSSSKKRKLL

SEQ ID NO: 62939 - protein, 948 aa, Homo sapiens
VAQEWLNSPNRENFYQLQVRKFPADYIKYWEFAVYLEECELAKQLYPKENDLVFLAPERINEEKKDTERNDIQDLHEYHSGYVHKFRRTSVMRNGKTECYLSIQTQENFPANLNELVNCIVISSLVTTQRKLKAMSLLGSRNQLARAVLNPNPMDFCTKDLLTTTSERIIAYLRDFNEDQKKAIETAYAMVKHSPSVAKICLIHGPPGTGKSKTIVGLLYRLLTENQRKGHSDENSNAKIKQNRVLVCAPSNAAVDELMKKIILEFKEKCKDKKNPLGNCGDINLVRLGPEKSINSEVLKFSLDSQVNHRMKKELPSHVQAMHKRKEFLDYQLDELSRQRALCRGGREIQRQELDENISKVSKERQELASKIKEVQGRPQKTQSIIILESHIICCTLSTSGGLLLESAFRGQGGVPFSCVIVDEAGQSCEIETLTPLIHRCNKLILVGDPKQLPPTVISMKAQEYGYDQSMMARFCRLLEENVEHNMISRLPILQLTVQYRMHPDICLFPSNYVYNRNLKTNRQTEAIRCSSDWPFQPYLVFDVGDGSERRDNDSYINVQEIKLVMEIIKLIKDKRKDVSFRNIGIITHYKAQKTMIQKDLDKEFDRKGPAEVDTVDAFQGRQKDCVIVTCVRANSIQGSIGFLASLQRLNVTITRAKYSLFILGHLRTLMQLLPRSFCVHVNHSPFFSPEPKYLHWALKENQHWNQLIQDAQKRGAIIKTCDKNYRHDAVKILKLKPVLQRSLTHPPTIAPEGSRPQGGLPSSKLDSGFAKTSVAASLYHTPSDSKEITLTVTSKDPERPPVHDQLQDPRLLKRMGIEVKGGIFLWDPQPSSPQHPGATPPTGEPGFPVVHQDLSHIQQPAAVVAALSSHKPPVRGEPPAASPEASTCQSKCDDPEEELCHRREARAFSEGEQEKCGSETHHTRRNSRWDKRTLEQEDSSSKKRKLL

SEQ ID NO: 62940 - protein, 422 aa, Homo sapiens
MSTSYGCFWRRFIHGIGRSGDISAVQPKAAGSSLLNKITNSLVLDIIKLAGVHTVANCFVVPMATGMSLTLCFLTLRHKRPKAKYIIWPRIDQKSCFKSMITAGFEPVVIENVLEGDELRTDLKAVEAKVQELGPDCILCIHSTTSCFAPRVPDRLEELAVICANYDIPHIVNNAYGVQSSKCMHLIQQGARVGRIDAFVQSLDKNFMVPVGGAIIAGFNDSFIQEISKMYPGRASASPSLDVLITLLSLGSNGYKKLLKERKEMFSYLSNQIKKLSEAYNERLLHTPHNPISLAMTLKTLDEHRDKAVTQLGSMLFTRQVSGARVVPLGSMQTVSGYTFRGFMSHTNNYPCAYLNAASAIGMKMQDVDLFIKRLDRCLKAVRKERSKESDDNYDKTEDVDIEEMALKLDNVLLDTYQDASS

SEQ ID NO: 62941 - protein, 501 aa, Homo sapiens
MNRESFAAGERLVSPAYVRQGCEARRSHEHLIRLLLEKGKCPENGWDESTLELFLHELAIMDSNNFLGNCGVGEREGRVASALVARRHYRFIHGIGRSGDISAVQPKAAGSSLLNKITNSLVLDIIKLAGVHTVANCFVVPMATGMSLTLCFLTLRHKRPKAKYIIWPRIDQKSCFKSMITAGFEPVVIENVLEGDELRTDLKAVEAKVQELGPDCILCIHSTTSCFAPRVPDRLEELAVICANYDIPHIVNNAYGVQSSKCMHLIQQGARVGRIDAFVQSLDKNFMVPVGGAIIAGFNDSFIQEISKMYPGRASASPSLDVLITLLSLGSNGYKKLLKERKEMFSYLSNQIKKLSEAYNERLLHTPHNPISLAMTLKTLDEHRDKAVTQLGSMLFTRQVSGARVVPLGSMQTVSGYTFRGFMSHTNNYPCAYLNAASAIGMKMQDVDLFIKRLDRCLKAVRKERSKESDDNYDKTEDVDIEEMALKLDNVLLDTYQDASS

SEQ ID NO: 62942 - protein, 261 aa, Homo sapiens
MEGGLGRAVCLLTGASRGFGRTLAPLLASLLSPGSVLVLSARNDEALRQLEAELGAERSGLRVVRVPADLGAEAGLQQLLGALRELPRPKGLQRLLLINNAGSLGDVSKGFVDLSDSTQVNNYWALNLTSMLCLTSSVLKAFPDSPGLNRTVVNISSLCALQPFKGWALYCAGKAARDMLFQVLALEEPNVRVLNYAPGPLDTDMQQLARETSVDPDMRKGLQELKAKGKLVDCKVSAQKLLSLLEKDEFKSGAHVDFYDK

SEQ ID NO: 62943 - protein, 367 aa, Homo sapiens
MDKEYVGFAALPNQLHRKSVKKGFDFTLMVAGESGLGKSTLINSLFLTNLYEDRQVPEASARLTQTLAIERRGVEIEEGGVKVKLTLVDTPGFGDSVDCSDCWLPVVKFIEEQFEQYLRDESGLNRKNIQDSRVHCCLYFISPFGRGLRPLDVAFLRAVHEKVNIIPVIGKADALMPQETQALKQKIRDQLKEEEIHIYQFPECDSDEDEDFKRQDAEMKESIPFAVVGSCEVVRDGGNRPVRGRRYSWGTVEVENPHHCDFLNLRRMLVQTHLQDLKEVTHDLLYEGYRARCLQSLARPGARDRASRSKLSRQSATEIPLPMLPLADTEKLIREKDEELRRMQEMLEKMQAQMQQSQAQGEQSDAL

SEQ ID NO: 62944 - protein, 367 aa, Homo sapiens; identical to SEQ ID NO: 62943

SEQ ID NO: 62945 - protein, 321 aa, Homo sapiens
MMNRYYQPIVDYIDAQFEAYLQEELKIKRSLFTYHDSRIHVCLYFISPTGHSLKTLDLLTMKNLDSKVNIIPVIAKADTVSKTELQKFKIKLMSELVSNGVQIYQFPTDDDTIAKVNAAMNGQLPFAVVGSMDEVKVGNKMVKARQYPWGVVQVENENHCDFVKLREMLICTNMEDLREQTHTRHYELYRRCKLEEMGFTDVGPENKPVSVQETYEAKRHEFHGERQRKEEEMKQMFVQRVKEKEAILKEAERELQAKFEHLKRLHQEERMKLEEKRRLLEEEIIAFSKKKATSEIFHSQSFLATGSNLRKDKDRKNSNFL

SEQ ID NO: 62946 - protein, 317 aa, Homo sapiens [sequence omitted]

SEQ ID NO: 62947 - protein, 544 aa, Homo sapiens
MASSEVARHLLFQSHMATKTTCMSSQGSDDEQIKRENIRSLTMSGHVGFESLPDQLVNRSIQQGFCFNILCVGETGIGKSTLIDTLFNTNFEDYESSHFCPNVKLKAQTYELQESNVQLKLTIVNTVGFGDQINKEESYQPIVDYIDAQFEAYLQEELKIKRSLFTYHDSRIHVCLYFISPTGHSLKTLDLLTMKNLDSKVNIIPVIAKADTVSKTELQKFKIKLMSELVSNGVQIYQFPTDDDTIAKVNAAMNGQLPFAVVGSMDEVKVGNKMVKARQYPWGVVQVENENHCDFVKLREMLICTNMEDLREQTHTRHYELYRRCKLEEMGFTDVGPENKPVSVQETYEAKRHEFHGERQRKEEEMKQMFVQRVKEKEAILKEAERELQAKFEHLKRLHQEERMKLEEKRRLLEEEIIAFSKKKATSEIFHSQSFLATGSNLRKDKDRKKEPGCRFELLCIDVRACETNGGRKDAEKAPIFCKTEVPEHRRSSSQANFIKKKLEVCFDFAVICFITSIFGEQPQLLIFMEKYFQVQGQYISQSE

SEQ ID NO: 62948 - protein, 454 aa, Homo sapiens
MASSEVARHLLFQSHMATKTTCMSSQGSDDEQIKRENIRSLTMSGHVGFESLPDQLVNRSIQQGFCFNILCVGETGIGKSTLIDTLFNTNFEDYESSHFCPNVKLKAQTYELQESNVQLKLTIVNTVGFGDQINKEESYQPIVDYIDAQFEAYLQEELKIKRSLFTYHDSRIHVCLYFISPTGHSLKTLDLLTMKNLDSKVNIIPVIAKADTVSKTELQKFKIKLMSELVSNGVQIYQFPTDDDTIAKVNAAMNGQLPFAVVGSMDEVKVGNKMVKARQYPWGVVQVENENHCDFVKLREMLICTNMEDLREQTHTRHYELYRRCKLEEMGFTDVGPENKPVSVQETYEAKRHEFHGERQRKEEEMKQMFVQRVKEKEAILKEAERELQAKFEHLKRLHQEERMKLEEKRRLLEEEIIAFSKKKATSEIFHSQSFLATGSNLRKDKDRKNSNFL

SEQ ID NO: 62949 - protein, 431 aa, Homo sapiens
MASSEVARHLKRENIRSLTMSGHVGFESLPDQLVNRSIQQGFCFNILCVGETGIGKSTLIDTLFNTNFEDYESSHFCPNVKLKAQTYELQESNVQLKLTIVNTVGFGDQINKEESYQPIVDYIDAQFEAYLQEELKIKRSLFTYHDSRIHVCLYFISPTGHSLKTLDLLTMKNLDSKVNIIPVIAKADTVSKTELQKFKIKLMSELVSNGVQIYQFPTDDDTIAKVNAAMNGQLPFAVVGSMDEVKVGNKMVKARQYPWGVVQVENENHCDFVKLREMLICTNMEDLREQTHTRHYELYRRCKLEEMGFTDVGPENKPVSVQETYEAKRHEFHGERQRKEEEMKQMFVQRVKEKEAILKEAERELQAKFEHLKRLHQEERMKLEEKRRLLEEEIIAFSKKKATSEIFHSQSFLATGSNLRKDKDRKNSNFL

SEQ ID NO: 62950 - protein, 450 aa, Homo sapiens
MASSEVARHLLFQSHMATKTTCMSSQGSDDEQIKRENIRSLTMSGHVGFESLPDQLVNRSIQQGFCFNILCVGETGIGKSTLIDTLFNTNFEDYESSHFCPNVKLKAQTYELQESNVQLKLTIVNTVGFGDQINKEESYQPIVDYIDAQFEAYLQEELKIKRSLFTYHDSRIHVCLYFISPTGHSLKTLDLLTMKNLDSKVNIIPVIAKADTVSKTELQKFKIKLMSELVSNGVQIYQFPTDDDTIAKVNAAMNGQLPFAVVGSMDEVKVGNKMVKARQYPWGVVQVENENHCDFVKLREMLICTNMEDLREQTHTRHYELYRRCKLEEMGFTDVGPENKPVSVQETYEAKRHEFHGERQRKEEEMKQMFVQRVKEKEAILKEAERELQAKFEHLKRLHQEERMKLEEKRRLLEEEIIAFSKKKATSEIFHSQSFLATGSNLRKDKDRKK

SEQ ID NO: 62951 - protein, 473 aa, Homo sapiens
MATKTTCMSSQGSDDEQIKRENIRSLTMSGHVGFESLPDQLVNRSIQQGFCFNILCVGETGIGKSTLIDTLFNTNFEDYESSHFCPNVKLKAQTYELQESNVQLKLTIVNTVGFGDQINKEESYQPIVDYIDAQFEAYLQEELKIKRSLFTYHDSRIHVCLYFISPTGHSLKTLDLLTMKNLDSKVNIIPVIAKADTVSKTELQKFKIKLMSELVSNGVQIYQFPTDDDTIAKVNAAMNGQLPFAVVGSMDEVKVGNKMVKARQYPWGVVQVENENHCDFVKLREMLICTNMEDLREQTHTRHYELYRRCKLEEMGFTDVGPENKPVSVQETYEAKRHEFHGERQRKEEEMKQMFVQRVKEKEAILKEAERELQAKFEHLKRLHQEERMKLEEKRRLLEEEIIAFSKKKATSEIFHSQSFLATGSNLRKDKDRKKEPGCRFELLCIDVRACETNGGRKDAEKGREGHSARGQP

SEQ ID NO: 62952 - protein, 283 aa, Homo sapiens
MASSEVARHLLFQSHMATKTTCMSSQGSDDEQIVNIIPVIAKADTVSKTELQKFKIKLMSELVSNGVQIYQFPTDDDTIAKVNAAMNGQLPFAVVGSMDEVKVGNKMVKARQYPWGVVQVENENHCDFVKLREMLICTNMEDLREQTHTRHYELYRRCKLEEMGFTDVGPENKPVSVQETYEAKRHEFHGERQRKEEEMKQMFVQRVKEKEAILKEAERELQAKFEHLKRLHQEERMKLEEKRRLLEEEIIAFSKKKATSEIFHSQSFLATGSNLRKDKDRKK

SEQ ID NO: 62953 - protein, 429 aa, Homo sapiens
MAVAVGRPSNEELRNLSLSGHVGFDSLPDQLVNKSTSQGFCFNILCVGETGIGKSTLMDTLFNTKFESDPATHNEPGVRLKARSYELQESNVRLKLTIVDTVGFGDQINKDDSYKPIVEYIDAQFEAYLQEELKIKRSLFNYHDTRIHACLYFIAPTGHSLKSLDLVTMKKLDSKVNIIPIIAKADTIAKNELHKFKSKIMSELVSNGVQIYQFPTDEETVAEINATMSVHLPFAVVGSTEEVKIGNKMAKARQYPWGVVQVENENHCDFVKLREMLIRVNMEDLREQTHTRHYELYRRCKLEEMGFKDTDPDSKPFSLQETYEAKRNEFLGELQKKEEEMRQMFVMRVKEKEAELKEAEKELHEKFDLLKRTHQEEKKKVEDKKKELEEEVNNFQKKKAAAQLLQSQAQQSGAQQTKKDKDKKNASFT

SEQ ID NO: 62954 - protein, 425 aa, Homo sapiens
MAVAVGRPSNEELRNLSLSGHVGFDSLPDQLVNKSTSQGFCFNILCVGETGIGKSTLMDTLFNTKFESDPATHNEPGVRLKARSYELQESNVRLKLTIVDTVGFGDQINKDDSYKPIVEYIDAQFEAYLQEELKIKRSLFNYHDTRIHACLYFIAPTGHSLKSLDLVTMKKLDSKVNIIPIIAKADTIAKNELHKFKSKIMSELVSNGVQIYQFPTDEETVAEINATMSVHLPFAVVGSTEEVKIGNKMAKARQYPWGVVQVENENHCDFVKLREMLIRVNMEDLREQTHTRHYELYRRCKLEEMGFKDTDPDSKPFSLQETYEAKRNEFLGELQKKEEEMRQMFVMRVKEKEAELKEAEKELHEKFDLLKRTHQEEKKKVEDKKKELEEEVNNFQKKKAAAQLLQSQAQQSGAQQTKKDKDKKK

SEQ ID NO: 62955 - protein, 439 aa, Homo sapiens
MEERKPAHVLRSFKYAAFMNEELRNLSLSGHVGFDSLPDQLVNKSTSQGFCFNILCVGETGIGKSTLMDTLFNTKFESDPATHNEPGVRLKARSYELQESNVRLKLTIVDTVGFGDQINKDDSYKPIVEYIDAQFEAYLQEELKIKRSLFNYHDTRIHACLYFIAPTGHSLKSLDLVTMKKLDSKVNIIPIIAKADTIAKNELHKFKSKIMSELVSNGVQIYQFPTDEETVAEINATMSVHLPFAVVGSTEEVKIGNKMAKARQYPWGVVQVENENHCDFVKLREMLIRVNMEDLREQTHTRHYELYRRCKLEEMGFKDTDPDSKPFSLQETYEAKRNEFLGELQKKEEEMRQMFVMRVKEKEAELKEAEKELHEKFDLLKRTHQEEKKKVEDKKKELEEEVNNFQKKKAAAQLLQSQAQQSGAQQTKKDKDKKNASFT

SEQ ID NO: 62956 - protein, 358 aa, Homo sapiens
MDPLRRSPSPCLSSQPSSPSTPPCEMLGPVGIEAVLDQLKIKAMKMGFEFNIMVVGQSGLGKSTMVNTLFKSKVWKSNPPGLGVPTPQTLQLHSLTHVIEEKGVKLKLTVTDTPGFGDQINNDNCWDPILGYINEQYEQYLQEEILITRQRHIPDTRVHCCVYFVPPTGHCLRPLDIEFLQRLCRTVNVVPVIARADSLTMEEREAFRRRIQQNLRTHCIDVYPQMCFDEDINDKILNSKLRDRIPFAVVGADQEHLVNGRCVLGRKTKWGIIEVENMAHCEFPLLRDLLIRSHLQDLKDITHNIHYENYRVIRLNESHLLPRGPGWVNLAPASPGQLTTPRTFKVCRGAHDDSDDEF

SEQ ID NO: 62957 - protein, 312 aa, Homo sapiens
MDPLRRSPSPCLSSQPSSPSTPPCEMLGPVGIEAVLDQLKIKAMKMGFEFNIMVVGQSGLGKSTMVNTLFKSKVWKSNPPGLGVPTPQTLQLHSLTHVIEEKGVKLKLTVTDTPGFGDQINNDNCLRPLDIEFLQRLCRTVNVVPVIARADSLTMEEREAFRRRIQQNLRTHCIDVYPQMCFDEDINDKILNSKLRDRIPFAVVGADQEHLVNGRCVLGRKTKWGIIEVENMAHCEFPLLRDLLIRSHLQDLKDITHNIHYENYRVIRLNESHLLPRGPGWVNLAPASPGQLTTPRTFKVCRGAHDDSDDEF

SEQ ID NO: 62958 - protein, 432 aa, Homo sapiens
MAERTMAMPTQIPADGDTQKENNIRCLTTIGHFGFECLPNQLVSRSIRQGFTFNILCVGETGIGKSTLIDTLFNTNLKDNKSSHFYSNVGLQIQTYELQESNVQLKLTVVETVGYGDQIDKEASYQPIVDYIDAQFEAYLQEELKIKRSLFEYHDSRVHVCLYFISPTGHSLKSLDLLTMKNLDSKVNIIPLIAKADTISKNDLQTFKNKIMSELISNGIQIYQLPTDEETAAQANSSVSGLLPFAVVGSTDEVKVGKRMVRGRHYPWGVLQVENENHCDFVKLRDMLLCTNMENLKEKTHTQHYECYRYQKLQKMGFTDVGPNNQPVSFQEIFEAKRQEFYDQCQREEEELKQRFMQRVKEKEATFKEAEKELQDKFEHLKMIQQEEIRKLEEEKKQLEGEIIDFYKMKAASEALQTQLSTDTKKDKHRKK

SEQ ID NO: 62959 - protein, 361 aa, Homo sapiens
MSKQQPTQFINPETPGYVGFANLPNQVHRKSVKKGFEFTLMVVGESGLGKSTLINSLFLTDLYPERVIPGAAEKIERTVQIEASTVEIEERGVKLRLTVVDTPGYGDAINCRDCFKTIISYIDEQFERYLHDESGLNRRHIIDNRVHCCFYFISPFGHGLKPLDVAFMKAIHNKVNIVPVIAKADTLTLKERERLKKRILDEIEEHNIKIYHLPDAESDEDEDFKEQTRLLKASIPFSVVGSNQLIEAKGKKVRGRLYPWGVVEVENPEHNDFLKLRTMLITHMQDLQEVTQDLHYENFRSERLKRGGRKVENEDMNKDQILLEKEAELRRMQEMIARMQAQMQMQMQGGDGDGGALGHHV

SEQ ID NO: 62960 - protein, 361 aa, Homo sapiens; identical to SEQ ID NO: 62959

SEQ ID NO: 62961 - protein, 396 aa, Homo sapiens
MPWISEGRATRPCLRVPSARRGDEGLHQRDEASQKMSKQQPTQFINPETPGYVGFANLPNQVHRKSVKKGFEFTLMVVGESGLGKSTLINSLFLTDLYPERVIPGAAEKIERTVQIEASTVEIEERGVKLRLTVVDTPGYGDAINCRDCFKTIISYIDEQFERYLHDESGLNRRHIIDNRVHCCFYFISPFGHGLKPLDVAFMKAIHNKVNIVPVIAKADTLTLKERERLKKRILDEIEEHNIKIYHLPDAESDEDEDFKEQTRLLKASIPFSVVGSNQLIEAKGKKVRGRLYPWGVVEVENPEHNDFLKLRTMLITHMQDLQEVTQDLHYENFRSERLKRGGRKVENEDMNKDQILLEKEAELRRMQEMIARMQAQMQMQMQGGDGDGGALGHHV

SEQ ID NO: 62962 - protein, 361 aa, Homo sapiens; identical to SEQ ID NO: 62959

SEQ ID NO: 62963 - protein, 361 aa, Homo sapiens; identical to SEQ ID NO: 62959

SEQ ID NO: 62964 - protein, 52 aa, Homo sapiens
MSKQQPTQFINPETPGYVGFANLPNQVHRKSVKKGFEFTLMVVGESGLGKST

SEQ ID NO: 62965 - protein, 50 aa, Homo sapiens
MSKQQPTQFINPETPGYVGFANLPNQVHRKSVKKGFEFTLMVVGESGLGK

SEQ ID NO: 62966 - protein, 23 aa, Homo sapiens
MSKQQPTQFINPETPGYVGFANL

SEQ ID NO: 62967 - protein, 148 aa, Homo sapiens
MSKQQPTQFINPETPGYVGFANLPNQVHRKSVKKGFEFTLMVVGESGLGKSTLINSLFLTDLYPERVIPGAAEKIERTVQIEASTVEIEERGVKLRLTVVDTPGYGDAINCRDCFKTIISYIDEQFERYLHDESGLNRRHIIDNRVHC

SEQ ID NO: 62968 - protein, 131 aa, Homo sapiens
MSKQQPTQFINPETPGYVGFANLPNQVHRKSVKKGFEFTLMVVGESGLGKSTLINSLFLTDLYPERVIPGAAEKIERTVQIEASTVEIEERGVKLRLTVVDTPGYGDAINCRDCFKTIISYIDEQFERYLH

SEQ ID NO: 62969 - protein, 72 aa, Homo sapiens
MSKQQPTQFINPETPGYVGFANLPNQVHRKSVKKGFEFTLMVVGESGLGKSTLINSLFLTDLYPERVIPGAA

SEQ ID NO: 62970 - protein, 72 aa, Homo sapiens; identical to SEQ ID NO: 62969

SEQ ID NO: 62971 - protein, 173 aa, Homo sapiens
MSKQQPTQFINPETPGYVGFANLPNQVHRKSVKKGFEFTLMVVGESGLGKSTLINSLFLTDLYPERVIPGAAEKIERTVQIEASTVEIEERGVKLRLTVVDTPGYGDAINCRDCFKTIISYIDEQFERYLHDESGLNRRHIIDNRVHCCFYFISPFGHGLKPLDVAFMKAIHN

SEQ ID NO: 62972 - protein, 29 aa, Homo sapiens
  VARIANT 1: note = MOD_RES - Any amino acid
XEMIARMQAQMQMQMQGGDGDGGALGHHV

SEQ ID NO: 62973 - protein, 286 aa, Homo sapiens
MSKGQSGLGKSTLVNTLFKSQVSRKASSWNREEKIPKTVEIKAIGHVIEEGGVKMKLTVIDTPGFGDQINNENCWEPIEKYINEQYEKFLKEEVNIARKKRIPDTRVHCCLYFISPTGHSLRPLDLEFMKHLSKVVNIIPVIAKADTMTLEEKSEFKQRVRKELEVNGIEFYPQKEFDEDLEDKTENDKIRQESMPFAVVGSDKEYQVNGKRVLGRKTPWGIIEVENLNHCEFALLRDFVIRTHLQDLKEVTHNIHYETYRAKRLNDNGGLPPVSVDTEESHDSNP

SEQ ID NO: 62974 - protein, 83 aa, Homo sapiens
MSKGLPETRTDAAMSELVPEPRPKPAVPMKPMSINSNLLGYIGIDTIIEQMRKKTMKTGFDFNIMVVAGSPLRSTSMSSTRSS

SEQ ID NO: 62975 - protein, 350 aa, Homo sapiens
MSKGLPETRTDAAMSELVPEPRPKPAVPMKPMSINSNLLGYIGIDTIIEQMRKKTMKTGFDFNIMVVGQSGLGKSTLVNTLFKSQVSRKASSWNREEKIPKTVEIKAIGHVIEEGGVKMKLTVIDTPGFGDQINNENCWEPIEKYINEQYEKFLKEEVNIARKKRIPDTRVHCCLYFISPTGHSLRPLDLEFMKHLSKVVNIIPVIAKADTMTLEEKSEFKQRVRKELEVNGIEFYPQKEFDEDLEDKTENDKIRQESMPFAVVGSDKEYQVNGKRVLGRKTPWGIIEVENLNHCEFALLRDFVIRTHLQDLKEVTHNIHYETYRAKRLNDNGGLPPVSVDTEESHDSNP

SEQ ID NO: 62976 - protein, 358 aa, Homo sapiens
MSKGLPETRTDAAMSELVPEPRPKPAVPMKPMSINSNLLGYIGIDTIIEQMRKKTMKTGFDFNIMVVGQSGLGKSTLVNTLFKSQVSRKASSWNREEKIPKTVEIKAIGHVIEEGGVKMKLTVIDTPGFGDQINNENCWEPIEKYINEQYEKFLKEEVNIARKKRIPDTRVHCCLYFISPTGHSLRPLDLEFMKHLSKVVNIIPVIAKADTMTLEEKSEFKQRVRKELEVNGIEFYPQKEFDEDLEDKTENDKIRQESMPFAVVGSDKEYQVNGKRVLGRKTPWGIIEVENLNHCEFALLRDFVIRTHLQDLKEVTHNIHYETYRAKRLNDNGGLPPGEGLLGTVLPPVPATPCPTAE

SEQ ID NO: 62977 - protein, 294 aa, Homo sapiens
MSKGQSGLGKSTLVNTLFKSQVSRKASSWNREEKIPKTVEIKAIGHVIEEGGVKMKLTVIDTPGFGDQINNENCWEPIEKYINEQYEKFLKEEVNIARKKRIPDTRVHCCLYFISPTGHSLRPLDLEFMKHLSKVVNIIPVIAKADTMTLEEKSEFKQRVRKELEVNGIEFYPQKEFDEDLEDKTENDKIRQESMPFAVVGSDKEYQVNGKRVLGRKTPWGIIEVENLNHCEFALLRDFVIRTHLQDLKEVTHNIHYETYRAKRLNDNGGLPPGEGLLGTVLPPVPATPCPTAE

SEQ ID NO: 62978 - protein, 178 aa, Homo sapiens
MSELVPEPRPKPAVPMKPMSINSNLLGYIGIDTIIEQMRKKTMKTGFDFNIMVVGQSGLGKSTLVNTLFKSQVSRKASSWNREEKIPKTVEIKAIGHVIEEGGVKMKLTVIDTPGFGDQINNENCWEPIEKYINEQYEKFLKEEVNIARKKRIPDTRVHCCLYFISPTGHSLRPLDLE

SEQ ID NO: 62979 - protein, 378 aa, Homo sapiens
MDSLAAPQDRLVEQLLSPRTQAQRRLKDIDKQYVGFATLPNQVHRKSVKKGFDFTLMVAGESGLGKSTLVHSLFLTDLYKDRKLLSAEERISQTVEILKHTVDIEEKGVKLKLTIVDTPGFGDAVNNTECWKPITDYVDQQFEQYFRDESGLNRKNIQDNRVHCCLYFISPFGHGLRPVDVGFMKALHEKVNIVPLIAKADCLVPSEIRKLKERIREEIDKFGIHVYQFPECDSDEDEDFKQQDRELKESAPFAVIGSNTVVEAKGQRVRGRLYPWGIVEVENQAHCDFVKLRNMLIRTHMHDLKDVTCDVHYENYRAHCIQQMTSKLTQDSRMESPIPILPLPTPDAETEKLIRMKDEELRRMQEMLQRMKQQMQDQ

SEQ ID NO: 62980 - protein, 322 aa, Homo sapiens
MVAGESGLGKSTLVHSLFLTDLYKDRKLLSAEERISQTVEILKHTVDIEEKGVKLKLTIVDTPGFGDAVNNTECWKPITDYVDQQFEQYFRDESGLNRKNIQDNRVHCCLYFISPFGHGLRPVDVGFMKALHEKVNIVPLIAKADCLVPSEIRKLKERIREEIDKFGIHVYQFPECDSDEDEDFKQQDRELKESAPFAVIGSNTVVEAKGQRVRGRLYPWGIVEVENQAHCDFVKLRNMLIRTHMHDLKDVTCDVHYENYRAHCIQQMTSKLTQDSRMESPIPILPLPTPDAETEKLIRMKDEELRRMQEMLQRMKQQMQDQ

SEQ ID NO: 62981 - protein, 346 aa, Homo sapiens
MDSLAAPQDRLVEQLLSPRTQAQRRLKDIDKQYVGFATLPNQVHRKSVKKGFDFTLMVAGESGLGKSTLVHSLFLTDLYKDRKLLSAEERISQTVEILKHTVDIEEKGVKLKLTIVDTPGFGDAVNNTECWKPITDYVDQQFEQYFRDESGLNRKNIQDNRVHCCLYFISPFGHGLRPVDVGFMKALHEKVNIVPLIAKADCLVPSEIRKLKERIREEIDKFGIHVYQFPECDSDEDEDFKQQDRELKESAPFAVIGSNTVVEAKGQRVRGRLYPWGIVEGALRLREAAQHAHPHAYARPQGRDVRRALRELPRALHPADDQQTDPGQPHGEPHPDPAAAHPGRRD

SEQ ID NO: 62982 - protein, 149 aa, Homo sapiens
LPNQVHRKSVKKGFDFTLMVAGESGLGKSTLVHSLFLTDLYKDRKLLSAEERISQTVEILKHTVDIEEKGVKLKLTIVDTPGFGDAVNNTECWKPITDYVDQQFEQYFRDESGLNRKNIQDNRVHCCLYFISPFGHGLRPVDGFHEGIA

SEQ ID NO: 62983 - protein, 369 aa, Homo sapiens
MSTGLRYKSKLATPEDKQDIDKQYVGFATLPNQVHRKSVKKGFDFTLMVAGESGLGKSTLVHSLFLTDLYKDRKLLSAEERISQTVEILKHTVDIEEKGVKLKLTIVDTPGFGDAVNNTECWKPITDYVDQQFEQYFRDESGLNRKNIQDNRVHCCLYFISPFGHGLRPVDVGFMKALHEKVNIVPLIAKADCLVPSEIRKLKERIREEIDKFGIHVYQFPECDSDEDEDFKQQDRELKESAPFAVIGSNTVVEAKGQRVRGRLYPWGIVEVENQAHCDFVKLRNMLIRTHMHDLKDVTCDVHYENYRAHCIQQMTSKLTQDSRMESPIPILPLPTPDAETEKLIRMKDEELRRMQEMLQRMKQQMQDQ

SEQ ID NO: 62984 - protein, 378 aa, Homo sapiens; identical to SEQ ID NO: 62979

SEQ ID NO: 62985 - protein, 434 aa, Homo sapiens
MAATDIARQVGEGCRTVPLAGHVGFDSLPDQLVNKSVSQGFCFNILCVGETGLGKSTLMDTLFNTKFEGEPATHTQPGVQLQSNTYDLQESNVRLKLTIVSTVGFGDQINKEDSYKPIVEFIDAQFEAYLQEELKIRRVLHTYHDSRIHVCLYFIAPTGHSLKSLDLVTMKKLDSKVNIIPIIAKADAISKSELTKFKIKITSELVSNGVQIYQFPTDDESVAEINGTMNAHLPFAVIGSTEELKIGNKMMRARQYPWGTVQVENEAHCDFVKLREMLIRVNMEDLREQTHTRHYELYRRCKLEEMGFKDTDPDSKPFSLQETYEAKRNEFLGELQKKEEEMRQMFVQRVKEKEAELKEAEKELHEKFDRLKKLHQDEKKKLEDKKKSLDDEVNAFKQRKTAAELLQSQGSQAGGSQTLKRDKEKKNNPWLCTE

SEQ ID NO: 62986 - protein, 429 aa, Homo sapiens
MAATDIARQVGEGCRTVPLAGHVGFDSLPDQLVNKSVSQGFCFNILCVGETGLGKSTLMDTLFNTKFEGEPATHTQPGVQLQSNTYDLQESNVRLKLTIVSTVGFGDQINKEDSYKPIVEFIDAQFEAYLQEELKIRRVLHTYHDSRIHVCLYFIAPTGHSLKSLDLVTMKKLDSKVNIIPIIAKADAISKSELTKFKIKITSELVSNGVQIYQFPTDDESVAEINGTMNAHLPFAVIGSTEELKIGNKMMRARQYPWGTVQVENEAHCDFVKLREMLIRVNMEDLREQTHTRHYELYRRCKLEEMGFKDTDPDSKPFSLQETYEAKRNEFLGELQKKEEEMRQMFVQRVKEKEAELKEAEKELHEKFDRLKKLHQDEKKKLEDKKKSLDDEVNAFKQRKTAAELLQSQGSQAGGSQTLKRDKEKKNFF

SEQ ID NO: 62987 - protein, 431 aa, Homo sapiens
MAATDIARQVGEGCRTVPLAGHVGFDSLPDQLVNKSVSQGFCFNILCVGETGLGKSTLMDTLFNTKFEGEPATHTQPGVQLQSNTYDLQESNVRLKLTIVSTVGFGDQINKEDSYKPIVEFIDAQFEAYLQEELKIRRVLHTYHDSRIHVCLYFIAPTGHSLKSLDLVTMKKLDSKVNIIPIIAKADAISKSELTKFKIKITSELVSNGVQIYQFPTDDESVAEINGTMNAHLPFAVIGSTEELKIGNKMMRARQYPWGTVQVENEAHCDFVKLREMLIRVNMEDLREQTHTRHYELYRRCKLEEMGFKDTDPDSKPFSLQETYEAKRNEFLGELQKKEEEMRQMFVQRVKEKEAELKEAEKELHEKFDRLKKLHQDEKKKLEDKKKSLDDEVNAFKQRKTAAELLQSQGSQAGGSQTLKRDKEKKNLGFL

SEQ ID NO: 62988 - protein, 427 aa, Homo sapiens
MAATDIARQVGEGCRTVPLAGHVGFDSLPDQLVNKSVSQGFCFNILCVGETGLGKSTLMDTLFNTKFEGEPATHTQPGVQLQSNTYDLQESNVRLKLTIVSTVGFGDQINKEDSYKPIVEFIDAQFEAYLQEELKIRRVLHTYHDSRIHVCLYFIAPTGHSLKSLDLVTMKKLDSKVNIIPIIAKADAISKSELTKFKIKITSELVSNGVQIYQFPTDDESVAEINGTMNAHLPFAVIGSTEELKIGNKMMRARQYPWGTVQVENEAHCDFVKLREMLIRVNMEDLREQTHTRHYELYRRCKLEEMGFKDTDPDSKPFSLQETYEAKRNEFLGELQKKEEEMRQMFVQRVKEKEAELKEAEKELHEKFDRLKKLHQDEKKKLEDKKKSLDDEVNAFKQRKTAAELLQSQGSQAGGSQTLKRDKEKKN

SEQ ID NO: 62989 - protein, 427 aa, Homo sapiens; identical to SEQ ID NO: 62988

SEQ ID NO: 62990 - protein, 369 aa, Homo sapiens
MDTLFNTKFEGEPATHTQPGVQLQSNTYDLQESNVRLKLTIVSTVGFGDQINKEDSYKPIVEFIDAQFEAYLQEELKIRRVLHTYHDSRIHVCLYFIAPTGHSLKSLDLVTMKKLDSKVNIIPIIAKADAISKSELTKFKIKITSELVSNGVQIYQFPTDDESVAEINGTMNAHLPFAVIGSTEELKIGNKMMRARQYPWGTVQVENEAHCDFVKLREMLIRVNMEDLREQTHTRHYELYRRCKLEEMGFKDTDPDSKPFSLQETYEAKRNEFLGELQKKEEEMRQMFVQRVKEKEAELKEAEKELHEKFDRLKKLHQDEKKKLEDKKKSLDDEVNAFKQRKTAAELLQSQGSQAGGSQTLKRDKEKKK

SEQ ID NO: 62991 - protein, 457 aa, Homo sapiens
MAATDIARQVFGRRRLLLLGFETVGFSAACTEEGGHMLRRGEGCRTVPLAGHVGFDSLPDQLVNKSVSQGFCFNILCVGETGLGKSTLMDTLFNTKFEGEPATHTQPGVQLQSNTYDLQESNVRLKLTIVSTVGFGDQINKEDSYKPIVEFIDAQFEAYLQEELKIRRVLHTYHDSRIHVCLYFIAPTGHSLKSLDLVTMKKLDSKVNIIPIIAKADAISKSELTKFKIKITSELVSNGVQIYQFPTDDESVAEINGTMNAHLPFAVIGSTEELKIGNKMMRARQYPWGTVQVENEAHCDFVKLREMLIRVNMEDLREQTHTRHYELYRRCKLEEMGFKDTDPDSKPFSLQETYEAKRNEFLGELQKKEEEMRQMFVQRVKEKEAELKEAEKELHEKFDRLKKLHQDEKKKLEDKKKSLDDEVNAFKQRKTAAELLQSQGSQAGGSQTLKRDKEKKK

SEQ ID NO: 62992 - protein, 427 aa, Homo sapiens; identical to SEQ ID NO: 62988

SEQ ID NO: 62993 - protein, 267 aa, Homo sapiens
MAATDIARQVGEGCRTVPLAGHVGFDSLPDQLVNKSVSQGFCFNILCVGETGLGKSTLMDTLFNTKFEGEPATHTQPGVQLQSNTYDLQESNVRLKLTIVSTVGFGDQINKEDSYKPIVEFIDAQFEAYLQEELKIRRVLHTYHDSRIHVCLYFIAPTGHSLKSLDLVTMKKLDSKVNIIPIIAKADAISKSELTKFKIKITSELVSNGVQIYQFPTDDESVAEINGTMNAHLPFAVIGSTEELKIGNKMMRARQYPWGTVQGSSQV

SEQ ID NO: 62994 - protein, 483 aa, Homo sapiens
MAATDLERFSNAEPEPRSLSLGGHVGFDSLPDQLVSKSVTQGFSFNILCVGETGIGKSTLMNTLFNTTFETEEASHHEACVRLRPQTYDLQESNVQLKLTIVDAVGFGDQINKDESYRPIVDYIDAQFENYLQEELKIRRSLFDYHDTRIHVCLYFITPTGHSLKSLDLVTMKKLDSKVNIIPIIAKADTISKSELHKFKIKIMGELVSNGVQIYQFPTDDEAVAEINAVMNAHLPFAVVGSTEEVKVGNKLVRARQYPWGVVQVENENHCDFVKLREMLIRVNMEDLREQTHSRHYELYRRCKLEEMGFQDSDGDSQPFSLQETYEAKRKEFLSELQRKEEEMRQMFVNKVKETELELKEKERELHEKFEHLKRVHQEEKRKVEEKRRELEEETNAFNRRKAAVEALQSQALHATSQQPLRKDKDKKNRSDIGAHQPGMSLSSSKVMMTKASVEPLNCSSWWPAIQCCSCLVRDATWREGFL

SEQ ID NO: 62995 - protein, 369 aa, Homo sapiens
MNTLFNTTFETEEASHHEACVRLRPQTYDLQESNVQLKLTIVDAVGFGDQINKDESYRPIVDYIDAQFENYLQEELKIRRSLFDYHDTRIHVCLYFITPTGHSLKSLDLVTMKKLDSKVNIIPIIAKADTISKSELHKFKIKIMGELVSNGVQIYQFPTDDEAVAEINAVMNAHLPFAVVGSTEEVKVGNKLVRARQYPWGVVQVENENHCDFVKLREMLIRVNMEDLREQTHSRHYELYRRCKLEEMGFQDSDGDSQPFSLQETYEAKRKEFLSELQRKEEEMRQMFVNKVKETELELKEKERELHEKFEHLKRVHQEEKRKVEEKRRELEEETNAFNRRKAAVEALQSQALHATSQQPLRKDKDKKN

SEQ ID NO: 62996 - protein, 429 aa, Homo sapiens
MAATDLERFSNAEPEPRSLSLGGHVGFDSLPDQLVSKSVTQGFSFNILCVGETGIGKSTLMNTLFNTTFETEEASHHEACVRLRPQTYDLQESNVQLKLTIVDAVGFGDQINKDESYRPIVDYIDAQFENYLQEELKIRRSLFDYHDTRIHVCLYFITPTGHSLKSLDLVTMKKLDSKVNIIPIIAKADTISKSELHKFKIKIMGELVSNGVQIYQFPTDDEAVAEINAVMNAHLPFAVVGSTEEVKVGNKLVRARQYPWGVVQVENENHCDFVKLREMLIRVNMEDLREQTHSRHYELYRRCKLEEMGFQDSDGDSQPFSLQETYEAKRKEFLSELQRKEEEMRQMFVNKVKETELELKEKERELHEKFEHLKRVHQEEKRKVEEKRRELEEETNAFNRRKAAVEALQSQALHATSQQPLRKDKDKKN

SEQ ID NO: 62997 - protein, 442 aa, Homo sapiens
MAATDLERFSNAEPEPRSLSLGGHVGFDSLPDQLVSKSVTQGFSFNILCVGETGIGKSTLMNTLFNTTFETEEASHHEACVRLRPQTYDLQESNVQLKLTIVDAVGFGDQINKDESYRPIVDYIDAQFENYLQEELKIRRSLFDYHDTRIHVCLYFITPTGHSLKSLDLVTMKKLDSKVNIIPIIAKADTISKSELHKFKIKIMGELVSNGVQIYQFPTDDEAVAEINAVMNAHLPFAVVGSTEEVKVGNKLVRARQYPWGVVQVENENHCDFVKLREMLIRVNMEDLREQTHSRHYELYRRCKLEEMGFQDSDGDSQPFSLQETYEAKRKEFLSELQRKEEEMRQMFVNKVKETELELKEKERELHEKFEHLKRVHQEEKRKVEEKRRELEEETNAFNRRKAAVEALQSQALHATSQQPLRKDKDKKKASGWSSIYSVTIP

SEQ ID NO: 62998 - protein, 568 aa, Homo sapiens
MERDRISALKRSFEVEEVETPNSTPPRRVQTPLLRATVASSTQKFQDLGVKNSEPSARHVDSLSQRSPKASLRRVELSGPKAAEPVSRRTELSIDISSKQVENAGAIGPSRFGLKRAEVLGHKTPEPAPRRTEITIVKPQESAHRRMEPPASKVPEVPTAPATDAAPKRVEIQMPKPAEAPTAPSPAQTLENSEPAPVSQLQSRLEPKPQPPVAEATPRSQEATEAAPSCVGDMADTPRDAGLKQAPASRNEKAPVDFGYVGIDSILEQMRRKAMKQGFEFNIMVVGQSGLGKSTLINTLFKSKISRKSVQPTSEERIPKTIEIKSITHDIEEKGVRMKLTVIDTPGFGDHINNENCWQPIMKFINDQYEKYLQEEVNINRKKRIPDTRVHCCLYFIPATGHSLRPLDIEFMKRLSKVVNIVPVIAKADTLTLEERVHFKQRITADLLSNGIDVYPQKEFDEDSEDRLVNEKFREMIPFAVVGSDHEYQVNGKRILGRKTKWGTIEVENTTHCEFAYLRDLLIRTHMQNIKDITSSIHFEAYRVKRLNEGSSAMANGMEEKEPEAPEM

SEQ ID NO: 62999 - protein, 196 aa, Homo sapiens
MADTPRDAGLKQAPASRNEKAPVDFGYVGIDSILEQMRRKAMKQGFEFNIMVVGQSGLGKSTLINTLFKSKISRKSVQPTSEERIPKTIEIKSITHDIEEKGVRMKLTVIDTPGFGDHINNENCWQPIMKFINDQYEKYLQEEVNINRKKRIPDTRVHCCLYFIPATGHSLPLLEQKVPLSQPSADCLARCGDRLE

SEQ ID NO: 63000 - protein, 579 aa, Homo sapiens
MSDPAVNAQLDGIISDFEALKRSFEVEEVETPNSTPPRRVQTPLLRATVASSTQKFQDLGVKNSEPSARHVDSLSQRSPKASLRRVELSGPKAAEPVSRRTELSIDISSKQVENAGAIGPSRFGLKRAEVLGHKTPEPAPRRTEITIVKPQESAHRRMEPPASKVPEVPTAPATDAAPKRVEIQMPKPAEAPTAPSPAQTLENSEPAPVSQLQSRLEPKPQPPVAEATPRSQEATEAAPSCVGDMADTPRDAGLKQAPASRNEKAPVDFGYVGIDSILEQMRRKAMKQGFEFNIMVVGQSGLGKSTLINTLFKSKISRKSVQPTSEERIPKTIEIKSITHDIEEKGVRMKLTVIDTPGFGDHINNENCWQPIMKFINDQYEKYLQEEVNINRKKRIPDTRVHCCLYFIPATGHSLRPLDIEFMKRLSKVVNIVPVIAKADTLTLEERVHFKQRITADLLSNGIDVYPQKEFDEDSEDRLVNEKFREMIPFAVVGSDHEYQVNGKRILGRKTKWGTIEVENTTHCEFAYLRDLLIRTHMQNIKDITSSIHFEAYRVKRLNEGSSAMANGMEEKEPEAPEM

SEQ ID NO: 63001 - protein, 586 aa, Homo sapiens
MKKSYSGGTRTSSGRLRRLGDSSGPALKRSFEVEEVETPNSTPPRRVQTPLLRATVASSTQKFQDLGVKNSEPSARHVDSLSQRSPKASLRRVELSGPKAAEPVSRRTELSIDISSKQVENAGAIGPSRFGLKRAEVLGHKTPEPAPRRTEITIVKPQESAHRRMEPPASKVPEVPTAPATDAAPKRVEIQMPKPAEAPTAPSPAQTLENSEPAPVSQLQSRLEPKPQPPVAEATPRSQEATEAAPSCVGDMADTPRDAGLKQAPASRNEKAPVDFGYVGIDSILEQMRRKAMKQGFEFNIMVVGQSGLGKSTLINTLFKSKISRKSVQPTSEERIPKTIEIKSITHDIEEKGVRMKLTVIDTPGFGDHINNENCWQPIMKFINDQYEKYLQEEVNINRKKRIPDTRVHCCLYFIPATGHSLRPLDIEFMKRLSKVVNIVPVIAKADTLTLEERVHFKQRITADLLSNGIDVYPQKEFDEDSEDRLVNEKFREMIPFAVVGSDHEYQVNGKRILGRKTKWGTIEVENTTHCEFAYLRDLLIRTHMQNIKDITSSIHFEAYRVKRLNEGSSAMANGMEEKEPEAPEM

SEQ ID NO: 63002 - protein, 474 aa, Homo sapiens
MGSSFWEGLQVAVGLPQGCWPQGLDSGEPAEGGQLEAAPVCIVTRQSKETAGPTLGRGGWRQGSLRRGKGTSCRCRQLSPGHGPGRLTGCGECHRLPCRGLVSGFTGLRGQEEDDLAFCLATIGSDRQATEAAPSCVGDMADTPRDAGLKQAPASRNEKAPVDFGYVGIDSILEQMRRKAMKQGFEFNIMVVGQSGLGKSTLINTLFKSKISRKSVQPTSEERIPKTIEIKSITHDIEEKGVRMKLTVIDTPGFGDHINNENCWQPIMKFINDQYEKYLQEEVNINRKKRIPDTRVHCCLYFIPATGHSLRPLDIEFMKRLSKVVNIVPVIAKADTLTLEERVHFKQRITADLLSNGIDVYPQKEFDEDSEDRLVNEKFREMIPFAVVGSDHEYQVNGKRILGRKTKWGTIEVENTTHCEFAYLRDLLIRTHMQNIKDITSSIHFEAYRVKRLNEGSSAMANGMEEKEPEAPEM

SEQ ID NO: 63003 - protein, 422 aa, Homo sapiens
MEPPASKVPEVPTAPATDAAPKRVEIQMPKPAEAPTAPSPAQTLENSEPAPVSQLQSRLEPKPQPPVAEATPRSQEATEAAPSCVGDMADTPRDAGLKQAPASRNEKAPVDFGYVGIDSILEQMRRKAMKQGFEFNIMVVGQSGLGKSTLINTLFKSKISRKSVQPTSEERIPKTIEIKSITHDIEEKGVRMKLTVIDTPGFGDHINNENCWQPIMKFINDQYEKYLQEEVNINRKKRIPDTRVHCCLYFIPATGHSLRPLDIEFMKRLSKVVNIVPVIAKADTLTLEERVHFKQRITADLLSNGIDVYPQKEFDEDSEDRLVNEKFREMIPFAVVGSDHEYQVNGKRILGRKTKWGTIEVENTTHCEFAYLRDLLIRTHMQNIKDITSSIHFEAYRVKRLNEGSSAMANGMEEKEPEAPEM

SEQ ID NO: 63004 - protein, 335 aa, Homo sapiens
MADTPRDAGLKQAPASRNEKAPVDFGYVGIDSILEQMRRKAMKQGFEFNIMVVGQSGLGKSTLINTLFKSKISRKSVQPTSEERIPKTIEIKSITHDIEEKGVRMKLTVIDTPGFGDHINNENCWQPIMKFINDQYEKYLQEEVNINRKKRIPDTRVHCCLYFIPATGHSLRPLDIEFMKRLSKVVNIVPVIAKADTLTLEERVHFKQRITADLLSNGIDVYPQKEFDEDSEDRLVNEKFREMIPFAVVGSDHEYQVNGKRILGRKTKWGTIEVENTTHCEFAYLRDLLIRTHMQNIKDITSSIHFEAYRVKRLNEGSSAMANGMEEKEPEAPEM

SEQ ID NO: 63005 - protein, 422 aa, Homo sapiens; identical to SEQ ID NO: 63003

SEQ ID NO: 63006 - protein, 362 aa, Homo sapiens
MAGAGCTGTWSWLWGTATEAAPSCVGDMADTPRDAGLKQAPASRNEKAPVDFGYVGIDSILEQMRRKAMKQGFEFNIMVVGQSGLGKSTLINTLFKSKISRKSVQPTSEERIPKTIEIKSITHDIEEKGVRMKLTVIDTPGFGDHINNENCWQPIMKFINDQYEKYLQEEVNINRKKRIPDTRVHCCLYFIPATGHSLRPLDIEFMKRLSKVVNIVPVIAKADTLTLEERVHFKQRITADLLSNGIDVYPQKEFDEDSEDRLVNEKFREMIPFAVVGSDHEYQVNGKRILGRKTKWGTIEVENTTHCEFAYLRDLLIRTHMQNIKDITSSIHFEAYRVKRLNEGSSAMANGMEEKEPEAPEM

SEQ ID NO: 63007 - protein, 193 aa, Homo sapiens
MTLCPQAWLPEGSEEQLRCADHPSCGVLSAGPWGGGQASHLQRSPVGCTLPSIPIGPVPWSVSEPRGECSPPGAPGPPARHMVWPSLSPYPCPAPKGRKLQGPLPPTAQPLQAPWQLPLLEQKVPLSQPSADCWPDAGTGWNEGGVFISLPSPSHATPAPTGLQVLLMRWDLIEDKKEGEMTPTPSSPSFEKV

SEQ ID NO: 63008 - protein, 356 aa, Homo sapiens
MAMSYVKDDIFRIYIKEKKECRRDHRPPCAQEAPRNMVHPNVICDGCNGPVVGTRYKCSVCPDYDLCSVCEGKGLHRGHTKLAFPSPFGHLSEGFSHSRWLRKVKHGHFGWPGWEMGPPGNWSPRPPRAGEARPGPTAESASGPSEDPSVNFLKNVGESVAAALSPLGIEVDIDVEHGGKRSRLTPVSPESSSTEEKSSSQPSSCCSDPSKPGGNVEGATQSLAEQMRKIALESEGRPEEQMESDNCSGGDDDWTHLSSKEVDPSTGELQSLQMPESEGPSSLDPSQEGPTGLKEAALYPHLPPEADPRLIESLSQMLSMGFSDEGGWLTRLLQTKNYDIGAALDTIQYSKHPPPL

SEQ ID NO: 63009 - protein, 356 aa, Homo sapiens; identical to SEQ ID NO: 63008

SEQ ID NO: 63010 - protein, 440 aa, Homo sapiens
MASLTVKAYLLGKEDAAREIRRFSFCCSPEPEAEAEAAAGPGPCERLLSRVAALFPALRPGGFQAHYRDEDGDLVAFSSDEELTMAMSYVKDDIFRIYIKEKKECRRDHRPPCAQEAPRNMVHPNVICDGCNGPVVGTRYKCSVCPDYDLCSVCEGKGLHRGHTKLAFPSPFGHLSEGFSHSRWLRKVKHGHFGWPGWEMGPPGNWSPRPPRAGEARPGPTAESASGPSEDPSVNFLKNVGESVAAALSPLGIEVDIDVEHGGKRSRLTPVSPESSSTEEKSSSQPSSCCSDPSKPGGNVEGATQSLAEQMRKIALESEGRPEEQMESDNCSGGDDDWTHLSSKEVDPSTGELQSLQMPESEGPSSLDPSQEGPTGLKEAALYPHLPPEADPRLIESLSQMLSMGFSDEGGWLTRLLQTKNYDIGAALDTIQYSKHPPPL

SEQ ID NO: 63011 - protein, 356 aa, Homo sapiens; identical to SEQ ID NO: 63008

SEQ ID NO: 63012 - protein, 140 aa, Homo sapiens
MAMSYVKDDIFRIYIKEKKECRRDHRPPCAQEAPRNMVHPNVICDGCNGPVVGTRYKCSVCPDYDLCSVCEGKGLHRGHTKLAFPSPFGHLSEGFSHSRWLRKVKHGHFGWPGWEMGPPGNWSPRPPRAGEARPGPTAES

SEQ ID NO: 63013 - protein, 296 aa, Homo sapiens
MTSSESTLKRKKSAGGTTAHRVLRRRPFGHLSEGFSHSRWLRKVKHGHFGWPGWEMGPPGNWSPRPPRAGEARPGPTAESASGPSEDPSVNFLKNVGESVAAALSPLGIEVDIDVEHGGKRSRLTPVSPESSSTEEKSSSQPSSCCSDPSKPGGNVEGATQSLAEQMRKIALESEGRPEEQMESDNCSGGDDDWTHLSSKEVDPSTGELQSLQMPESEGPSSLDPSQEGPTGLKEAALYPHLPPEADPRLIESLSQMLSMGFSDEGGWLTRLLQTKNYDIGAALDTIQYSKHPPPL

SEQ ID NO: 63014 - protein, 167 aa, Homo sapiens
MAMSYVKDDIFRIYIKEKKECRRDHRPPCAQEAPRNMVHPNVICDGCNGPVVGTRYKCSVCPDYDLCSVCEGKGLHRGHTKLAFPSPFGHLSEGFSHSRWLRKVKHGHFGWPGWEMGPPGNWSPRPPRAGEARPGPTAESASGPSEDPSVNFLKNVGESVAAALSPL

SEQ ID NO: 63015 - protein, 158 aa, Homo sapiens
MMQKLLKCSRLVLALALILVLESSVQGYPTRRARYQWVRCNPDSNSANCLEEKGPMFELLPGESNKIPRLRTDLFPKTRIQDLNRIFPLSEDYSGSGFGSGSGSGSGSGSGFLTEMEQDYQLVDESDAFHDNLRSLDRNLPSDSQDLGQHGLEEDFML

SEQ ID NO: 63016 - protein, 328 aa, Homo sapiens
MMSGEPLHVKTPIRDSMALSKMAGTSVYLKMDSAQPSGSFKIRGIGHFCKRWAKQGCAHFVCSSAGNAGMAAAYAARQLGVPATIVVPSTTPALTIERLKNEGATVKVVGELLDEAFELAKALAKNNPGWVYIPPFDDPLIWEGHASIVKELKETLWEKPGAIALSVGGGGLLCGVVQGLQEVGWGDVPVIAMETFGAHSFHAATTAGKLVSLPKITSVAKALGVKTVGAQALKLFQEHPIFSEVISDQEAVAAIEKFVDDEKILVEPACGAALAAVYSHVIQKLQLEGNLRTPLPSLVVIVCGGSNISLAQLRALKEQLGMTNRLPK

SEQ ID NO: 63017 - protein, 218 aa, Homo sapiens
MMSGEPLHVKTPIRDSMALSKMAGTSVYLKMDSAQPSGSFKIRGIGHFCKRWAKQGCAHFVCSSAGNAGMAAAYAARQLGVPATIVVPSTTPALTIERLKNEGATVKVVGELLDEAFELAKALAKNNPGWVYIPPFDDPLIWEGHASIVKELKETLWEKPGAIALSVGGGGLLCGVVQGLQEVGWGDVPVIAMETFGAHSFHAATTAGKLVSLPKITR

SEQ ID NO: 63018 - protein, 483 aa, Homo sapiens
MTMPVNGAHKDADLWSSHDKMLAQPLKDSDVEVYNIIKKESNRQRVGLELIASENFASRAVLEALGSCLNNKYSEGYPGQRYYGGTEFIDELETLCQKRALQAYKLDPQCWGVNVQPYSGSPANFAVYTALVEPHGRIMGLDLPDGGHLTHGFMTDKKKISATSIFFESMPYKVNPDTGYINYDQLEENARLFHPKLIIAGTSCYSRNLEYARLRKIADENGAYLMADMAHISGLVAAGVVPSPFEHCHVVTTTTHKTLRGCRAGMIFYRKGVKSVDPKTGKEILYNLESLINSAVFPGLQGGPHNHAIAGVAVALKQAMTLEFKVYQHQVVANCRALSEALTELGYKIVTGGSDNHLILVDLRSKGTDGGRAEKVLEACSIACNKNTCPGDRSALRPSGLRLGTPALTSRGLLEKDFQKVAHFIHRGIELTLQIQSDTGVRATLKEFKERLAGDKYQAAVQALREEVESFASLFPLPGLPDF

SEQ ID NO: 63019 - protein, 125 aa, Homo sapiens [sequence omitted]

SEQ ID NO: 63020 - protein, 403 aa, Homo sapiens
MTMPVNGAHKDADLWSSHDKMLAQPLKDSDVEVYNIIKKESNRQRVGLELIASENFASRAVLEALGSCLNNKYSEGYPGQRYYGGTEFIDELETLCQKRALQAYKLDPQCWGVNVQPYSGSPANFAVYTALVEPHGRIMGLDLPDGGHLTHGFMTDKKKISATSIFFESMPYKVNPDTGYINYDQLEENARLFHPKLIIAGTSCYSRNLEYARLRKIADENGAYLMADMAHISGLVAAGVVPSPFEHCHVVTTTTHKTLRGCRAGMIFYRKGGSDNHLILVDLRSKGTDGGRAEKVLEACSIACNKNTCPGDRSALRPSGLRLGTPALTSRGLLEKDFQKVAHFIHRGIELTLQIQSDTGVRATLKEFKERLAGDKYQAAVQALREEVESFASLFPLPGLPDF

SEQ ID NO: 63021 - protein, 444 aa, Homo sapiens
MTMPVNGAHKDADLWSSHDKMLAQPLKDSDVEVYNIIKKESNRQRVGLELIASENFASRAVLEALGSCLNNKYSEGYPGQRYYGGTEFIDELETLCQKRALQAYKLDPQCWGVNVQPYSGSPANFAVYTALVEPHGRIMGLDLPDGGHLTHGFMTDKKKISATSIFFESMPYKVNPDTGYINYDQLEENARLFHPKLIIAGTSCYSRNLEYARLRKIADENGAYLMADMAHISGLVAAGVVPSPFEHCHVVTTTTHKTLRGCRAGMIFYRKGVAVALKQAMTLEFKVYQHQVVANCRALSEALTELGYKIVTGGSDNHLILVDLRSKGTDGGRAEKVLEACSIACNKNTCPGDRSALRPSGLRLGTPALTSRGLLEKDFQKVAHFIHRGIELTLQIQSDTGVRATLKEFKERLAGDKYQAAVQALREEVESFASLFPLPGLPDF

SEQ ID NO: 63022 - protein, 94 aa, Homo sapiens [sequence omitted]

SEQ ID NO: 63023 - protein, 258 aa, Homo sapiens [sequence omitted]

SEQ ID NO: 63024 - protein, 446 aa, Homo sapiens
MTMPVNGAHKDADLWSSHDKMLAQPLKDSDVEVYNIIKKESNRQRVGLELIASENFASRAVLEALGSCLNNKYSEGYPGQRYYGGTEFIDELETLCQKRALQAYKLDPQCWGVNVQPYSGSPANFAVYTALVEPHGRIMGLDLPDGGHLTHGFMTDKKKISATSIFFESMPYKVNPDTGYINYDQLEENARLFHPKLIIAGTSCYSRNLEYARLRKIADENGAYLMADMAHISGLVAAGVVPSPFEHCHVVTTTTHKTLRGCRAGMIFYRKGVKSVDPKTGKEILYNLESLINSAVFPGLQGGPHNHAIAGVAVALKQAMTLEFKVYQHQVVANCRALSEALTELGYKIVTGGSDNHLILVDLRSKGTDGGRAEKVLEACSIACNKNTCPGIELTLQIQSDTGVRATLKEFKERLAGDKYQAAVQALREEVESFASLFPLPGLPDF

SEQ ID NO: 63025 - protein, 345 aa, Homo sapiens
MGLDLPDGGHLTHGFMTDKKKISATSIFFESMPYKVNPDTGYINYDQLEENARLFHPKLIIAGTSCYSRNLEYARLRKIADENGAYLMADMAHISGLVAAGVVPSPFEHCHVVTTTTHKTLRGCRAGMIFYRKGVKSVDPKTGKEILYNLESLINSAVFPGLQGGPHNHAIAGVAVALKQAMTLEFKVYQHQVVANCRALSEALTELGYKIVTGGSDNHLILVDLRSKGTDGGRAEKVLEACSIACNKNTCPGDRSALRPSGLRLGTPALTSRGLLEKDFQKVAHFIHRGIELTLQIQSDTGVRATLKEFKERLAGDKYQAAVQALREEVESFASLFPLPGLPDF

SEQ ID NO: 63026 - protein, 504 aa, Homo sapiens
MLYFSLFWAARPLQRCGQLVRMAIRAQHSNAAQTQTGEANRGWTGQESLSDSDPEMWELLQREKDRQCRGLELIASENFCSRAALEALGSCLNNKYSEGYPGKRYYGGAEVVDEIELLCQRRALEAFDLDPAQWGVNVQPYSGSPANLAVYTALLQPHDRIMGLDLPDGGHLTHGYMSDVKRISATSIFFESMPYKLNPKTGLIDYNQLALTARLFRPRLIIAGTSAYARLIDYARMREVCDEVKAHLLADMAHISGLVAAKVIPSPFKHADIVTTTTHKTLRGARSGLIFYRKGVKAVDPKTGREIPYTFEDRINFAVFPSLQGGPHNHAIAAVAVALKQACTPMFREYSLQVLKNARAMADALLERGYSLVSGGTDNHLVLVDLRPKGLDGARAERVLELVSITANKNTCPGDRSAITPGGLRLGAPALTSRQFREDDFRRVVDFIDEGVNIGLEVKSKTAKLQDFKSFLLKDSETSQRLANLRQRVEQFARAFPMPGFDEH

SEQ ID NO: 63027 - protein, 408 aa, Homo sapiens
MGEQRWWMKLSCCASAGPWKPLTWILHSGESMSSPTPGPQPTWPSTQPFCNLTTGSWGWTCPMGAISPTATCLTSSGYQPRPSSSSLCPISSTALAVCVSVQPKTGLIDYNQLALTARLFRPRLIIAGTSAYARLIDYARMREVCDEVKAHLLADMAHISGLVAAKVIPSPFKHADIVTTTTHKTLRGARSGLIFYRKGVKAVDPKTGREIPYTFEDRINFAVFPSLQGGPHNHAIAAVAVALKQACTPMFREYSLQVLKNARAMADALLERGYSLVSGGTDNHLVLVDLRPKGLDGARAERVLELVSITANKNTCPGDRSAITPGGLRLGAPALTSRQFREDDFRRVVDFIDEGVNIGLEVKSKTAKLQDFKSFLLKDSETSQRLANLRQRVEQFARAFPMPGFDEH

SEQ ID NO: 63028 - protein, 483 aa, Homo sapiens
MAIRAQHSNAAQTQTGEANRGWTGQESLSDSDPEMWELLQREKDRQCRGLELIASENFCSRAALEALGSCLNNKYSEGYPGKRYYGGAEVVDEIELLCQRRALEAFDLDPAQWGVNVQPYSGSPANLAVYTALLQPHDRIMGLDLPDGGHLTHGYMSDVKRISATSIFFESMPYKLNPKTGLIDYNQLALTARLFRPRLIIAGTSAYARLIDYARMREVCDEVKAHLLADMAHISGLVAAKVIPSPFKHADIVTTTTHKTLRGARSGLIFYRKGVKAVDPKTGREIPYTFEDRINFAVFPSLQGGPHNHAIAAVAVALKQACTPMFREYSLQVLKNARAMADALLERGYSLVSGGTDNHLVLVDLRPKGLDGARAERVLELVSITANKNTCPGDRSAITPGGLRLGAPALTSRQFREDDFRRVVDFIDEGVNIGLEVKSKTAKLQDFKSFLLKDSETSQRLANLRQRVEQFARAFPMPGFDEH

SEQ ID NO: 63029 - protein, 483 aa, Homo sapiens; identical to SEQ ID NO: 63028

SEQ ID NO: 63030 - protein, 483 aa, Homo sapiens; identical to SEQ ID NO: 63028

SEQ ID NO: 63031 - protein, 494 aa, Homo sapiens
MLYFSLFWAARPLQRCGQLVRMAIRAQHSNAAQTQTGEANRGWTGQESLSDSDPEMWELLQREKDRQCRGLELIASENFCSRAALEALGSCLNNKYSEGYPGKRYYGGAEVVDEIELLCQRRALEAFDLDPAQWGVNVQPYSGSPANLAVYTALLQPHDRIMGLDLPDGGHLTHGYMSDVKRISATSIFFESMPYKLNLALTARLFRPRLIIAGTSAYARLIDYARMREVCDEVKAHLLADMAHISGLVAAKVIPSPFKHADIVTTTTHKTLRGARSGLIFYRKGVKAVDPKTGREIPYTFEDRINFAVFPSLQGGPHNHAIAAVAVALKQACTPMFREYSLQVLKNARAMADALLERGYSLVSGGTDNHLVLVDLRPKGLDGARAERVLELVSITANKNTCPGDRSAITPGGLRLGAPALTSRQFREDDFRRVVDFIDEGVNIGLEVKSKTAKLQDFKSFLLKDSETSQRLANLRQRVEQFARAFPMPGFDEH

SEQ ID NO: 63032 - protein, 473 aa, Homo sapiens
MGAVLGVFSLASWVPCLCSGASCLLCSCCPNSKNSTVTRLIYAFILLLSTVVSYIMQRKEMETYLKKIPGFCEGGFKIHEADINADKDCDVLVGYKAVYRISFAMAIFFFVFSLLMFKVKTSKDLRAAVHNGFWFFKIAALIGIMVGSFYIPGGYFSSVWFVVGMIGAALFILIQLVLLVDFAHSWNESWVNRMEEGNPRLWYAALLSFTSAFYILSIICVGLLYTYYTKPDGCTENKFFISINLILCVVASIISIHPKIQEHQPRSGLLQSSLITLYTMYLTWSAMSNEPDRSCNPNLMSFITRITAPTLAPGNSTAVVPTPTPPSKSGSLLDSDNFIGLFVFVLCLLYSSIRTSTNSQVDKLTLSGSDSVILGDTTTSGASDEEDGQPRRAVDNEKEGVQYSYSLFHLMLCLASLYIMMTLTSWYSPDAKFQSMTSKWPAVWVKISSSWVCLLLYVWTLVAPLVLTSRDFS

SEQ ID NO: 63033 - protein, 473 aa, Homo sapiens; identical to SEQ ID NO: 63032

SEQ ID NO: 63034 - protein, 212 aa, Homo sapiens
EHQPRSGLLQSSLITLYTMYLTWSAMSNEPDRSCNPNLMSFITRITAPTLAPGNSTAVVPTPTPPSKSGSLLDSDNFIGLFVFVLCLLYSSIRTSTNSQVDKLTLSGSDSVILGDTTTSGASDEEDGQPRRAVDNEKEGVQYSYSLFHLMLCLASLYIMMTLTSWYSPDAKFQSMTSKWPAVWVKISSSWVCLLLYVWTLVAPLVLTSRDFS

SEQ ID NO: 63035 - protein, 440 aa, Homo sapiens
MPLQRCLIYAFILLLSTVVSYIMQRKEMETYLKKIPGFCEGGFKIHEADINADKDCDVLVGYKAVYRISFAMAIFFFVFSLLMFKVKTSKDLRAAVHNGFWFFKIAALIGIMVGSFYIPGGYFSSVWFVVGMIGAALFILIQLVLLVDFAHSWNESWVNRMEEGNPRLWYAALLSFTSAFYILSIICVGLLYTYYTKPDGCTENKFFISINLILCVVASIISIHPKIQEHQPRSGLLQSSLITLYTMYLTWSAMSNEPDRSCNPNLMSFITRITAPTLAPGNSTAVVPTPTPPSKSGSLLDSDNFIGLFVFVLCLLYSSIRTSTNSQVDKLTLSGSDSVILGDTTTSGASDEEDGQPRRAVDNEKEGVQYSYSLFHLMLCLASLYIMMTLTSWYSPDAKFQSMTSKWPAVWVKISSSWVCLLLYVWTLVAPLVLTSRDFS

SEQ ID NO: 63036 - protein, 418 aa, Homo sapiens
MQRKEMETYLKKIPGFCEGGFKIHEADINADKDCDVLVGYKAVYRISFAMAIFFFVFSLLMFKVKTSKDLRAAVHNGFWFFKIAALIGIMVGSFYIPGGYFSSVWFVVGMIGAALFILIQLVLLVDFAHSWNESWVNRMEEGNPRLWYAALLSFTSAFYILSIICVGLLYTYYTKPDGCTENKFFISINLILCVVASIISIHPKIQEHQPRSGLLQSSLITLYTMYLTWSAMSNEPDRSCNPNLMSFITRITAPTLAPGNSTAVVPTPTPPSKSGSLLDSDNFIGLFVFVLCLLYSSIRTSTNSQVDKLTLSGSDSVILGDTTTSGASDEEDGQPRRAVDNEKEGVQYSYSLFHLMLCLASLYIMMTLTSWYSPDAKFQSMTSKWPAVWVKISSSWVCLLLYVWTLVAPLVLTSRDFS

SEQ ID NO: 63037 - protein, 473 aa, Homo sapiens
MATATEQWVLVEMVQALYEAPAYHLILEGILILWIIRLLFSKTYKLQERSDLTVKEKEELIEEWQPEPLVPPVPKDHPALNYNIVSGPPSHKTVVNGKECINFASFNFLGLLDNPRVKAAALASLKKYGVGTCGPRGFYGTFDVHLDLEDRLAKFMKTEEAIIYSYGFATIASAIPAYSKRGDIVFVDRAACFAIQKGLQASRSDIKLFKHNDMADLERLLKEQEIEDQKNPRKARVTRRFIVVEGLYMNTGTICPLPELVKLKYKYKARIFLEESLSFGVLGEHGRGVTEHYGINIDDIDLISANMENALASIGGFCCGRSFVIDHQRLSGQGYCFSASLPPLLAAAAIEALNIMEENPGIFAVLKEKCGQIHKALQGISGLKVVGESLSPAFHLQLEESTGSREQDVRLLQEIVDQCMNRSIALTQARYLEKEEKCLPPPSIRVVVTVEQTEEELERAASTIKEVAQAVLL

SEQ ID NO: 63038 - protein, 143 aa, Homo sapiens
MATATEQWVLVEMVQALYEAPAYHLILEGILILWIIRLLFSKTYKLQERSDLTVKEKEELIEEWQPEPLVPPVPKDHPALNYNIVSGPPSHKTVVNGKECINFASFNFLGLLDNPRVKAAALASLKKYGVGTCGPRGFYGTFE

SEQ ID NO: 63039 - protein, 562 aa, Homo sapiens
MRPEPGGCCCRRTVRANGCVANGEVRNGYVRSSAAAAAAAAAGQIHHVTQNGGLYKRPFNEAFEETPMLVAVLTYVGYGVLTLFGYLRDFLRYWRIEKCHHATEREEQKDFVSLYQDFENFYTRNLYMRIRDNWNRPICSVPGARVDIMERQSHDYNWSFKYTGNIIKGVINMGSYNYLGFARNTGSCQEAAAKVLEEYGAGVCSTRQEIGNLDKHEELEELVARFLGVEAAMAYGMGFATNSMNIPALVGKGCLILSDELNHASLVLGARLSGATIRIFKHNNMQSLEKLLKDAIVYGQPRTRRPWKKILILVEGIYSMEGSIVRLPEVIALKKKYKAYLYLDEAHSIGALGPTGRGVVEYFGLDPEDVDVMMGTFTKSFGASGGYIGGKKELIDYLRTHSHSAVYATSLSPPVVEQIITSMKCIMGQDGTSLGKECVQQLAENTRYFRRRLKEMGFIIYGNEDSPVVPLMLYMPAKIGAFGREMLKRNIGVVVVGFPATPIIESRARFCLSAAHTKEILDTALKEIDEVGDLLQLKYSRHRLVPLLDRPFDETTYEETED

SEQ ID NO: 63040 - protein, 329 aa, Homo sapiens
MANPGGGAVCNGKLHNHKKQSNGSQSRNCTKNGIVKEAQQNGKPHFYDKLIVESFEEAPLHVMVFTYMGYGIGTLFGYLRDFLRNWGIEKCNAAVERKEQKDFVPLYQDFENFYTRNLYMRIRDNWNRPICSAPGPLFDLMERVSDDYNWTFRFTGRVIKDVINMGSYNFLGLAAKYDESMRTIKDVLEVYGTGVASTRHEMGTLDKHKELEDLVAKFLNVEAAMVFGMGFATNSMNIPALVGKGCLILSDELNHTSLVLGARLSGATIRIFKHNNTQSLEKLLRDAVIYGQPRTRRAWKKILILVEGVYRTSWIIYGFTRIVLFMLHP

SEQ ID NO: 63041 - protein, 552 aa, Homo sapiens
MANPGGGAVCNGKLHNHKKQSNGSQSRNCTKNGIVKEAQQNGKPHFYDKLIVESFEEAPLHVMVFTYMGYGIGTLFGYLRDFLRNWGIEKCNAAVERKEQKDFVPLYQDFENFYTRNLYMRIRDNWNRPICSAPGPLFDLMERVSDDYNWTFRFTGRVIKDVINMGSYNFLGLAAKYDESMRTIKDVLEVYGTGVASTRHEMGTLDKHKELEDLVAKFLNVEAAMVFGMGFATNSMNIPALVGKGCLILSDELNHTSLVLGARLSGATIRIFKHNNTQSLEKLLRDAVIYGQPRTRRAWKKILILVEGVYSMEGSIVHLPQIIALKKKYKAYLYIDEAHSIGAVGPTGRGVTEFFGLDPHEVDVLMGTFTKSFGASGGYIAGRKDLVDYLRVHSHSAVYASSMSPPIAEQIIRSLKLIMGLDGTTQGLQRVQQLAKNTRYFRQRLQEMGFIIYGNENASVVPLLLYMPGKVAAFARHMLEKKIGVVVVGFPATPLAEARARFCVSAAHTREMLDTVLEALDEMGDLLQLKYSRHKKSARPELYDETSFELED

SEQ ID NO: 63042 - protein, 121 aa, Homo sapiens
  VARIANT 1: note = MOD_RES - Any amino acid
XSPPIAEQIIRSLKLIMGLDGTTQGLQRVQQLAKNTRYFRQRLQEMGFIIYGNENASVVPLLLYMPGKVAAFARHMLEKKIGVVVVGFPATPLAEARARFCVSAAHTREMLDTVICCVMKI

SEQ ID NO: 63043 - protein, 139 aa, Homo sapiens
MANPGGGAVCNGKLHNHKKQSNGSQSRNCTKNGIVKEAQQNGKPHFYDKLIVESFEEAPLHVMVFTYMGYGIGTLFGYLRDFLRNWGIEKCNAAVERKEQKDFVPLYQDFENFYTRNLYMRIRDNWNRPICSAPGPLFD

SEQ ID NO: 63044 - protein, 215 aa, Homo sapiens
NCTKNGIVKEAQQNGKPHFYDKLIVESFEEAPLHVMVFTYMGYGIGTLFGYLRDFLRNWGIEKCNAAVERKEQKDFVPLYQDFENFYTRNLYMRIRDNWNRPICSAPGPLFDLMERVSDDYNWTFRFTGRVIKDVINMGSYNFLGLAAKYDESMRTIKDVLEVYGTGVASTRHEMGEFTSSWQNALCVGGVLQADSVPQGPPWSWKMGRHSSLLE

SEQ ID NO: 63045 - protein, 119 aa, Homo sapiens
MALSVLRLALLLLAVTFAGSARSGPGERGPPEKSGFGSQTGGGPCPAPGGLGDASLIPQFGLFSKYRTPNCSQYRLPGCPRHFNPVCGSDMSTYANECTLCMKIREGGHNIKIIRNGPC

SEQ ID NO: 63046 - protein, 134 aa, Homo sapiens
MALSVLRLALLLLAVTFAGSARSGPGERGPPEKSGFGSQTGGGPCPAPGGLGDGTRAPVTGGSPEDLPASLIPQFGLFSKYRTPNCSQYRLPGCPRHFNPVCGSDMSTYANECTLCMKIREGGHNIKIIRNGPC

SEQ ID NO: 63047 - protein, 79 aa, Homo sapiens
MKVTGIFLLSALALLSLSGNTGADSLGREAKCYNELNGCTKIYDPVCGTDGNTYPNECVLCFENRKRQTSILIQKSGPC

SEQ ID NO: 63048 - protein, 84 aa, Homo sapiens
MALSVLRLALLLLAVTFAASLIPQFGLFSKYRTPNCSQYRLPGCPRHFNPVCGSDMSTYANECTLCMKIREGGHNIKIIRNGPC

SEQ ID NO: 63049 - protein, 86 aa, Homo sapiens
MAVRQWVIALALAALLVVDREVPVAAGKLPFSRMPICEHMVESPTCSQMSNLVCGTDGLTYTNECQLCLARIKTKQDIQIMKDGKC

SEQ ID NO: 63050 - protein, 109 aa, Homo sapiens
MILGIGSSPHLLWTLEGTHIWSLLGDASHTDRLPEAGAGKLLSEVPVAAGKLPFSRMPICEHMVESPTCSQMSNLVCGTDGLTYTNECQLCLARIKTKQDIQIMKDGKC

SEQ ID NO: 63051 - protein, 109 aa, Homo sapiens; identical to SEQ ID NO: 63050

SEQ ID NO: 63052 - protein, 1064 aa, Homo sapiens
MKIATVSVLLPLALCLIQDAASKNEDQEMCHEFQAFMKNGKLFCPQDKKFFQSLDGIMFINKCATCKMILEKEAKSQKRARHLARAPKATAPTELNCDDFKKGERDGDFICPDYYEAVCGTDGKTYDNRCALCAENAKTGSQIGVKSEGECKSSNPEQDVCSAFRPFVRDGRLGCTRENDPVLGPDGKTHGNKCAMCAELFLKEAENAKREGETRIRRNAEKDFCKEYEKQVRNGRLFCTRESDPVRGPDGRMHGNKCALCAEIFKQRFSEENSKTDQNLGKAEEKTKVKREIVKLCSQYQNQAKNGILFCTRENDPIRGPDGKMHGNLCSMCQAYFQAENEEKKKAEARARNKRESGKATSYAELCSEYRKLVRNGKLACTRENDPIQGPDGKVHGNTCSMCEVFFQAEEEEKKKKEGKSRNKRQSKSTASFEELCSEYRKSRKNGRLFCTRENDPIQGPDGKMHGNTCSMCEAFFQQEERARAKAKREAAKEICSEFRDQVRNGTLICTREHNPVRGPDGKMHGNKCAMCASVFKLEEEEKKNDKEEKGKVEAEKVKREAVQELCSEYRHYVRNGRLPCTRENDPIEGLDGKIHGNTCSMCEAFFQQEAKEKERAEPRAKVKREAEKETCDEFRRLLQNGKLFCTRENDPVRGPDGKTHGNKCAMCKAVFQKENEERKRKEEEDQRNAAGHGSSGGGGGNTQDECAEYREQMKNGRLSCTRESDPVRDADGKSYNNQCTMCKAKLEREAERKNEYSRSRSNGTGSESGKDTCDEFRSQMKNGKLICTRESDPVRGPDGKTHGNKCTMCKEKLEREAAEKKKKEDEDRSNTGERSNTGERSNDKEDLCREFRSMQRNGKLICTRENNPVRGPYGKMHINKCAMCQSIFDREANERKKKDEEKSSSKPSNNAKDECSEFRNYIRNNELICPRENDPVHGADGKFYTNKCYMCRAVFLTEALERAKLQEKPSHVRASQEEDSPDSFSSLDSEMCKDYRVLPRIGYLCPKDLKPVCGDDGQTYNNPCMLCHENLIRQTNTHIRSTGKCEESSTPGTTAASMPPSDE

SEQ ID NO: 63053 - protein, 1094 aa, Homo sapiens
MKIATVSVLLPLALCLIQDAASKNEDQEMCHEFQAFMKNGKLFCPQDKKFFQSLDGIMFINKCATCKMILEKEAKSQKRARHLARAPKATAPTELNCDDFKKGERDGDFICPDYYEAVCGTDGKTYDNRCALCAENAKTGSQIGVKSEGECKSSNPEQDVCSAFRPFVRDGRLGCTRENDPVLGPDGKTHGNKCAMCAELFLKEAENAKREGETRIRRNAEKDFCKEYEKQVRNGRLFCTRESDPVRGPDGRMHGNKCALCAEIFKQRFSEENSKTDQNLGKAEEKTKVKREIVKLCSQYQNQAKNGILFCTRENDPIRGPDGKMHGNLCSMCQAYFQAENEEKKKAEARARNKRESGKATSYAELCSEYRKLVRNGKLACTRENDPIQGPDGKVHGNTCSMCEVFFQAEEEEKKKKEGKSRNKRQSKSTASFEELCSEYRKSRKNGRLFCTRENDPIQGPDGKMHGNTCSMCEAFFQQEERARAKAKREAAKEICSEFRDQVRNGTLICTREHNPVRGPDGKMHGNKCAMCASVFKLEEEEKKNDKEEKGKVEAEKVKREAVQELCSEYRHYVRNGRLPCTRENDPIEGLDGKIHGNTCSMCEAFFQQEAKEKERAEPRAKVKREAEKETCDEFRRLLQNGKLFCTRENDPVRGPDGKTHGNKCAMCKAVFQKENEERKRKEEEDQRNAAGHGSSGGGGGNTQDECAEYREQMKNGRLSCTRESDPVRDADGKSYNNQCTMCKAKLEREAERKNEYSRSRSNGTGSESGKDTCDEFRSQMKNGKLICTRESDPVRGPDGKTHGNKCTMCKEKLEREAAEKKKKEDEDRSNTGERSNTGERSNDKEDLCREFRSMQRNGKLICTRENNPVRGPYGKMHINKCAMCQSIFDREANERKKKDEEKSSSKPSNNAKDQCRQVQNEAEDAKFRQPGRSLASVARMSTDECSEFRNYIRNNELICPRENDPVHGADGKFYTNKCYMCRAVFLTEALERAKLQEKPSHVRASQEEDSPDSFSSLDSEMCKDYRVLPRIGYLCPKDLKPVCGDDGQTYNNPCMLCHENLIRQTNTHIRSTGKCEESSTPGTTAASMPPSDE

SEQ ID NO: 63054 - protein, 916 aa, Homo sapiens
MKIATVSVLLPLALCLIQDAASKNEDQEMCHEFQAFMKNGKLFCPQDKKFFQSLDGIMFINKCATCKMILEKEAKSQKRARHLARAPKATAPTELNCDDFKKGERDGDFICPDYYEAVCGTDGKTYDNRCALCAENAKTGSQIGVKSEGECKSSNPEQDVCSAFRPFVRDGRLGCTRENDPVLGPDGKTHGNKCAMCAELFLKEAENAKREGETRIRRNAEKDFCKEYEKQVRNGRLFCTRESDPVRGPDGRMHGNKCALCAEIFKQRFSEENSKTDQNLGKAEEKTKVKREIVKLCSQYQNQAKNGILFCTRENDPIRGPDGKMHGNLCSMCQAYFQAENEEKKKAEARARNKRESGKATSYAELCSEYRKLVRNGKLACTRENDPIQGPDGKVHGNTCSMCEVFFQAEEEEKKKKEGKSRNKRQSKSTASFEELCSEYRKSRKNGRLFCTRENDPIQGPDGKMHGNTCSMCEAFFQQEERARAKAKREAAKEICSEFRDQVRNGTLICTREHNPVRGPDGKMHGNKCAMCASVFKLEEEEKKNDKEEKGKVEAEKVKREAVQELCSEYRHYVRNGRLPCTRENDPIEGLDGKIHGNTCSMCEAFFQQEAKEKERAEPRAKVKREAEKETCDEFRRLLQNGKLFCTRENDPVRGPDGKTHGNKCAMCKAVFQKENEERKRKEEEDQRNAAGHGSSGGGGGNTQDECAEYREQMKNGRLSCTRESDPVRDADGKSYNNQCTMCKAKLEREAERKNEYSRSRSNGTGSESGKDTCDEFRSQMKNGKLICTRESDPVRGPDGKTHGNKCTMCKEKLEREAAEKKKKEDEDRSNTGERSNTGERSNDKEDLCREFRSMQRNGKLICTRENNPVRGPYGKMHINKCAMCQSIFDREANERKKKDEEKSSSKPSNNAKVIY

SEQ ID NO: 63055 - protein, 86 aa, Homo sapiens
MRATAIVLLLALTLATMFSIECAKQTKQMVDCSHYKKLPPGQQRFCHHMYDPICGSDGKTYKNDCFFCSKVKKTDGTLKFVHFGKC

SEQ ID NO: 63056 - protein, 252 aa, Homo sapiens
MAQLCGLRRSRAFLALLGSLLLSGVLAADRERSIHDFCLVSKVVGRCRASMPRWWYNVTDGSCQLFVYGGCDGNSNNYLTKEECLKKCATVTENATGDLATSRNAADSSVPSAPRRQDSEDHSSDMFNYEEYCTANAVTGPCRASFPRWYFDVERNSCNNFIYGGCRGNKNSYRSEEACMLRCFRQQENPPLPLGSKVVVLAGLFVMVLILFLGASMVYLIRVARRNQERALRTVWSSGDDKEQLVKNTYVL

SEQ ID NO: 63057 - protein, 195 aa, Homo sapiens
MAQLCGLRRSRAFLALLGSLLLSGVLAADRERSIHENATGDLATSRNAADSSVPSAPRRQDSEDHSSDMFNYEEYCTANAVTGPCRASFPRWYFDVERNSCNNFIYGGCRGNKNSYRSEEACMLRCFRQQENPPLPLGSKVVVLAGLFVMVLILFLGASMVYLIRVARRNQERALRTVWSSGDDKEQLVKNTYVL

SEQ ID NO: 63058 - protein, 89 aa, Homo sapiens
MQLQASLSFLLILTLCLELRSELARDTIKDLLPNVCAFPMEKGPCQTYMTRWFFNFETGECELFAYGGCGGNSNNFLRKEKCEKFCKFT

SEQ ID NO: 63059 - protein, 340 aa, Homo sapiens
MCAQYCISFADVEKAHINIRDSIHLTPVLTSSILNQLTGRNLFFKCELFQKTGSFKIRGALNAVRSLVPDALERKPKAVVTHSSGNHGQALTYAAKLEGIPAYIVVPQTAPDCKKLAIQAYGASIVYCEPSDESRENVAKRVTEETEGIMVHPNQEPAVIAGQGTIALEVLNQVPLVDALVVPVGGGGMLAGIAITVKALKPSVKVYAAEPSNADDCYQSKLKGKLMPNLYPPETIADGVKSSIGLNTWPIIRDLVDDIFTVTEDEIKCATQLVWERMKLLIEPTAGVGVAAVLSQHFQTVSPEVKNICIVLSGGNVDLTSSITWVKQAERPASYQSVSV

SEQ ID NO: 63060 - protein, 545 aa, Homo sapiens
MAEPSGSPVHVQLPQQAAPVTAAAAAAPAAATAAPAPAAPAAPAPAPAPAAQAVGWPICRDAYELQEVIGSGATAVVQAALCKPRQERVAIKRINLEKCQTSMDELLKEIQAMSQCSHPNVVTYYTSFVVKDELWLVMKLLSGGSMLDIIKYIVNRGEHKNGVLEEAIIATILKEVLEGLDYLHRNGQIHRDLKAGNILLGEDGSVQIADFGVSAFLATGGDVTRNKVRKTFVGTPCWMAPEVMEQVRGYDFKADMWSFGITAIELATGAAPYHKYPPMKVLMLTLQNDPPTLETGVEDKEMMKKYGKSFRKLLSLCLQKDPSKRPTAAELLKCKFFQKAKNREYLIEKLLTRTPDIAQRAKKVRRVPGSSGHLHKTEDGDWEWSDDEMDEKSEEGKAAFSQEKSRRVKEENPEIAVSASTIPEQIQSLSVHDSQGPPNANEDYREASSCAVNLVLRLRNSRKELNDIRFEFTPGRDTADGVSQELFSAGLVDGHDVVIVAANLQKIVDDPKALKTLTFKLASGCDGSEIPDEVKLIGFAQLSVS

SEQ ID NO: 63061 - protein, 904 aa, Homo sapiens
MDAGFFRGTSAEQDNRFSNKQKKLLKQLKFAECLEKKVDMSKVNLEVIKPWITKRVTEILGFEDDVVIEFIFNQLEVKNPDSKMMQINLTGFLNGKNAREFMGELWPLLLSAQENIAGIPSAFLELKKEEIKQRQIEQEKLASMKKQDEDKDKRDKEEKESSREKRERSRSPRRRKSRSPSPRRRSSPVRRERKRSHSRSPRHRTKSRSPSPAPEKKEKTPELPEPSVKVKEPSVQEATSTSDILKVPKPEPIPEPKEPSPEKNSKKEKEKEKTRPRSRSRSKSRSRTRSRSPSHTRPRRRHRSRSRSYSPRRRPSPRRRPSPRRRTPPRRMPPPPRHRRSRSPVRRRRRSSASLSGSSSSSSSSRSRSPPKKPPKRTSSPPRKTRRLSPSASPPRRRHRPSPPATPPPKTRHSPTPQQSNRTRKSRVSVSPGRTSGKVTKHKGTEKRESPSPAPKPRKVELSESEEDKGGKMAAADSVQQRRQYRRQNQQSSSDSGSSSSSEDERPKRSHVKNGEVGRRRRHSPSRSASPSPRKRQKETSPRGRRRRSPSPPPTRRRRSPSPAPPPRRRRTPTPPPRRRTPSPPPRRRSPSPRRYSPPIQRRYSPSPPPKRRTASPPPPPKRRASPSPPPKRRVSHSPPPKQRSSPVTKRRSPSLSSKHRKGSSPSRSTREARSPQPNKRHSPSPRPRAPQTSSSPPPVRRGASSSPQRRQSPSPSTRPIRRVSRTPEPKKIKKAASPSPQSVRRVSSSRSVSGSPEPAAKKPPAPPSPVQSQSPSTNWSPAVPVKKAKSPTPSPSPPRNSDQEGGGKKKKKKKDKKHKKDKKHKKHKKHKKEKAVAAAAAAAVTPAAIAAATTTLAQEEPVAAPEPKKETESEAEDNLDDLEKHLREKALRSMRKAQVSPQS

SEQ ID NO: 63062 - protein, 913 aa, Homo sapiens
MDAGFFRGTSAEQDNRFSNKQKKLLKQLKFAECLEKKVDMSKVNLEVIKPWITKRVTEILGFEDDVVIEFIFNQLEVKNPDSKMMQINLTGFLNGKNAREFMGELWPLLLSAQENIAGIPSAFLELKKEEIKQRQIEQEKLASMKKQDEDKDKRDKEEKESSREKRERSRSPRRRKSRSPSPRRRSSPVRRERKRSHSRSPRHRTKSRSPSPAPEKKEKTPELPEPSVKVKEPSVQEATSTSDILKVPKPEPIPEPKEPSPEKNSKKEKEKEKTRPRSRSRSKSRSRTRSRSPSHTRPRRRHRSRSRRRPSPRRRPSPRRRTPPRRMPPPPRHRRSRSPVRRRRRSSASLSGSSSSSSSSRSRSPPKKPPKRTSSPPRKTRRLSPSASPPRRRHRPSPPATPPPKTRHSPTPQQSNRTRKSRVSVSPGRTSGKVTKHKGTEKRESPSPAPKPRKVELSESEEDKGGKMAAADSVQQRRQYRRQNQQSSSDSGSSSSSEDERPKRSHVKNGEVGRRRRHSPSRSASPSPRKRQKETSPRMQMGKRWQSPVTKSGRRRRSPSPPPTRRRRSPSPAPPPRRRRTPTPPPRRRTPSPPPRRRSPSPRRYSPPIQRRYSPSPPPKRRTASPPPPPKRRASPSPPPKRRVSHSPPPKQRSSPVTKRRSPSLSSKHRKGSSPSRSTREARSPQPNKRHSPSPRPRAPQTSSSPPPVRRGASSSPQRRQSPSPSTRPIRRVSRTPEPKKIKKAASPSPQSVRRVSSSRSVSGSPEPAAKKPPAPPSPVQSQSPSTNWSPAVPVKKAKSPTPSPSPPRNSDQEGGGKKKKKKKDKKHKKDKKHKKHKKHKKEKAVAAAAAAAVTPAAIAAATTTLAQEEPVAAPEPKKETESEAEDNLDDLEKHLREKALRSMRKAQVSPQS

SEQ ID NO: 63063 - protein, 916 aa, Homo sapiens
MDAGFFRGTSAEQDNRFSNKQKKLLKQLKFAECLEKKVDMSKVNLEVIKPWITKRVTEILGFEDDVVIEFIFNQLEVKNPDSKMMQINLTGFLNGKNAREFMGELWPLLLSAQENIAGIPSAFLELKKEEIKQRQIEQEKLASMKKQDEDKDKRDKEEKESSREKRERSRSPRRRKSRSPSPRRRSSPVRRERKRSHSRSPRHRTKSRSPSPAPEKKEKTPELPEPSVKVKEPSVQEATSTSDILKVPKPEPIPEPKEPSPEKNSKKEKEKEKTRPRSRSRSKSRSRTRSRSPSHTRPRRRHRSRSRSYSPRRRPSPRRRPSPRRRTPPRRMPPPPRHRRSRSPVRRRRRSSASLSGSSSSSSSSRSRSPPKKPPKRTSSPPRKTRRLSPSASPPRRRHRPSPPATPPPKTRHSPTPQQSNRTRKSRVSVSPGRTSVTKHKGTEKRESPSPAPKPRKVELSESEEDKGGKMAAADSVQQRRQYRRQNQQSSSDSGSSSSSEDERPKRSHVKNGEVGRRRRHSPSRSASPSPRKRQKETSPRMQMGKRWQSPVTKSGRRRRSPSPPPTRRRRSPSPAPPPRRRRTPTPPPRRRTPSPPPRRRSPSPRRYSPPIQRRYSPSPPPKRRTASPPPPPKRRASPSPPPKRRVSHSPPPKQRSSPVTKRRSPSLSSKHRKGSSPSRSTREARSPQPNKRHSPSPRPRAPQTSSSPPPVRRGASSSPQRRQSPSPSTRPIRRVSRTPEPKKIKKAASPSPQSVRRVSSSRSVSGSPEPAAKKPPAPPSPVQSQSPSTNWSPAVPVKKAKSPTPSPSPPRNSDQEGGGKKKKKKKDKKHKKDKKHKKHKKHKKEKAVAAAAAAAVTPAAIAAATTTLAQEEPVAAPEPKKETESEAEDNLDDLEKHLREKALRSMRKAQVSPQS

SEQ ID NO: 63064 - protein, 318 aa, Homo sapiens
MGELWPLLLSAQENIAGIPSAFLELKKEEIKQRQIEQEKLASMKKQDEDKDKRDKEEKESSREKRERSRSPRRTKSRSPSPAPEKKEKTPELPEPSVKVKEPSVQEATSTSDILKVPKPEPIPEPKEPSPEKNSKKEKEKEKTRPRSRSRSKSRSRTRSRSPSHTRPRRRHRSRSRSYSPRRRPSPRRRPSPRRRTPPRRMPPPPRHRRSRSPVRRFSGILPPKVNSAEEDVRQHPCLGVAHHPLHLVHGHHQRSLPRGHPAPLGKLVGYLLQQVLQGEGTGHHLLQLHHPKLGIPLHPSSQTVQEKVVFLCLQGELQ

SEQ ID NO: 63065 - protein, 2752 aa, Homo sapiens
MYNGIGLPTPRGSGTNGYVQRNLSLVRGRRGERPDYKGEEELRRLEAALVKRPNPDILDHERKRRVELRCLELEEMMEEQGYEEQQIQEKVATFRLMLLEKDVNPGGKEETPGQRPAVTETHQLAELNEKKNERLRAAFGISDSYVDGSSFDPQRRAREAKQPAPEPPKPYSLVRESSSSRSPTPKQKKKKKKKDRGRRSESSSPRRERKKSSKKKKHRSESESKKRKHRSPTPKSKRKSKDKKRKRSRSTTPAPKSRRAHRSTSADSASSSDTSRSRSRSAAAKTHTTALAGRSPSPASGRRGEGDAPFSEPGTTSTQRPSSPETATKQPSSPYEDKDKDKKEKSATRPSPSPERSSTGPEPPAPTPLLAERHGGSPQPLATTPLSQEPVNPPSEASPTRDRSPPKSPEKLPQSSSSESSPPSPQPTKVSRHASSSPESPKPAPAPGSHREISSSPTSKNRSHGRAKRDKSHSHTPSRRMGRSRSPATAKRGRSRSRTPTKRGHSRSRSPQWRRSRSAQRWGRSRSPQRRGRSRSPQRPGWSRSRNTQRRGRSRSARRGRSHSRSPATRGRSRSRTPARRGRSRSRTPARRRSRSRTPTRRRSRSRTPARRGRSRSRTPARRRSRTRSPVRRRSRSRSPARRSGRSRSRTPARRGRSRSRTPARRGRSRSRTPARRSGRSRSRTPARRGRSRSRTPRRGRSRSRSLVRRGRSHSRTPQRRGRSGSSSERKNKSRTSQRRSRSNSSPEMKKSRISSRRSRSLSSPRSKAKSRLSLRRSLSGSSPCPKQKSQTPPRRSRSGSSQPKAKSRTPPRRSRSSSSPPPKQKSKTPSRQSHSSSSPHPKVKSGTPPRQGSITSPQANEQSVTPQRRSCFESSPDPELKSRTPSRHSCSGSSPPRVKSSTPPRQSPSRSSSPQPKVKAIISPRQRSHSGSSSPSPSRVTSRTTPRRSRSVSPCSNVESRLLPRYSHSGSSSPDTKVKPETPPRQSHSGSISPYPKVKAQTPPGPSLSGSKSPCPQEKSKDSLVQSCPGSLSLCAGVKSSTPPGESYFGVSSLQLKGQSQTSPDHRSDTSSPEVRQSHSESPSLQSKSQTSPKGGRSRSSSPVTELASRSPIRQDRGEFSASPMLKSGMSPEQSRFQSDSSSYPTVDSNSLLGQSRLETAESKEKMALPPQEDATASPPRQKDKFSPFPVQDRPESSLVFKDTLRTPPRERSGAGSSPETKEQNSALPTSSQDEELMEVVEKSEEPAGQILSHLSSELKEMSTSNFESSPEVEERPAVSLTLDQSQSQASLEAVEVPSMASSWGGPHFSPEHKELSNSPLRENSFGSPLEFRNSGPLGTEMNTGFSSEVKEDLNGPFLNQLETDPSLDMKEQSTRSSGHSSSELSPDAVEKAGMSSNQSISSPVLDAVPRTPSRERSSSASSPEMKDGLPRTPSRRSRSGSSPGLRDGSGTPSRHSLSGSSPGMKDIPRTPSRGRSECDSSPEPKALPQTPRPRSRSPSSPELNNKCLTPQRERSGSESSVDQKTVARTPLGQRSRSGSSQELDVKPSASPQERSESDSSPDSKAKTRTPLRQRSRSGSSPEVDSKSRLSPRRSRSGSSPEVKDKPRAAPRAQSGSDSSPEPKAPAPRALPRRSRSGSSSKGRGPSPEGSSSTESSPEHPPKSRTARRGSRSSPEPKTKSRTPPRRRSSRSSPELTRKARLSRRSRSASSSPETRSRTPPRHRRSPSVSSPEPAEKSRSSRRRRSASSPRTKTTSRRGRSPSPKPRGLQRSRSRSRREKTRTTRRRDRSGSSQSTSRRRQRSRSRSRVTRRRRGGSGYHSRSPARQESSRTSSRRRRGRSRTPPTSRKRSRSRTSPAPWKRSRSRASPATHRRSRSRTPLISRRRSRSRTSPVSRRRSRSRTSVTRRRSRSRASPVSRRRSRSRTPPVTRRRSRSRTPTTRRRSRSRTPPVTRRRSRSRTPPVTRRRSRSRTSPITRRRSRSRTSPVTRRRSRSRTSPVTRRRSRSRTSPVTRRRSRSRTPPAIRRRSRSRTPLLPRKRSRSRSPLAIRRRSRSRTPRTARGKRSLTRSPPAIRRRSASGSSSDRSRSATPPATRNHSGSRTPPVALNSSRMSCFSRPSMSPTPLDRCRSPGMLEPLGSSRTPMSVLQQAGGSMMDGPGPRIPDHQRTSVPENHAQSRIALALTAISLGTARPPPSMSAAGLAARMSQVPAPVPLMSLRTAPAANLASRIPAASAAAMNLASARTPAIPTAVNLADSRTPAAAAAMNLASPRTAVAPSAVNLADPRTPTAPAVNLAGARTPAALAALSLTGSGTPPTAANYPSSSRTPQAPASANLVGPRSAHATAPVNIAGSRTAAALAPASLTSARMAPALSGANLTSPRVPLSAYERVSGRTSPPLLDRARSRTPPSAPSQSRMTSERAPSPSSRMGQAPSQSLLPPAQDQPRSPVPSAFSDQSRCLIAQTTPVAGSQSLSSGAVATTTSSAGDHNGMLSVPAPGVPHSDVGEPPASTGAQQPSALAALQPAKERRSSSSSSSSSSSSSSSSSSSSSSSSSGSSSSDSEGSSLPVQPEVALKRVPSPTPAPKEAVREGRPPEPTPAKRKRRSSSSSSSSSSSSSSSSSSSSSSSSSSSSSSSSSSSSSSSSSSPSPAKPGPQALPKPASPKKPPPGERRSRSPRKPIDSLRDSRSLSYSPVERRRPSPQPSPRDQQSSSSERGSRRGQRGDSRSPSHKRRRETPSPRPMRHRSSRSP

SEQ ID NO: 63066 - protein, 233 aa, Homo sapiens
MISFPSLQRTELEEMDLILQQEGWQLDLKRNSLGWKDLQRSSHPSPCLQAGRPLPQPTCTHRGLPKLRLSEEGDYPASASTPEPRGLIPPSGTFLRFNLDPLCCGPQPVASVSRGWVSSHHCSPENCWLTWLGELPAPFSGTPPPTAVPPGQGSRSRSPRKPIDSLRDSRSLSYSPVERRRPSPQPSPRDQQSSSSERGSRRGQRGDSRSPSHKRRRETPSPRPMRHRSSRSP

SEQ ID NO: 63067 - protein, 2334 aa, Homo sapiens
MYNGIGLPTPRGSGTNGYVQRNLSLVRGRRGERPDYKGEEELRRLEAALVKRPNPDILDHERKRRVELRCLELEEMMEEQGYEEQQIQEKVATFRLMLLEKDVNPGGKEETPGQRPAVTETHQLAELNEKKNERLRAAFGISDSYVDGSSFDPQRRAREAKQPAPEPPKPYSLVRESSSSRSPTPKQKKKKKKKDRGRRSESSSPRRERKKSSKKKKHRSESESKKRKHRSPTPKSKRKSKDKKRKRSRSTTPAPKSRRAHRSTSADSASSSDTSRSRSRSAAAKTHTTALAGRSPSPASGRRGEGDAPFSEPGTTSTQRPSSPETATKQPSSPYEDKDKDKKEKSATRPSPSPERSSTGPEPPAPTPLLAERHGGSPQPLATTPLSQEPVNPPSEASPTRDRSPPKSPEKLPQSSSSESSPPSPQPTKVSRHASSSPESPKPAPAPGSHREISSSPTSKNRSHGRAKRDKSHSHTPSRRMGRSRSPATAKRGRSRSRTPTKRGHSRSRSPQWRRSRSAQRWGRSRSPQRRGRSRSPQRPGWSRSRNTQRRGRSRSARRGRSHSRSPATRGRSRSRTPARRGRSRSRTPARRRSRSRTPTRRRSRSRTPARRGRSRSRTPARRRSRTRSPVRRRSRSRSPARRSGRSRSRTPARRGRSRSRTPARRGRSRSRTPARRSGRSRSRTPARRGRSRSRTPRRGRSRSRSLVRRGRSHSRTPQRRGRSGSSSERKNKSRTSQRRSRSNSSPEMKKSRISSRRSRSLSSPRSKAKSRLSLRRSLSGSSPCPKQKSQTPPRRSRSGSSQPKAKSRTPPRRSRSSSSPPPKQKSKTPSRQSHSSSSPHPKVKSGTPPRQGSITSPQANEQSVTPQRRSCFESSPDPELKSRTPSRHSCSGSSPPRVKSSTPPRQSPSRSSSPQPKVKAIISPRQRSHSGSSSPSPSRVTSRTTPRRSRSVSPCSNVESRLLPRYSHSGSSSPDTKVKPETPPRQSHSGSISPYPKVKAQTPPGPSLSGSKSPCPQEKSKDSLVQSCPGSLSLCAGVKSSTPPGESYFGVSSLQLKGQSQTSPDHRSDTSSPEVRQSHSESPSLQSKSQTSPKGGRSRSSSPVTELASRSPIRQDRGEFSASPMLKSGMSPEQSRFQSDSSSYPTVDSNSLLGQSRLETAESKEKMALPPQEDATASPPRQKDKFSPFPVQDRPESSLVFKDTLRTPPRERSGAGSSPETKEQNSALPTSSQDEELMEVVEKSEEPAGQILSHLSSELKEMSTSNFESSPEVEERPAVSLTLDQSQSQASLEAVEVPSMASSWGGPHFSPEHKELSNSPLRENSFGSPLEFRNSGPLGTEMNTGFSSEVKEDLNGPFLNQLETDPSLDMKEQSTRSSGHSSSELSPDAVEKAGMSSNQSISSPVLDAVPRTPSRERSSSASSPEMKDGLPRTPSRRSRSGSSPGLRDGSGTPSRHSLSGSSPGMKDIPRTPSRGRSECDSSPEPKALPQTPRPRSRSPSSPELNNKCLTPQRERSGSESSVDQKTVARTPLGQRSRSGSSQELDVKPSASPQERSESDSSPDSKAKTRTPLRQRSRSGSSPEVDSKSRLSPRRSRSGSSPEVKDKPRAAPRAQSGSDSSPEPKAPAPRALPRRSRSGSSSKGRGPSPEGSSSTESSPEHPPKSRTARRGSRSSPEPKTKSRTPPRRRSSRSSPELTRKARLSRRSRSASSSPETRSRTPPRHRRSPSVSSPEPAEKSRSSRRRRSASSPRTKTTSRRGRSPSPKPRGLQRSRSRSRREKTRTTRRRDRSGSSQSTSRRRQRSRSRSRVTRRRRGGSGYHSRSPARQESSRTSSRRRRGRSRTPPTSRKRSRSRTSPAPWKRSRSRASPATHRRSRSRTPLISRRRSRSRTSPVSRRRSRSRTSVTRRRSRSRASPVSRRRSRSRTPPVTRRRSRSRTPTTRRRSRSRTPPVTRRRSRSRTPPVTRRRSRSRTSPITRRRSRSRTSPVTRRRSRSRTSPVTRRRSRSRTSPVTRRRSRSRTPPAQDQPRSPVPSAFSDQSRCLIAQTTPVAGSQSLSSGAVATTTSSAGDHNGMLSVPAPGVPHSDVGEPPASTGAQQPSALAALQPAKERRSSSSSSSSSSSSSSSSSSSSSSSSSGSSSSDSEGSSLPVQPEVALKRVPSPTPAPKEAVREGRPPEPTPAKRKRRSSSSSSSSSSSSSSSSSSSSSSSSSSSSSSSSSSSSSSSSSSPSPAKPGPQALPKPASPKKPPPGERRSRSPRKPIDSLRDSRSLSYSPVERRRPSPQPSPRDQQSSSSERGSRRGQRGDSRSPSHKRRRETPSPRPMRHRSSRSP

SEQ ID NO: 63068 - protein, 311 aa, Homo sapiens
MLLEKDVNPGGKEETPGQRPAVTETHQLAELNEKKNERLRAAFGISDSYVDGSSFDPQRRAREAKQPAPEPPKPYSLVRESSSSRSPTPKQKKKKKKKDRGRRSESSSPRRERKKSSKKKKHRSESESKKRKHRSPTPKSKRKSKDKKRKRSRSTTPAPKSRRAHRSTSADSASSSDTSRSRSRSAAAKTHTTALAGRSPSPASGRRGEGDAPFSEPGTTSTQRPSSPETATKQPSSPYEDKDKDKKEKSATRPSPSPERSSTGPEPPAPTPLLAERHGGSPQPLATTPLSQEPVNPSPQLFMFLKGILVF

SEQ ID NO: 63069 - protein, 956 aa, Homo sapiens
RRRRLRRADRRGEAAAPGPRDSGARAAAAARPLPLGGGGRRRRVRGYEEQQIQEKVATFRLMLLEKDVNPGGKEETPGQRPAVTETHQLAELNEKKNERLRAAFGISDSYVDGSSFDPQRRAREAKQPAPEPPKPYSLVRESSSSRSPTPKQKKKKKKKDRGRRSESSSPRRERKKSSKKKKHRSESESKKRKHRSPTPKSKRKSKDKKRKRSRSTTPAPKSRRAHRSTSADSASSSDTSRSRSRSAAAKTHTTALAGRSPSPASGRRGEGDAPFSEPGTTSTQRPSSPETATKQPSSPYEDKDKDKKEKSATRPSPSPERSSTGPEPPAPTPLLAERHGGSPQPLATTPLSQEPVNPPSEASPTRDRSPPKSPEKLPQSSSSESSPPSPQPTKVSRHASSSPESPKPAPAPGSHREISSSPTSKNRSHGRAKRDKSHSHTPSRRMGRSRSPATAKRGRSRSRTPTKRGHSRSRSPQWRRSRSAQRWGRSRSPQRRGRSRSPQRPGWSRSRNTQRRGRSRSARRGRSHSRSPATRGRSRSRTPARRGRSRSRTPARRRSRSRTPTRRRSRSRTPARRGRSRSRTPARRRSRTRSPVRRRSRSRSPARRSGRSRSRTPARRGRSRSRTPARRGRSRSRTPARRSGRSRSRTPARRGRSRSRTPRRGRSRSRSLVRRGRSHSRTPQRRGRSGSSSERKNKSRTSQRRSRSNSSPEMKKSRISSRRSRSLSSPRSKAKSRLSLRRSLSGSSPCPKQKSQTPPRRSRSGSSQPKAKSRTPPRRSRSSSSPPPKQKSKTPSRQSHSSSSPHPKVKSGTPPRQGSITSPQANEQSVTPQRRSCFESSPDPELKSRTPSRHSCSGSSPPRVKSSTPPRQSPSRSSSPQPKVKAIISPRQRSHSGSSSPSPSRVTSRTTPRRSRSVSPCSNVESRLLPRYSHSGSSSPDTKVKPETPPRQSHSG

SEQ ID NO: 63070 - protein, 2011 aa, Homo sapiens
MKKSRISSRRSRSLSSPRSKAKSRLSLRRSLSGSSPCPKQKSQTPPRRSRSGSSQPKAKSRTPPRRSRSSSSPPPKQKSKTPSRQSHSSSSPHPKVKSGTPPRQGSITSPQANEQSVTPQRRSCFESSPDPELKSRTPSRHSCSGSSPPRVKSSTPPRQSPSRSSSPQPKVKAIISPRQRSHSGSSSPSPSRVTSRTTPRRSRSVSPCSNVESRLLPRYSHSGSSSPDTKVKPETPPRQSHSGSISPYPKVKAQTPPGPSLSGSKSPCPQEKSKDSLVQSCPGSLSLCAGVKSSTPPGESYFGVSSLQLKGQSQTSPDHRSDTSSPEVRQSHSESPSLQSKSQTSPKGGRSRSSSPVTELASRSPIRQDRGEFSASPMLKSGMSPEQSRFQSDSSSYPTVDSNSLLGQSRLETAESKEKMALPPQEDATASPPRQKDKFSPFPVQDRPESSLVFKDTLRTPPRERSGAGSSPETKEQNSALPTSSQDEELMEVVEKSEEPAGQILSHLSSELKEMSTSNFESSPEVEERPAVSLTLDQSQSQASLEAVEVPSMASSWGGPHFSPEHKELSNSPLRENSFGSPLEFRNSGPLGTEMNTGFSSEVKEDLNGPFLNQLETDPSLDMKEQSTRSSGHSSSELSPDAVEKAGMSSNQSISSPVLDAVPRTPSRERSSSASSPEMKDGLPRTPSRRSRSGSSPGLRDGSGTPSRHSLSGSSPGMKDIPRTPSRGRSECDSSPEPKALPQTPRPRSRSPSSPELNNKCLTPQRERSGSESSVDQKTVARTPLGQRSRSGSSQELDVKPSASPQERSESDSSPDSKAKTRTPLRQRSRSGSSPEVDSKSRLSPRRSRSGSSPEVKDKPRAAPRAQSGSDSSPEPKAPAPRALPRRSRSGSSSKGRGPSPEGSSSTESSPEHPPKSRTARRGSRSSPEPKTKSRTPPRRRSSRSSPELTRKARLSRRSRSASSSPETRSRTPPRHRRSPSVSSPEPAEKSRSSRRRRSASSPRTKTTSRRGRSPSPKPRGLQRSRSRSRREKTRTTRRRDRSGSSQSTSRRRQRSRSRSRVTRRRRGGSGYHSRSPARQESSRTSSRRRRGRSRTPPTSRKRSRSRTSPAPWKRSRSRASPATHRRSRSRTPLISRRRSRSRTSPVSRRRSRSRTSVTRRRSRSRASPVSRRRSRSRTPPVTRRRSRSRTPTTRRRSRSRTPPVTRRRSRSRTPPVTRRRSRSRTSPITRRRSRSRTSPVTRRRSRSRTSPVTRRRSRSRTSPVTRRRSRSRTPPAIRRRSRSRTPLLPRKRSRSRSPLAIRRRSRSRTPRTARGKRSLTRSPPAIRRRSASGSSSDRSRSATPPATRNHSGSRTPPVALNSSRMSCFSRPSMSPTPLDRCRSPGMLEPLGSSRTPMSVLQQAGGSMMDGPGPRIPDHQRTSVPENHAQSRIALALTAISLGTARPPPSMSAAGLAARMSQVPAPVPLMSLRTAPAANLASRIPAASAAAMNLASARTPAIPTAVNLADSRTPAAAAAMNLASPRTAVAPSAVNLADPRTPTAPAVNLAGARTPAALAALSLTGSGTPPTAANYPSSSRTPQAPASANLVGPRSAHATAPVNIAGSRTAAALAPASLTSARMAPALSGANLTSPRVPLSAYERVSGRTSPPLLDRARSRTPPSAPSQSRMTSERAPSPSSRMGQAPSQSLLPPAQDQPRSPVPSAFSDQSRCLIAQTTPVAGSQSLSSGAVATTTSSAGDHNGMLSVPAPGVPHSDVGEPPASTGAQQPSALAALQPAKERRSSSSSSSSSSSSSSSSSSSSSSSSSGSSSSDSEGSSLPVQPEVALKRVPSPTPAPKEAVREGRPPEPTPAKRKRRSSSSSSSSSSSSSSSSSSSSSSSSSSSSSSSSSSSSSSSSSSPSPAKPGPQALPKPASPKKPPPGERSLLPVSPSPRHSLPHVARGTFLKRTSGYFPPLHKSFGTPCGLQDKAPPLREWRVRLFTNGPCPPCVLLLPAPTHALCSSHTQRLAV

SEQ ID NO: 63071 - protein, 611 aa, Homo sapiens
MASVQQGEKQLFEKFWRGTFKAVATPRPESIIVASITARKPLPRTEPQNNPVVPAQDGPSEKLGQHLATEPLGTNSWERDKTCRELGATRGHSASHDKDLTPPPSSRGKKKKKKSTRKKRRRSSSYSPSPVKKKKKKSSKKHKRRRSFSKKRRHSSSSPKSKRRDEKRHKKQSRSRPRKSHRHRHHRCPSRSQSSESRPSSCESRHRGRSPEEGQKSRRRHSRRCSKTLCKDSPEAQSSRPPSQPLQMLGYLSARGVITGSGSAADLFTKTASPLTTSRGRSQEYDSGNDTSSPPSTQTSSARSRGQEKGSPSGGLSKSRELNSGNTSDSGNSFTTSSPQNKGAMLENLSPTSRGRESRGFQSPCLECAEVKKSSLVPSTARSSPMKGCSRSSSYASTRSSSHSSRSPNPRASPRYTQSRSTSSEKRSYSRSPSYSSKSGKRSPPSRSSRSRRSPSYSRYSPSRERDPKYSEKDSQQRERERARRRRRSYSPMRKRRRDSPSHLEARRITSARKRPIPYYRPSPSSSGSLSSTSSWYSSSSSRSASRSYSRSRSRSRSRRRSRTRTSSSSSSRSPSPGSRSRSRSRSRSRSRSRSQSRSYSSADSYSSTRR

SEQ ID NO: 63072 - protein, 248 aa, Homo sapiens
MSGGGVIRGPAGNNDCRIYVGNLPPDIRTKDIEDVFYKYGAIRDIDLKNRRGGPPFAFVEFEDPRDAEDAVYGRDGYDYDGYRLRVEFPRSGRGTGRGGGGGGGGGAPRGRYGPPSRRSENRVVVSGLPPSGSWQDLKDHMREAGDVCYADVYRDGTGVVEFVRKEDMTYAVRKLDNTKFRSHEGETAYIRVKVDGPRSPSYGRSRSRSRSRSRSRSRSNSRSRSYSPRRSRGSPRYSPRHSRSRSRT

SEQ ID NO: 63073 - protein, 201 aa, Homo sapiens
MSGGGVIRGPAGNNDCRIYVGNLPPDIRTKDIEDVFYKYGAIRDIDLKNRRGGPPFAFVEFEDPRDAEDAVYGRDGYDYDGYRLRVEFPRSGRGTGRGGGGGGGGGAPRGRYGPPSRRSENRVVVSGLPPSGSWQDLKDHMREAGDVCYADVYRDGTGVVEFVRKEDMTYAVRKLDNTKFRSHEVGYTRILFFDQNWIQWS

SEQ ID NO: 63074 - protein, 261 aa, Homo sapiens
MSRYLRPPNTSLFVRNVADDTRSEDLRREFGRYGPIVDVYVPLDFYTRRPRGFAYVQFEDVRDAEDALHNLDRKWICGRQIEIQFAQGDRKTPNQMKAKEGRNVYSSSRYDDYDRYRRSRSRSYERRRSRSRSFDYNYRRSYSPRNRPTGRPRRSRSHSDNDRFKHRNRSFSRSKSNSRSRSKSQPKKEMKAKSRSRSASHTKTRGTSKTDSKTHYKSGSRYEKESRKKEPPRSKSQSRSQSRSRSKSRSRSWTSPKSSGH

SEQ ID NO: 63075 - protein, 183 aa, Homo sapiens
MSRYLRPPNTSLFVRNVADDTRSEDLRREFGRYGPIVDVYVPLDFYTRRPRGFAYVQFEDVRDAEDALHNLDRKWICGRQIEIQFAQGDRKTPNQMKAKEGRNVYSSSRYDDYDRYRRSRSRSYERRRSRSRSFDYNYRRSYSPRNSRPTGRPRRSRSHSDNDRPNCSWNTQYSSAYYTSRKI

SEQ ID NO: 63076 - protein, 173 aa, Homo sapiens
MSRYLRPPNTSLFVRNVADDTRSEDLRREFGRYGPIVDVYVPLDFYTRRPRGFAYVQFEDVRDAEDALHNLDRKWICGRQIEIQFAQGDRKTPNQMKAKEGRNVYSSSRYDDYDRYRRSRSRSYERRRSRSRSFDYNYRRSYSPRNSRPTGRPRRSRSHSDNDSQVSKKKNER

SEQ ID NO: 63077 - protein, 172 aa, Homo sapiens
MSRYLRPPNTSLFVRNVADDTRSEDLRREFGRYGPIVDVYVPLDFYTRRPRGFAYVQFEDVRDAEDALHNLDRKWICGRQIEIQFAQGDRKTPNQMKAKEGRNVYSSSRYDDYDRYRRSRSRSYERRRSRSRSFDYNYRRSYSPRNRPTGRPRRSRSHSDNDSQVSKKKNER

SEQ ID NO: 63078 - protein, 165 aa, Homo sapiens
MSRYLRPPNTSLFVRNVADDTRSEDLRREFGRYGPIVDVYVPLDFYTRRPRGFAYVQFEDVRDAEDALHNLDRKWICGRQIEIQFAQGDRKTPNQMKAKEGRNVYSSSRYDDYDRYRRSRSRSYERRRSRSRSFDYNYRRSYSPRKPNCSWNTQYSSAYYTSRKI

SEQ ID NO: 63079 - protein, 182 aa, Homo sapiens
MSRYLRPPNTSLFVRNVADDTRSEDLRREFGRYGPIVDVYVPLDFYTRRPRGFAYVQFEDVRDAEDALHNLDRKWICGRQIEIQFAQGDRKTPNQMKAKEGRNVYSSSRYDDYDRYRRSRSRSYERRRSRSRSFDYNYRRSYSPRNRPTGRPRRSRSHSDNDRPNCSWNTQYSSAYYTSRKI

SEQ ID NO: 63080 - protein, 262 aa, Homo sapiens
MSRYLRPPNTSLFVRNVADDTRSEDLRREFGRYGPIVDVYVPLDFYTRRPRGFAYVQFEDVRDAEDALHNLDRKWICGRQIEIQFAQGDRKTPNQMKAKEGRNVYSSSRYDDYDRYRRSRSRSYERRRSRSRSFDYNYRRSYSPRNSRPTGRPRRSRSHSDNDRFKHRNRSFSRSKSNSRSRSKSQPKKEMKAKSRSRSASHTKTRGTSKTDSKTHYKSGSRYEKESRKKEPPRSKSQSRSQSRSRSKSRSRSWTSPKSSGH

SEQ ID NO: 63081 - protein, 424 aa, Homo sapiens
MINNHRNQALYFSEHKYFQQTQVVYQGDIFWVFLCVFCLRKECVLMQGCFSAGVIPDEAKALSLLAPANAVAGLLPGGGLLPTPNPLTQIGAVPLAALGAPTLDPALAALGLPGANLNSQSLAADQLLKLMSTVDPKLNHVAAGLVSPSLKSDTSSKEIEEAMKRVREAQSLISAAIEPDKKEEKRRHSRSRSRSRRRRTPSSSRHRRSRSRSRRRSHSKSRSRRRSKSPRRRRSHSRERGRRSRSTSKTRDKKKEDKEKKRSKTPPKSYSTARRSRSASRERRRRRSRSGTRSPKKPRSPKRKLSRSPSPRRHKKEKKKDKDKERSRDERERSTSKKKKSKDKEKDRERKSESDKDVKQVTRDYDEEEQGYDSEKEKKEEKKPIETGSPKTKECSVEKGTGDSLRESKVNGDDHHEEDMDMSD

SEQ ID NO: 63082 - protein, 484 aa, Homo sapiens
MSNTTVVPSTAGPGPSGGPGGGGGGGGGGGGTEVIQVTNVSPSASSEQMRTLFGFLGKIDELRLFPPDDSPLPVSSRVCFVKFHDPDSAVVAQHLTNTVFVDRALIVVPYAEGVIPDEAKALSLLAPANAVAGLLPGGGLLPTPNPLTQIGAVPLAALGAPTLDPALAALGLPGANLNSQSLAADQLLKLMSTVDPKLNHVAAGLVSPSLKSDTSSKEIEEAMKRVREAQSLISAAIEPDKKEEKRRHSRSRSRSRRRRTPSSSRHRRSRSRSRRRSHSKSRSRRRSKSPRRRRSHSRERGRRSRSTSKTRDKKKEDKEKKRSKTPPKSYSTARRSRSASRERRRRRSRSGTRSPKKPRSPKRKLSRSPSPRRHKKEKKKDKDKERSRDERERSTSKKKKSKDKEKDRERKSESDKDVKQVTRDYDEEEQGYDSEKEKKEEKKPIETGSPKTKECSVEKGTGDSLRESKVNGDDHHEEDMDMSD

SEQ ID NO: 63083 - protein, 483 aa, Homo sapiens
MSNTTVVPSTAGPGPSGGPGGGGGGGGGGGGTEVIQVTNVSPSASSEQMRTLFGFLGKIDELRLFPPDDSPLPVSSRVCFVKFHDPDSAVVAQHLTNTVFVDRALIVVPYAEGVIPDEAKALSLLAPANAVAGLLPGGGLLPTPNPLTQIGAVPLAALGAPTLDPALAALGLPGANLNSQSLAADQLLKLMSTVDPKLNHVAAGLVSPSLKSDTSSKEIEEAMKRVREAQSLISAAIEPDKKEEKRRHSRSRSRSRRRRTPSSSRHRRSRSRSRRRSHSKSRSRRRSKSPRRRRSHSRERGRRSRSTSKTRDKKKEDKEKKRSKTPPKSYSTARRSRSASRERRRRRSRSGTRSPKKPRSPKRKLSRSPSPRRHKKEKKKDKDKERSRDERERSTSKKKKSKDKEKDRERKSESDKDVKVTRDYDEEEQGYDSEKEKKEEKKPIETGSPKTKECSVEKGTGDSLRESKVNGDDHHEEDMDMSD

SEQ ID NO: 63084 - protein, 389 aa, Homo sapiens [sequence omitted]

SEQ ID NO: 63085 - protein, 484 aa, Homo sapiens; identical to SEQ ID NO: 63082

SEQ ID NO: 63086 - protein, 128 aa, Homo sapiens
MSNTTVVPSTAGPGPSGGPGGGGGGGGGGGGTEVIQVTNVSPSASSEQMRTLFGFLGKIDELRLFPPDDSPLPVSSRVCFVKFHDPDSAVVAQHLTNTVFVDRALIVVPYAEVKQPTRVVVHKTAFES

SEQ ID NO: 63087 - protein, 131 aa, Homo sapiens
MSNTTVVPSTAGPGPSGGPGGGGGGGGGGGGTEVIQVTNVSPSASSEQMRTLFGFLGKIDELRLFPPDDSPLPVSSRVCFVKFHDPDSAVVAQHLTNTVFVDRALIVVPYAEVFHGSIKAAVKKILLTHEN

SEQ ID NO: 63088 - protein, 209 aa, Homo sapiens
MTSLKVDNLTYRTSPDTLRRVFEKYGRVGDVYIPRDRYTKESRGFAFVRFHDKRDAEDAMDAMDGAVLDGRELRVQMARYGRPPDSHHSRRGPPPRRYGGGGYGRRSRSPRRRRRSRSRSRSRSRSRSRSRYSRSKSRSRTRSRSRSTSKSRSARRSKSKSSSVSRSRSRSRSRSRSRSPPPVSKRESKSRSRSKSPPKSPEEEGAVSS

SEQ ID NO: 63089 - protein, 201 aa, Homo sapiens
MSYGRPPPDVEGMTSLKVDNLTYRTSPDTLRRVFEKYGRVGDVYIPRDRYTKESRGFAFVRFHDKRDAEDAMDAMDGAVLDGRELRVQMARCGGYGRRSRSPRRRRRSRSRSRSRSRSRSRSRYSRSKSRSRTRSRSRSTSKSRSARRSKSKSSSVSRSRSRSRSRSRSRSPPPVSKRESKSRSRSKSPPKSPEEEGAVSS

SEQ ID NO: 63090 - protein, 221 aa, Homo sapiens
MSYGRPPPDVEGMTSLKVDNLTYRTSPDTLRRVFEKYGRVGDVYIPRDRYTKESRGFAFVRFHDKRDAEDAMDAMDGAVLDGRELRVQMARYGRPPDSHHSRRGPPPRRYGGGGYGRRSRSPRRRRRSRSRSRSRSRSRSRSRYSRSKSRSRTRSRSRSTSKSRSARRSKSKSSSVSRSRSRSRSRSRSRSPPPVSKRESKSRSRSKSPPKSPEEEGAVSS

SEQ ID NO: 63091 - protein, 179 aa, Homo sapiens
MSYGRPPPDVEGMTSLKVDNLTYRTSPDTLRRVFEKYGRVGDVYIPRDRYTKESRGFAFVRFHDKRDAEDAMDAMDGADPGVGVVPGLAADLATAARSLGPALVLDLGRPPSPDPHEGPSPSPRRSPDLVRGPGPGLGPGVLPQCPRGNPNPGRDRRVPPSLLKRKERCPLKKMLRSPV

SEQ ID NO: 63092 - protein, 222 aa, Homo sapiens
PERRGVAPPRAEEAGASSRGSGPPLRAMSYGRPPPDVEGMTSLKVDNLTYRTSPDTLRRVFEKYGRVGDVYIPRDRYTKESRGFAFVRFHDKRDAEDAMDAMDGAVLDGRELRVQMARYGRPPDSHHSRRGPPPRRYGGGGYGRRSRSPRRRRRSRSRSRSRSRSRSRSRYSRSKSRSRTRSRSRSTSKSRSARRSKSKSSSVSRSRSRSRSRSRSRSPPPV

SEQ ID NO: 63093 - protein, 124 aa, Homo sapiens
MHRDSCPLDCKVYVGNLGNNGNKTELERAFGYYGPLRSVWVARNPPGFAFVEFEDPRDAADAVRELDGRTLCGCRVRVELSNGEKRSRNRGPPPSWGRRPRDDYRRRSPPPRRRVTIMSLLTTL

SEQ ID NO: 63094 - protein, 164 aa, Homo sapiens
MHRDSCPLDCKVYVGNLGNNGNKTELERAFGYYGPLRSVWVARNPPGFAFVEFEDPRDAADAVRELDGRTLCGCRVRVELSNGEKRSRNRGPPPSWGRRPRDDYRRRSPPPRRRSPRRRSFSRSRSRSLSRDRRRERSLSRERNHKPSRSFSRSRSRSRSNERK

SEQ ID NO: 63095 - protein, 494 aa, Homo sapiens
MPRVYIGRLSYQARERDVERFFKGYGKILEVDLKNGYGFVEFDDLRDADDAVYELNGKDLCGERVIVEHARGPRRDGSYGSGRSGYGYRRSGRDKYGPPTRTEYRLIVENLSSRCSWQDLKDYMRQAGEVTYADAHKGRKNEGVIEFVSYSDMKRALEKLDGTEVNGRKIRLVEDKPGSRRRRSYSRSRSHSRSRSRSRHSRKSRSRSGSSKSSHSKSRSRSRSGSRSRSKSRSRSQSRSRSKKEKSRSPSKEKSRSRSHSAGKSRSKSKDQAEEKIQNNDNVGKPKSRSPSRHKSKSKSRSRSQERRVEEEKRGSVSRGRSQEKSLRQSRSRSRSKGGSRSRSRSRSKSKDKRKGRKRSREESRSRSRSRSKSERSRKRGSKRDSKAGSSKKKKKEDTDRSQSRSPSRSVSKEREHAKSESSQREGRGESENAGTNQETRSRSRSNSKSKPNLPSESRSRSKSASKTRSRSKSRSRSASRSPSRSRSRSHSRS

SEQ ID NO: 63096 - protein, 406 aa, Homo sapiens
MPRVYIGRLSYQARERDVERFFKGYGKILEVDLKNGYGFVEFDDLRDADDAVYELNGKDLCGERVIVEHARGPRRDGSYGSGRSGYGYRRSGRDKYGPPTRTEYRLIVENLSSRCSWQDLKDYMRQAGEVTYADAHKGRKNEGVIEFVSYSDMKRALEKLDGTEVNGRKIRLVEDKPGSRRRRSYSRSRSHSRSRSRSRHSRKSRSRSGSSKSSHSKSRSRSRSGSRSRSKSRSRSQSRSRSKKEKSRSPSKEKSRSRSHSAGKSRSKSKDQAEEKIQNNDNVGKPKSRSPSRHKSKSKSRSRSQERRVEEEKRGSVSRGRSQEKSLRQSRSRSRSKGGSRSRSRSRSKSKDKRKGRKRSREESRSRSRSRSKSERSRKRGSLAFRPGLSYRELSNLDGSKAGMTT

SEQ ID NO: 63097 - protein, 158 aa, Homo sapiens
MPRVYIGRLSYQARERDVERFFKGYGKILEVDLKNGYGFVEFDDLRDADDAVYELNGKDLCGERVIVEHARGPRRDGSYGSGRSGYGYRRSGRDKYGPPTRTEYRLIVENLSSRCSWQDLKVGLPLPEQEPEPEPESEPEQEREKQEPQQGKEPQPQP

SEQ ID NO: 63098 - protein, 272 aa, Homo sapiens
MSGCRVFIGRLNPAAREKDVERFFKGYGRIRDIDLKRGFGFVEFEDPRDADDAVYELDGKELCSERVTIEHARARSRGGRGRGRYSDRFSSRRPRNDRRNAPPVRTENRLIVENLSSRVSWQDLKDFMRQAGEVTFADAHRPKLNEGVVEFASYGDLKNAIEKLSGKEINGRKIKLIEGSKRHSRSRSRSRSRTRSSSRSRSRSRSRSRKSYSRSRSRSRSRSRSKSRSVSRSPVPEKSQKRGSSSRSKSPASVDRQRSRSRSRSRSVDSGN

SEQ ID NO: 63099 - protein, 138 aa, Homo sapiens
MSGCRVFIGRLNPAAREKDVERFFKGYGRIRDIDLKRGFGFVEFEDPRDADDAVYELDGKELCSERVTIEHARARSRGGRGRGRYSDRFSSRRPRNDRRNAPPVRTENRLIVENLSSRVSWQPVCVVGLMTRSACGLS

SEQ ID NO: 63100 - protein, 272 aa, Homo sapiens; identical to SEQ ID NO: 63098

SEQ ID NO: 63101 - protein, 272 aa, Homo sapiens; identical to SEQ ID NO: 63098

SEQ ID NO: 63102 - protein, 344 aa, Homo sapiens
MPRVYIGRLSYNVREKDIQRFFSGYGRLLEVDLKNGYGFVEFEDSRDADDAVYELNGKELCGERVIVEHARGPRRDRDGYSYGSRSGGGGYSSRRTSGRDKYGPPVRTEYRLIVENLSSRCSWQDLKDFMRQAGEVTYADAHKERTNEGVIEFRSYSDMKRALDKLDGTEINGRNIRLIEDKPRTSHRRSYSGSRSRSRSRRRSRSRSRRSSRSRSRSISKSRSRSRSRSKGRSRSRSKGRKSRSKSKSKPKSDRGSHSHSRSRSKDEYEKSRSRSRSRSPKENGKGDIKSKSRSRSQSRSNSPLPVPPSKARSVSPPPKRATSRSRSRSRSKSRSRSRSSSRD

SEQ ID NO: 63103 - protein, 238 aa, Homo sapiens
MSRYGRYGGETKVYVGNLGTGAGKGELERAFSYYGPLRTVWIARNPPGFAFVEFEDPRDAEDAVRGLDGKVICGSRVRVELSTGMPRRSRFDRPPARRPFDPNDRCYECGEKGHYAYDCHRYSRRRRSRSRSRSHSRSRGRRYSRSRSRSRGRRSRSASPRRSRSISLRRSRSASLRRSRSGSIKGSRYFQSPSRSRSRSRSISRPRSSRSKSRSPSPKRSRSPSGSPRRSASPERMD

SEQ ID NO: 63104 - protein, 226 aa, Homo sapiens
MSRYGRYGGETKVYVGNLGTGAGKGELERAFSYYGPLRTVWIARNPPGFAFVEFEDPRDAEDAVRGLDGKVICGSRVRVELSTGMPRRSRFDRPPARRPFDPNDRCYECGEKGHYAYDCHRYSRRRRSRSRSRSHSRSRGRRYSRSRSRSRGRRSRSASPRRSRSISLRRSRSASLRRSRSGSIKGSRYFQSPSRSRSRSRSISRPRSSRSPSGSPRRSASPERMD

SEQ ID NO: 63105 - protein, 221 aa, Homo sapiens
MSGWADERGGEGDGRIYVGNLPTDVREKDLEDLFYKYGRIREIELKNRHGLVPFAFVRFEDPRDAEDAIYGRNGYDYGQCRLRVEFPRTYGGRGGWPRGGRNGPPTRRSDFRVLVSGLPPSGSWQDLKDHMREAGDVCYADVQKDGVGMVEYLRKEDMEYALRKLDDTKFRSHEGETSYIRVYPERSTSYGYSRSRSGSRGRDSPYQSRGSPHYFSPFRPY

SEQ ID NO: 63106 - protein, 968 aa, Homo sapiens
MAFANFRRILRLSTFEKRKSREYEHVRRDLDPNEVWEIVGELGDGAFGKVYKAKNKETGALAAAKVIETKSEEELEDYIVEIEILATCDHPYIVKLLGAYYHDGKLWIMIEFCPGGAVDAIMLELDRGLTEPQIQVVCRQMLEALNFLHSKRIIHRDLKAGNVLMTLEGDIRLADFGVSAKNLKTLQKRDSFIGTPYWMAPEVVMCETMKDTPYDYKADIWSLGITLIEMAQIEPPHHELNPMRVLLKIAKSDPPTLLTPSKWSVEFRDFLKIALDKNPETRPSAAQLLEHPFVSSITSNKALRELVAEAKAEVMEEIEDGRDEGEEEDAVDAASTLENHTQNSSEVSPPSLNADKPLEESPSTPLAPSQSQDSVNEPCSQPSGDRSLQTTSPPVVAPGNENGLAVPVPLRKSRPVSMDARIQVAQEKQVAEQGGDLSPAANRSQKASQSRPNSSALETLGGEKLANGSLEPPAQAAPGPSKRDSDCSSLCTSESMDYGTNLSTDLSLNKEMGSLSIKDPKLYKKTLKRTRKFVVDGVEVSITTSKIISEDEKKDEEMRFLRRQELRELRLLQKEEHRNQTQLSNKHELQLEQMHKRFEQEINAKKKFFDTELENLERQQKQQVEKMEQDHAVRRREEARRIRLEQDRDYTRFQEQLKLMKKEVKNEVEKLPRQQRKESMKQKMEEHTQKKQLLDRDFVAKQKEDLELAMKRLTTDNRREICDKERECLMKKQELLRDREAALWEMEEHQLQERHQLVKQQLKDQYFLQRHELLRKHEKEREQMQRYNQRMIEQLKVRQQQEKARLPKIQRSEGKTRMAMYKKSLHINGGGSAAEQREKIKQFSQQEEKRQKSERLQQQQKHENQMRDMLAQCESNMSELQQLQNEKCHLLVEHETQKLKALDESHNQNLKEWRDKLRPRKKALEEDLNQKKREQEMFFKLSEEAECPNPSTPSKAAKFFPYSSADAS

SEQ ID NO: 63107 - protein, 968 aa, Homo sapiens; identical to SEQ ID NO: 63106

SEQ ID NO: 63108 - protein, 1099 aa, Homo sapiens
RFGSAPQRPVAMTTAQRDSLLWKLAGLLRESGDVVLSGCSTLSLLTPTLQQLNHVFELHLGPWGPGQTGFVALPSHPADSPVILQLQFLFDVLQKTLSLKLVHVAGPGPTGPIKIFPFKSLRHLELRGVPLHCLHGLRGIYSQLETLICSRSLQALEELLSACGGDFCSALPWLALLSANFSYNALTALDSSLRLLSALRFLNLSHNQVQDCQGFLMDLCELHHLDISYNRLHLVPRMGPSGAALGVLILRGNELRSLHGLEQLRNLRHLDLAYNLLEGHRELSPLWLLAELRKLYLEGNPLWFHPEHRAATAQYLSPRARDAATGFLLDGKVLSLTDFQTHTSLGLSPMGPPLPWPVGSTPETSGGPDLSDSLSSGGVVTQPLLHKVKSRVRVRRASISEPSDTDPEPRTLNPSPAGWFVQQHPELELMSSFRERFGRNWLQYRSHLEPSGNPLPATPTTSAPSAPPASSQGPDTAPRPSPPQEEARGPQESPQKMSEEVRAEPQEEEEEKEGKEEKEEGEMVEQGEEEAGEEEEEEQDQKEVEAELCRPLLVCPLEGPEGVRGRECFLRVTSAHLFEVELQAARTLERLELQSLEAAEIEPEAQAQRSPRPTGSDLLPGAPILSLRFSYICPDRQLRRYLVLEPDAHAAVQELLAVLTPVTNVAREQLGEARDLLLGRFQCLRCGHEFKPEEPRMGLDSEEGWRPLFQKTESPAVCPNCGSDHVVLLAVSRGTPNRERKQGEQSLAPSPSASPVCHPPGHGDHLDRAKNSPPQAPSTRDHGSWSLSPPPERCGLRSVDHRLRLFLDVEVFSDAQEEFQCCLKVPVALAGHTGEFMCLVVVSDRRLYLLKVTGEMREPPASWLQLTLAVPLQDLSGIELGLAGQSLRLEWAAGAGRCVLLPRDARHCRAFLEELLDVLQSLPPAWRNCVSATEEEVTPQHRLWPLLEKDSSLEARQFFYLRAFLVEGPSTCLVSLLLTPSTLFLLDEDAAGSPAEPSPPAASGEASEKVPPSGPGPAVRVREQQPLSSLSSVLLYRSAPEDLRLLFYDEVSRLESFWALRVVCQEQLTALLAWIREPWEELFSIGLRTVIQEALALDR

SEQ ID NO: 63109 - protein, 645 aa, Homo sapiens
RFGSAPQRPVAMTTAQRDSLLWKLAGLLRESGDVVLSGCSTLSLLTPTLQQLNHVFELHLGPWGPGQTGFVALPSHPADSPVILQLQFLFDVLQKTLSLKLVHVAGPGPTGPIKIFPFKSLRHLELRGVPLHCLHGLRGIYSQLETLICSRSLQALEELLSACGGDFCSALPWLALLSANFSYNALTALDSSLRLLSALRFLNLSHNQVQDCQGFLMDLCELHHLDISYNRLHLVPRMGPSGAALGVLILRGNELRSLHGLEQLRNLRHLDLAYNLLEGHRELSPLWLLAELRKFLLDGKVLSLTDFQTHTSLGLSPMGPPLPWPVGSTPETSGGPDLSDSLSSGGVVTQPLLHKVKSRVRVRRASISEPSDTDPEPRTLNPSPAGWFVQQHPELELMSSFRERFGRNWLQYRSHLEPSGNPLPATPTTSAPSAPPASSQGPDTAPRPSPPQEEARGPQESPQKMSEEVRAEPQEEEEEKEGKEEKEEGEMVEQGEEEAGEEEEEEQDQKEVEAELCRPLLVCPLEGPEGVRGRECFLRVTSAHLFEVELQAARTLERLELQSLEAAEIEPEAQAQRSPRPTGSDLLPGAPILSLRFSYICPDRQLRRYLVLEPDAHAAVQVMAPRVGAQEAVGIKRARGKWQQA

SEQ ID NO: 63110 - protein, 364 aa, Homo sapiens
MQKWFSAFDDAIIQRQWRANPSRGGGGVSFTKEVDTNVATGAPPRRQRVPGRACPWREPIRGRRGARPGGGDAGGTPGETVRHCSAPEDPIFRFSSLHSYPFPGTIKSRDMSWKRHHLIPETFGVKRRRKRGPVESDPLRGEPGSARAAVSELMQLFPRGLFEDALPPIVLRSQVYSLVPDRTVADRQLKELQEQGEIRIVQLGFDLDAHGIIFTEDYRTRVLKACDGRPYAGAVQKFLASVLPACGDLSFQQDQMTQTFGFRDSEITHLVNAGVLTVRDAGSWWLAVPGAGRFIKYFVKGRQAVLSMVRKAKYRELLLSELLGRRAPVVVRLGLTYHVHDLIGAQLVDCISTTSGTLLRLPET

SEQ ID NO: 63111 - protein, 368 aa, Homo sapiens
MQKWFSAFDDAIIQRQWRANPSRGGGGVSFTKEVDTNVATGAPPRRQRVPGRACPWREPIRGRRGARPGGGDAGGTPGETVRHCSAPEDPIFRFSSLHSYPFPGTIKSRDMSWKRHHLIPETFGVKRRRKRGPVESDPLRGEPGSARAAVSELMQLFPRGLFEDALPPIVLRSQVYSLVPDRTVADRQLKELQEQGEIRIVQLGFDLDAHGIIFTEDYRTRVCDCVLKACDGRPYAGAVQKFLASVLPACGDLSFQQDQMTQTFGFRDSEITHLVNAGVLTVRDAGSWWLAVPGAGRFIKYFVKGRQAVLSMVRKAKYRELLLSELLGRRAPVVVRLGLTYHVHDLIGAQLVDCISTTSGTLLRLPET

SEQ ID NO: 63112 - protein, 368 aa, Homo sapiens [sequence omitted]

SEQ ID NO: 63113 - protein, 364 aa, Homo sapiens
MQKWFSAFDDAIIQRQWRANPSRGGGGVSFTKEVDTNVATGAPPRRQRVPGRACPWREPIRGRRGARPGGGDAGGTPGETVRHCSAPEDPIFRFSSLHSYPFPGTIKSRDMSWKRHHLIPETFGVKRRRKRGPVESDPLRGEPGSARAAVSELMQLFPRGLFEDALPPIVLRSQVYSLVPDRTVADRQLKELQEQGEIRIVQLGFDLDAHGIIFTEDYRTRVLKACDGRPYAGAVQKFLASVLPACGDLSFQQDQMTQTFGFRDSEITHLVNAGVLTVRDAGSWWLAVPGAGRFIKYFVKGRQAVLGMVRKAKYRELLLSELLGRRAPVVVRLGLTYHVHDLIGAQLVDCISTTSGTLLRLPET

SEQ ID NO: 63114 - protein, 364 aa, Homo sapiens; identical to SEQ ID NO: 63110

SEQ ID NO: 63115 - protein, 364 aa, Homo sapiens; identical to SEQ ID NO: 63110

SEQ ID NO: 63116 - protein, 364 aa, Homo sapiens; identical to SEQ ID NO: 63110

SEQ ID NO: 63117 - protein, 368 aa, Homo sapiens; identical to SEQ ID NO: 63111

SEQ ID NO: 63118 - protein, 368 aa, Homo sapiens; identical to SEQ ID NO: 63111

SEQ ID NO: 63119 - protein, 368 aa, Homo sapiens; identical to SEQ ID NO: 63111

SEQ ID NO: 63120 - protein, 364 aa, Homo sapiens; identical to SEQ ID NO: 63110

SEQ ID NO: 63121 - protein, 368 aa, Homo sapiens; identical to SEQ ID NO: 63111

SEQ ID NO: 63122 - protein, 112 aa, Homo sapiens
MQKWFSAFDDAIIQRQWRANPSRGGGGVSFTKEVDTNVATGAPPRRQRVPGRACPWREPIRGRRGARPGGGDAGGTPGETVRHCSAPEDPIFRFSSLHSYPFPGTIKSRDMS

SEQ ID NO: 63123 - protein, 321 aa, Homo sapiens
MLVCASPPPLPALTGLRDDKLTLLSSSPGLGGTPGETVRHCSAPEDPIFRFSSLHSYPFPGTIKSRDMSWKRHHLIPETFGVKRRRKRGPVESDPLRGEPGSARAAVSELMQLFPRGLFEDALPPIVLRSQVYSLVPDRTVADRQLKELQEQGEIRIVQLGFDLDAHGIIFTEDYRTRVLKACDGRPYAGAVQKFLASVLPACGDLSFQQDQMTQTFGFRDSEITHLVNAGVLTVRDAGSWWLAVPGAGRFIKYFVKGRQAVLGMVRKAKYRELLLSELLGRRAPVVVRLGLTYHVHDLIGAQLVDCISTTSGTLLRLPET

SEQ ID NO: 63124 - protein, 321 aa, Homo sapiens
MLVCASPPPLPALTGLRDDKLTLLSSSPGLGGTPGETVRHCSAPEDPIFRFSSLHSYPFPGTIKSRDMSWKRHHLIPETFGVKRRRKRGPVESDPLRGEPGSARAAVSELMQLFPRGLFEDALPPIVLRSQVYSLVPDRTVADRQLKELQEQGEIRIVQLGFDLDAHGIIFTEDYRTRVLKACDGRPYAGAVQKFLASVLPACGDLSFQQDQMTQTFGFRDSEITHLVNAGVLTVRDAGSWWLAVPGAGRFIKYFVKGRQAVLSMVRKAKYRELLLSELLGRRAPVVVRLGLTYHVHDLIGAQLVDCISTTSGTLLRLPET

SEQ ID NO: 63125 - protein, 321 aa, Homo sapiens; identical to SEQ ID NO: 63124

SEQ ID NO: 63126 - protein, 321 aa, Homo sapiens; identical to SEQ ID NO: 63124

SEQ ID NO: 63127 - protein, 321 aa, Homo sapiens; identical to SEQ ID NO: 63124

SEQ ID NO: 63128 - protein, 439 aa, Homo sapiens
MQNLKADPEELFTKLEKIGKGSFGEVFKGIDNRTQKVVAIKIIDLEEAEDEIEDIQQEITVLSQCDSPYVTKYYGSYLKDTKLWIIMEYLGGGSALDLLEPGPLDETQIATILREILKGLDYLHSEKKIHRDIKAANVLLSEHGEVKLADFGVAGQLTDTQIKRNTFVGTPFWMAPEVIKQSAYDSKADIWSLGITAIELARGEPPHSELHPMKVLFLIPKNNPPTLEGNYSKPLKEFVEACLNKEPSFRPTAKELLKHKFILRNAKKTSYLTELIDRYKRWKAEQSHDDSSSEDSDAETDGQASGGSDSGDWIFTIREKDPKNLENGALQPSDLDRNKMKDIPKRPFSQCLSTIISPLFAELKEKSQACGGNLGSIEELRGAIYLAEEACPGISDTMVAQLVQRLQRSIHGNQAPPDCHLAQVQAFGGSGCVLGSRSV

SEQ ID NO: 63129 - protein, 223 aa, Homo sapiens
MAPEVIKQSAYDSKADIWSLGITAIELARGEPPHSELHPMKVLFLIPKNNPPTLEGNYSKPLKEFVEACLNKEPSFRPTAKELLKHKFILRNAKKTSYLTELIDRYKRWKAEQSHDDSSSEDSDAETDGQASGGSDSGDWIFTIREKDPKNLENGALQPSDLDRNKLKEKSQACGGNLGSIEELRGAIYLAEEACPGISDTMVAQLVQRLQRYSLSGGGTSSH

SEQ ID NO: 63130 - protein, 443 aa, Homo sapiens
MDSRAQLWGLALNKRRATLPHPGGSTNLKADPEELFTKLEKIGKGSFGEVFKGIDNRTQKVVAIKIIDLEEAEDEIEDIQQEITVLSQCDSPYVTKYYGSYLKDTKLWIIMEYLGGGSALDLLEPGPLDETQIATILREILKGLDYLHSEKKIHRDIKAANVLLSEHGEVKLADFGVAGQLTDTQIKRNTFVGTPFWMAPEVIKQSAYDSKADIWSLGITAIELARGEPPHSELHPMKVLFLIPKNNPPTLEGNYSKPLKEFVEACLNKEPSFRPTAKELLKHKFILRNAKKTSYLTELIDRYKRWKAEQSHDDSSSEDSDAETDGQASGGSDSGDWIFTIREKDPKNLENGALQPSDLDRNKMKDIPKRPFSQCLSTIISPLFAELKEKSQACGGNLGSIEELRGAIYLAEEACPGISDTMVAQLVQRLQRYSLSGGGTSSH

SEQ ID NO: 63131 - protein, 431 aa, Homo sapiens
MAHSPVQSGLPGMQNLKADPEELFTKLEKIGKGSFGEVFKGIDNRTQKVVAIKIIDLEEAEDEIEDIQQEITVLSQCDSPYVTKYYGSYLKDTKLWIIMEYLGGGSALDLLEPGPLDETQIATILREILKGLDYLHSEKKIHRDIKAANVLLSEHGEVKLADFGVAGQLTDTQIKRNTFVGTPFWMAPEVIKQSAYDSKADIWSLGITAIELARGEPPHSELHPMKVLFLIPKNNPPTLEGNYSKPLKEFVEACLNKEPSFRPTAKELLKHKFILRNAKKTSYLTELIDRYKRWKAEQSHDDSSSEDSDAETDGQASGGSDSGDWIFTIREKDPKNLENGALQPSDLDRNKMKDIPKRPFSQCLSTIISPLFAELKEKSQACGGNLGSIEELRGAIYLAEEACPGISDTMVAQLVQRLQRYSLSGGGTSSH

SEQ ID NO: 63132 - protein, 412 aa, Homo sapiens
MAHSPVQSGLPGMQNLKADPEELFTKLEKIGKGSFGEVFKGIDNRTQKVVAIKIIDLEEAEDEIEDIQQEITVLSQCDSPYVTKYYGSYLKLEPGPLDETQIATILREILKGLDYLHSEKKIHRDIKAANVLLSEHGEVKLADFGVAGQLTDTQIKRNTFVGTPFWMAPEVIKQSAYDSKADIWSLGITAIELARGEPPHSELHPMKVLFLIPKNNPPTLEGNYSKPLKEFVEACLNKEPSFRPTAKELLKHKFILRNAKKTSYLTELIDRYKRWKAEQSHDDSSSEDSDAETDGQASGGSDSGDWIFTIREKDPKNLENGALQPSDLDRNKMKDIPKRPFSQCLSTIISPLFAELKEKSQACGGNLGSIEELRGAIYLAEEACPGISDTMVAQLVQRLQRYSLSGGGTSSH

SEQ ID NO: 63133 - protein, 342 aa, Homo sapiens
MAHSPVQSGLPGMQNLKADPEELFTKLEKIGKGSFGEVFKGIDNRTQKVVAIKIIDLEEAEDEIEDIQQEITVLSQCDSPYVTKYYGSYLKDTKLWIIMEYLGGGSALDLLEPGPLDETQIATILREILKGLDYLHSEKKIHRDIKAANVLLSEHGEVKLADFGVAGQLTDTQIKRNTFVGTPFWMAPEVIKQSAYDSKADIWSLGITAIELARGEPPHSELHPMKVLFLIPKNNPPTLEGNYSKPLKEFVEACLNKEPSFRPTAKELLKHKFILRNAKKTSYLTELIDRYKRWKAEQSHDDSSSEDSDAETDGQASGGSDSGDWIFTIREWSSSAIGLGQK

SEQ ID NO: 63134 - protein, 996 aa, Homo sapiens
MDEDTHYDKVEDVVGSHIEDAVTFWAQSINRNKDIMKIGCSLSEVCPQASSVLGNLDPNKIYGGLFSEDQCWYRCKVLKIISVEKCLVRYIDYGNTEILNRSDIVEIPLELQFSSVAKKYKLWGLHIPSDQEVTQFDQGTTFLGSLIFEKEIKMRIKATSEDGTVIAQAEYGSVDIGEEVLKKGFAEKCRLASRTDICEEKKLDPGQLVLRNLKSPIPLWGHRSNQSTFSRPKGHLSEKMTLDLKDENDAGNLITFPKESLAVGDFNLGSNVSLEKIKQDQKLIEENEKLKTEKDALLESYKALELKVEQIAQELQQEKAAAVDLTNHLEYTLKTYIDTRMKNLAAKMEILKEMRHVDISVRFGKDLSDAIQVLDEGCFTTPASLNGLEIIWAEYSLAQENIKTCEYVSEGNILIAQRNEMQQKLYMSVEDFILEVDESSLNKRLKTLQDLSVSLEAVYGQAKEGANSDEILKKFYDWKCDKREEFTSVRSETDASLHRLVAWFQRTLKVFDLSVEGSLISEDAMDNIDEILEKTESSVCKELEIALVDQGDADKEIISNTYSQVLQKIHSEERLIATVQAKYKDSIEFKKQLIEYLNKSPSVDHLLSIKKTLKSLKALLRWKLVEKSNLEESDDPDGSQIEKIKEEITQLRNNVFQEIYHEREEYEMLTSLAQKWFPELPLLHPEIGLLKYMNSGGLLTMSLERDLLDAEPMKELSSKRPLVRSEVNGQIILLKGYSVDVDTEAKVIERAATYHRAWREAEGDSGLLPLIFLFLCKSDPMAYLMVPYYPRANLNAVQANMPLNSEETLKVMKGVAQGLHTLHKADIIHGSLHQNNVFALNREQGIVGDFDFTKSVSQRASVNMMVGDLSLMSPELKMGKPASPGSDLYAYGCLLLWLSVQNQEFEINKDGIPKVDQFHLDDKVKSLLCSLICYRSSMTAEQVLNAECFLMPKEQSVPNPEKDTEYTLYKKEEEIKTENLDKCMEKTRNGEANFDC

SEQ ID NO: 63135 - protein, 1019 aa, Homo sapiens
MWVQGHSSRASATESVSFSGIVQMDEDTHYDKVEDVVGSHIEDAVTFWAQSINRNKDIMKIGCSLSEVCPQASSVLGNLDPNKIYGGLFSEDQCWYRCKVLKIISVEKCLVRYIDYGNTEILNRSDIVEIPLELQFSSVAKKYKLWGLHIPSDQEVTQFDQGTTFLGSLIFEKEIKMRIKATSEDGTVIAQAEYGSVDIGEEVLKKGFAEKCRLASRTDICEEKKLDPGQLVLRNLKSPIPLWGHRSNQSTFSRPKGHLSEKMTLDLKDENDAGNLITFPKESLAVGDFNLGSNVSLEKIKQDQKLIEENEKLKTEKDALLESYKALELKVEQIAQELQQEKAAAVDLTNHLEYTLKTYIDTRMKNLAAKMEILKEMRHVDISVRFGKDLSDAIQVLDEGCFTTPASLNGLEIIWAEYSLAQENIKTCEYVSEGNILIAQRNEMQQKLYMSVEDFILEVDESSLNKRLKTLQDLSVSLEAVYGQAKEGANSDEILKKFYDWKCDKREEFTSVRSETDASLHRLVAWFQRTLKVFDLSVEGSLISEDAMDNIDEILEKTESSVCKELEIALVDQGDADKEIISNTYSQVLQKIHSEERLIATVQAKYKDSIEFKKQLIEYLNKSPSVDHLLSIKKTLKSLKALLRWKLVEKSNLEESDDPDGSQIEKIKEEITQLRNNVFQEIYHEREEYEMLTSLAQKWFPELPLLHPEIGLLKYMNSGGLLTMSLERDLLDAEPMKELSSKRPLVRSEVNGQIILLKGYSVDVDTEAKVIERAATYHRAWREAEGDSGLLPLIFLFLCKSDPMAYLMVPYYPRANLNAVQANMPLNSEETLKVMKGVAQGLHTLHKADIIHGSLHQNNVFALNREQGIVGDFDFTKSVSQRASVNMMVGDLSLMSPELKMGKPASPGSDLYAYGCLLLWLSVQNQEFEINKDGIPKVDQFHLDDKVKSLLCSLICYRSSMTAEQVLNAECFLMPKEQSVPNPEKDTEYTLYKKEEEIKTENLDKCMEKTRNGEANFDC

SEQ ID NO: 63136 - protein, 996 aa, Homo sapiens; identical to SEQ ID NO: 63134

SEQ ID NO: 63137 - protein, 94 aa, Homo sapiens
MDEDTHYDKVEDVVGSHIEDAVTFWAQSINRNKDIMKIGCSLSEVCPQASSVLGNLDPNKIYGGLFSEDQCWYRCKVLKIISVEKCLVRYIDYG

SEQ ID NO: 63138 - protein, 43 aa, Homo sapiens
MDEDTHYDKVEDVVGSHIEDAVTFWAQSINRNKDIMKIGCSLS

SEQ ID NO: 63139 - protein, 996 aa, Homo sapiens
MWVQGHSSRASATESVSFSGIVQMDEDTHYDKVEDVVGSHIEDAVTFWAQSINRNKDIMKIGCSLSEVCPQASSVLGNLDPNKIYGGLFSEDQCWYRCKVLKIISVEKCLVRYIDYGNTEILNRSDIVEIPLELQFSSVAKKYKLWGLHIPSDQEVTQFDQGTTFLGSLIFEKEIKMRIKATSEDGTVIAQAEYGSVDIGEEVLKKGFAEKCRLASRTDICEEKKLDPGQLVLRNLKSPIPLWGHRSNQSTFSRPKGHLSEKMTLDLKDENDAGNLITFPKESLAVGDFNLGSNVSLEKIKQDQKLIEENEKLKTEKDALLESYKALELKVEQIAQELQQEKAAAVDLTNHLEYTLKTYIDTRMKNLAAKMEILKEMRHVDISVRFGKDLSDAIQVLDEGCFTTPASLNGLEIIWAEYSLAQENIKTCEYVSEGNILIAQRNEMQQKLYMSVEDFILEVDESSLNKRLKTLQDLSVSLEAVYGQAKEGANSDEILKKFYDWKCDKREEFTSVRSETDASLHRLVAWFQRTLKVFDLSVEGSLISEDAMDNIDEILEKTESSVCKELEIALVDQGDADKEIISNTYSQVLQKIHSEERLIATVQAKYKDSIEFKKQLIEYLNKSPSVDHLLSIKKTLKSLKALLRWKLVEKSNLEESDDPDGSQIEKIKEEITQLRNNVFQEIYHEREEYEMLTSLAQKWFPELPLLHPEIGLLKYMNSGGLLTMSLERDLLDAEPMKELSSKRPLVRSEVNGQIILLKGYSVDVDTEAKVIERAATYHRAWREAEGDSGLLPLIFLFLCKSDPMAYLMVPYYPRANLNAVQANMPLNSEETLKVMKGVAQGLHTLHKADIIHGSLHQNNVFALNREQGIVGDFDFTKSVSQRASVNMMVGDLSLMSPELKMGKPASPGSDLYAYGCLLLWDDKVKSLLCSLICYRSSMTAEQVLNAECFLMPKEQSVPNPEKDTEYTLYKKEEEIKTENLDKCMEKTRNGEANFDC

SEQ ID NO: 63140 - protein, 514 aa, Homo sapiens
MADSGLDKKSTKCPDCSSASQKDVLCVCSSKTRVPPVLVVEMSQTSSIGSAESLISLERKKEKNINRDITSRKDLPSRTSNVERKASQQQWGRGNFTEGKVPHIRIENGAAIEEIYTFGRILGKGSFGIVIEATDKETETKWAIKKVNKEKAGSSAVKLLEREVNILKSVKHEHIIHLEQVFETPKKMYLVMELCEDGELKEILDRKGHFSENETRWIIQSLASAIAYLHNNDIVHRDLKLENIMVKSSLIDDNNEINLNIKVTDFGLAVKKQSRSEAMLQATCGTPIYMAPEVISAHDYSQQCDIWSIGVVMYMLLRGEPPFLASSEEKLFELIRKGELHFENAVWNSISDCAKSVLKQLMKVDPAHRITAKELLDNQWLTGNKLSSVRPTNVLEMMKEWKNNPESVEENTTEEKNKPSTEEKLKSYQPWGNVPDANYTSDEEEEKQSTAYEKQFPATSKDNFDMCSSSFTSSKLLPAEIKGEMEKTPVTPSQGTATKYPAKSGALSRTKKKL

SEQ ID NO: 63141 - protein, 514 aa, Homo sapiens; identical to SEQ ID NO: 63140

SEQ ID NO: 63142 - protein, 448 aa, Homo sapiens
MADSGLDKKSTKCPDCSSASQKDVLCVCSSKTRVPPVLVVEMSQTSSIGSAESLISLERKKEKNINRDITSRKDLPSRTSNVERKASQQQWGRGNFTEGKVPHIRIENGAAIEEIYTFGRILGKGSFGIVIEATDKETETKWAIKKVNKEKAGSSAVKLLEREVNILKSVKHEHIIHLEQVFETPKKMYLVMELCEDGELKEILDRKGHFSENETRWIIQSLASAIAYLHNNDIVHRDLKLENIMVKSSLIDDNNEINLNIKVTDFGLAVKKQSRSEAMLQATCGTPIYMAPEVISAHDYSQQCDIWSIGVVMYMLLRGEPPFLASSEEKLFELIRKGELHFENAVWNSISDCAKSVLKQLMKVDPAHRITAKELLDNQWLTSTAYEKQFPATSKDNFDMCSSSFTSSKLLPAEIKGEMEKTPVTPSQGTATKYPAKSGALSRTKKKL

SEQ ID NO: 63143 - protein, 63 aa, Homo sapiens
MADSGLDKKSTKCPDCSSASQKDVLCVCSSKTRVPPVLVVEMSQTSSIGSAESLISLERKKEK

SEQ ID NO: 63144 - protein, 514 aa, Homo sapiens; identical to SEQ ID NO: 63140

SEQ ID NO: 63145 - protein, 37 aa, Homo sapiens
MADSGLDKKSTKCPDCSSASQKDVLCVCSSKTRVPPV

SEQ ID NO: 63146 - protein, 171 aa, Homo sapiens
MADSGLDKKSTKCPDCSSASQKDVLCVCSSKTRVPPVLVVEMSQTSSIGSAESLISLERKKEKNINRDITSRKDLPSRTSNVERKASQQQWGRGNFTEGKVPHIRIENGAAIEEIYTFGRILGKGSFGIVIEATDKETETKWAIKKVNKEKAGSSAVKLLEREVNILKSVK

SEQ ID NO: 63147 - protein, 29 aa, Homo sapiens
MADSGLDKKSTKCPDCSSASQKDVLCVCS

SEQ ID NO: 63148 - protein, 401 aa, Homo sapiens
METGKDGARRGTQSPERKRRSPVPRAPSTKLRPAAAARAMDPVAAEAPGEAFLARRRPEGGGGSARPRYSLLAEIGRGSYGVVYEAVAGRSGARVAVKKIRCDAPENVELALAEFWALTSLKRRHQNVVQFEECVLQRNGLAQRMSHGNKSSQLYLRLVETSLKGERILGYAEEPCYLWFVMEFCEGGDLNQYVLSRRPDPATNKSFMLQLTSAIAFLHKNHIVHRDLKPDNILITERSGTPILKVADFGLSKVCAGLAPRGKEGNQDNKNVNVNKYWLSSACGSDFYMAPEVWEGHYTAKADIFALGIIIWAMIERITFIDSETKKELLGTYIKQGTEIVPVGEALLENPKMELHIPQKRRTSMSEGIKQLLKDMLAANPQDRPDAFELETRMDQVTCAA

SEQ ID NO: 63149 - protein, 534 aa, Homo sapiens [sequence omitted]

SEQ ID NO: 63150 - protein, 162 aa, Homo sapiens
MDPVAAEAPGEAFLARRRPEGGGGSARPRYSLLAEIGRGSYGVVYEAVAGRSGARVAVKKIRCDAPENVELALAEFWALTSLKRRHQNVVQFEECVLQRNGLAQRMSHGNKSSQLYLRLVETSLKGRFLGTHSLTTSPPEDGRGYRWWPGRLAISRQLDPAM

SEQ ID NO: 63151 - protein, 1315 aa, Homo sapiens
MEKYHVLEMIGEGSFGRVYKGRRKYSAQVVALKFIPKLGRSEKELRNLQREIEIMRGLRHPNIVHMLDSFETDKEVVVVTDYAEGELFQILEDDGKLPEDQVQAIAAQLVSALYYLHSHRILHRDMKPQNILLAKGGGIKLCDFGFARAMSTNTMVLTSIKGTPLYMSPELVEERPYDHTADLWSVGCILYELAVGTPPFYATSIFQLVSLILKDPVRWPSTISPCFKNFLQGLLTKDPRQRLSWPDLLYHPFIAGHVTIITEPAGPDLGTPFTSRLPPELQVLKDEQAHRLAPKGNQSRILTQAYKRMAEEAMQKKHQNTGPALEQEDKTSKVAPGTAPLPRLGATPQESSLLAGILASELKSSWAKSGTGEVPSAPRENRTTPDCERAFPEERPEVLGQRSTDVVDLENEEPDSDNEWQHLLETTEPVPIQLKAPLTLLCNPDFCQRIQSQLHEAGGQILKGILEGASHILPAFRVLSSLLSSCSDSVALYSFCREAGLPGLLLSLLRHSQESNSLQQQSWYGTFLQDLMAVIQAYFACTFNLERSQTSDSLQVFQEAANLFLDLLGKLLAQPDDSEQTLRRDSLMCFTVLCEAMDGNSRAISKAFYSSLLTTQQVVLDGLLHGLTVPQLPVHTPQGAPQVSQPLREQSEDIPGAISSALAAICTAPVGLPDCWDAKEQVCWHLANQLTEDSSQLRPSLISGLQHPILCLHLLKVLYSCCLVSEGLCRLLGQEPLALESLFMLIQGKVKVVDWEESTEVTLYFLSLLVFRLQNLPCGMEKLGSDVATLFTHSHVVSLVSAAACLLGQLGQQGVTFDLQPMEWMAAATHALSAPAEVRLTPPGSCGFYDGLLILLLQLLTEQGKASLIRDMSSSEMWTVLWHRFSMVLRLPEEASAQEGELSLSSPPSPEPDWTLISPQGMAALLSLAMATFTQEPQLCLSCLSQHGSILMSILKHLLCPSFLNQLRQAPHGSEFLPVVVLSVCQLLCFPFALDMDADLLIGVLADLRDSEVAAHLLQVCCYHLPLMQVELPISLLTRLALMDPTSLNQFVNTVSASPRTIVSFLSVALLSDQPLLTSDLLSLLAHTARVLSPSHLSFIQELLAGSDESYRPLRSLLGHPENSVRAHTYRLLGHLLQHSMALRGALQSQSGLLSLLLLGLGDKDPVVRCSASFAVGNAAYQAGPLGPALAAAVPSMTQLLGDPQAGIRRNVASALGNLGPEGLGEELLQCEVPQRLLEMACGDPQPNVKEAALIALRSLQQEPGIHQVLVSLGASEKLSLLSLGNQSLPHSSPRPASAKHCRKLIHLLRPAHSM

SEQ ID NO: 63152 - protein, 1294 aa, Homo sapiens
MEKYHVLEMIGEGSFGRVYKGRRKYSAQVVALKFIPKLGRSEKELRNLQREIEIMRGLRHPNIVHMLDSFETDKEVVVVTDYAEGELFQILEDDGKLPEDQVQAIAAQLVSALYYLHSHRILHRDMKPQNILLAKGGGIKLCDFGFARAMSTNTMVLTSIKGTPLYMSPELVEERPYDHTADLWSVGCILYELAVGTPPFYATSIFQLVSLILKDPVRWPSTISPCFKNFLQGLLTKDPRQRLSWPDLLYHPFIAGHVTIITEPAGPDLGTPFTSRLPPELQVLKDEQAHRLAPKGNQSRILTQAYKRMAEEAMQKKHQNTGPALEQEDKTSKVAPGTAPLPRLGATPQESSLLAGILASELKSSWAKSGTGEVPSAPRENRTTPDCERAFPEERPEVLGQRSTDVVDLENEEPDSDNEWQHLLETTEPVPIQLKAPLTLLCNPDFCQRIQSQLHEAGGQILKGILEGASHILPAFRVLSSLLSSCSDSVALYSFCREAGLPGLLLSLLRHSQESNSLQQQSWYGTFLQDLMAVIQAYFACTFNLERSQTSDSLQVFQEAANLFLDLLGKLLAQPDDSEQTLRRDSLMCFTVLCEAMDGNSRAISKAFYSSLLTTQQVVLDGLLHGLTVPQLPVHTPQGAPQVSQPLREQSEDIPGAISSALAAICTAPVGLPDCWDAKEQVCWHLANQLTEDSSQLRPSLISGLQHPILCLHLLKVLYSCCLVSEGLCRLLGQEPLALESLFMLIQGKVKVVDWEESTEVTLYFLSLLVFRLQNLPCGMEKLGSDVATLFTHSHVVSLVSAAACLLGQLGQQGVTFDLQPMEWMAAATHALSAPAELLTEQGKASLIRDMSSSEMWTVLWHRFSMVLRLPEEASAQEGELSLSSPPSPEPDWTLISPQGMAALLSLAMATFTQEPQLCLSCLSQHGSILMSILKHLLCPSFLNQLRQAPHGSEFLPVVVLSVCQLLCFPFALDMDADLLIGVLADLRDSEVAAHLLQVCCYHLPLMQVELPISLLTRLALMDPTSLNQFVNTVSASPRTIVSFLSVALLSDQPLLTSDLLSLLAHTARVLSPSHLSFIQELLAGSDESYRPLRSLLGHPENSVRAHTYRLLGHLLQHSMALRGALQSQSGLLSLLLLGLGDKDPVVRCSASFAVGNAAYQAGPLGPALAAAVPSMTQLLGDPQAGIRRNVASALGNLGPEGLGEELLQCEVPQRLLEMACGDPQPNVKEAALIALRSLQQEPGIHQVLVSLGASEKLSLLSLGNQSLPHSSPRPASAKHCRKLIHLLRPAHSM

SEQ ID NO: 63153 - protein, 1294 aa, Homo sapiens
MEKYHVLEMIGEGSFGRVYKGRRKYSAQVVALKFIPKLGRSEKELRNLQREIEIMRGLRHPNIVHMLDSFETDKEVVVVTDYAEGELFQILEDDGKLPEDQVQAIAAQLVSALYYLHSHRILHRDMKPQNILLAKGGGIKLCDFGFARAMSTNTMVLTSIKGTPLYMSPELVEERPYDHTADLWSVGCILYELAVGTPPFYATSIFQLVSLILKDPVRWPSTISPCFKNFLQGLLTKDPRQRLSWPDLLYHPFIAGHVTIITEPAGPDLGTPFTSRLPPELQVLKDEQAHRLAPKGNQSRILTQAYKRMAEEAMQKKHQNTGPALEQEDKTSKVAPGTAPLPRLGATPQESSLLAGILASELKSSWAKSGTGEVPSAPRENRTTPDCERAFPEERPEVLGQRSTDVVDLENEEPDSDNEWQHLLETTEPVPIQLKAPLTLLCNPDFCQRIQSQLHEAGGQILKGILEGASHILPAFRVLSSLLSSCSDSVALYSFCREAGLPGLLLSLLRHSQESNSLQQQSWYGTFLQDLMAVIQAYFACTFNLERSQTSDSLQVFQEAANLFLDLLGKLLAQPDDSEQTLRRDSLMCFTVLCEAMDGNSRAISKAFYSSLLTTQQVVLDGLLHGLTVPQLPVHTPQGAPQVSQPLREQSEDIPGAISSALAAICTAPVGLPDCWDAKEQVCWHLANQLTEDSSQLRPSLISGLQHPILCLHLLKVLYSCCLVSEGLCRLLGQEPLALESLFMLIQGKVKVVDWEESTEVTLYFLSLLVFRLQNLPCGMEKLGSDVATLFTHSHVVSLVSAAACLLGQLGQQGVTFDLQPMEWMAAATHALSAPAEMSCEQGKASLIRDMSSSEMWTVLWHRFSMVLRLPEEASAQEGELSLSSPPSPEPDWTLISPQGMAALLSLAMATFTQEPQLCLSCLSQHGSILMSILKHLLCPSFLNQLRQAPHGSEFLPVVVLSVCQLLCFPFALDMDADLLIGVLADLRDSEVAAHLLQVCCYHLPLMQVELPISLLTRLALMDPTSLNQFVNTVSASPRTIVSFLSVALLSDQPLLTSDLLSLLAHTARVLSPSHLSFIQELLAGSDESYRPLRSLLGHPENSVRAHTYRLLGHLLQHSMALRGALQSQSGLLSLLLLGLGDKDPVVRCSASFAVGNAAYQAGPLGPALAAAVPSMTQLLGDPQAGIRRNVASALGNLGPEGLGEELLQCEVPQRLLEMACGDPQPNVKEAALIALRSLQQEPGIHQVLVSLGASEKLSLLSLGNQSLPHSSPRPASAKHCRKLIHLLRPAHSM

SEQ ID NO: 63154 - protein, 279 aa, Homo sapiens
MEKYHVLEMIGEGSFGRVYKGRRKYSAQVVALKFIPKLGRSEKELRNLQREIEIMRGLRHPNIVHMLDSFETDKEVVVVTDYAEGELFQILEDDGKLPEDQVQAIAAQLVSALYYLHSHRILHRDMKPQNILLAKGGGIKLCDFGFARAMSTNTMVLTSIKGTPLYMSPELVEERPYDHTADLWSVGCILYELAVGTPPFYATSIFQLVSLILKDPVRWPSTISPCFKNFLQGLLTKDPRQRLSWPDLLYHPFIAGHVTIITEPAGPDLGTPFTSRLPP

SEQ ID NO: 63155 - protein, 1315 aa, Homo sapiens; identical to SEQ ID NO: 63151

SEQ ID NO: 63156 - protein, 465 aa, Homo sapiens
MAMTGSTPCSSMSNHTKERVTMTKVTLENFYSNLIAQHEEREMRQKKLEKVMEEEGLKDEEKRLRRSAHARKETEFLRLKRTRLGLEDFESLKVIGRGAFGEVRLVQKKDTGHVYAMKILRKADMLEKEQVGHIRAERDILVEADSLWVVKMFYSFQDKLNLYLIMEFLPGGDMMTLLMKKDTLTEEETQFYIAETVLAIDSIHQLGFIHRDIKPDNLLLDSKGHVKLSDFGLCTGLKKAHRTEFYRNLNHSLPSDFTFQNMNSKRKAETWKRNRRQLAFSTVGTPDYIAPEVFMQTGYNKLCDWWSLGVIMYEMLIGYPPFCSETPQETYKKVMNWKETLTFPPEVPISEKAKDLILRFCCEWEHRIGAPGVEEIKSNSFFEGVDWEHIRERPAAISIEIKSIDDTSNFDEFPESDILKPTVATSNHPETDYKNKDWVFINYTYKRFEGLTARGAIPSYMKAAK

SEQ ID NO: 63157 - protein, 462 aa, Homo sapiens
METVQLRNPPRRQLKKLDEDSLTKQPEEVFDVLEKLGEGSYGSVYKAIHKETGQIVAIKQVPVESDLQEIIKEISIMQQCDSPHVVKYYGSYFKNTDLWIVMEYCGAGSVSDIIRLRNKTLTEDEIATILQSTLKGLEYLHFMRKIHRDIKAGNILLNTEGHAKLADFGVAGQLTDTMAKRNTVIGTPFWMAPEVIQEIGYNCVADIWSLGITAIEMAEGKPPYADIHPMRAIFMIPTNPPPTFRKPELWSDNFTDFVKQCLVKSPEQRATATQLLQHPFVRSAKGVSILRDLINEAMDVKLKRQESQQREVDQDDEENSEEDEMDSGTMVRAVGDEMGTVRVASTMTDGANTMIEHDDTLPSQLGTMVINAEDEEEEGTMKRRDETMQPAKPSFLEYFEQKEKENQINSFGKSVPGPLKNSSDWKIPQDGDYEFKTSQEQQSGKDICIQNCQGNLLCRYAF

SEQ ID NO: 63158 - protein, 487 aa, Homo sapiens
METVQLRNPPRRQLKKLDEDSLTKQPEEVFDVLEKLGEGSYGSVYKAIHKETGQIVAIKQVPVESDLQEIIKEISIMQQCDSPHVVKYYGSYFKNTDLWIVMEYCGAGSVSDIIRLRNKTLTEDEIATILQSTLKGLEYLHFMRKIHRDIKAGNILLNTEGHAKLADFGVAGQLTDTMAKRNTVIGTPFWMAPEVIQEIGYNCVADIWSLGITAIEMAEGKPPYADIHPMRAIFMIPTNPPPTFRKPELWSDNFTDFVKQCLVKSPEQRATATQLLQHPFVRSAKGVSILRDLINEAMDVKLKRQESQQREVDQDDEENSEEDEMDSGTMVRAVGDEMGTVRVASTMTDGANTMIEHDDTLPSQLGTMVINAEDEEEEGTMKRRDETMQPAKPSFLEYFEQKEKENQINSFGKSVPGPLKNSSDWKIPQDGDYEFLKSWTVEDLQKRLLALDPMMEQEIEEIRQKYQSKRQPILDAIEAKKRRQQNF

SEQ ID NO: 63159 - protein, 462 aa, Homo sapiens; identical to SEQ ID NO: 63157

SEQ ID NO: 63160 - protein, 432 aa, Homo sapiens
METVQLRNPPRRQLKKLDEDSLTKQPEEVFDVLEKLGEGSYGSVYKAIHKETGQIVAIKQVPVESDLQEIIKEISIMQQCDSPHVVKYYGSYFKNTDLWIVMEYCGAGSVSDIIRLRNKTDTMAKRNTVIGTPFWMAPEVIQEIGYNCVADIWSLGITAIEMAEGKPPYADIHPMRAIFMIPTNPPPTFRKPELWSDNFTDFVKQCLVKSPEQRATATQLLQHPFVRSAKGVSILRDLINEAMDVKLKRQESQQREVDQDDEENSEEDEMDSGTMVRAVGDEMGTVRVASTMTDGANTMIEHDDTLPSQLGTMVINAEDEEEEGTMKRRDETMQPAKPSFLEYFEQKEKENQINSFGKSVPGPLKNSSDWKIPQDGDYEFLKSWTVEDLQKRLLALDPMMEQEIEEIRQKYQSKRQPILDAIEAKKRRQQNF

SEQ ID NO: 63161 - protein, 417 aa, Homo sapiens
MKRRASDRGAGETSARAKALGSGISGNNAKRAGPFILGPRLGNSPVPSIVQCLARKDGTDDFYQLKILTLEERGDQGIESQEERQGKMLLHTEYSLLSLLHTQDGVVHHHGLFQDRTCEIVEDTESSRMVKKMKKRICLVLDCLCAHDFSDKTADLINLQHYVIKEKRLSERETVVIFYDVVRVVEALHQKNIVHRDLKLGNMVLNKRTHRITITNFCLGKHLVSEGDLLKDQRGSPAYISPDVLSGRPYRGKPSDMWALGVVLFTMLYGQFPFYDSIPQELFRKIKAAEYTIPEDGRVSENTVCLIRKLLVLDPQQRLAAADVLEALSAIIASWQSLSSLSGPLQVVPDIDDQMSNADSSQEVSWGGQMGHYPAPRDRLLGAGRARAEVAATRRPQSFLGLLPQPWGGKGRLQSSA

SEQ ID NO: 63162 - protein, 435 aa, Homo sapiens
MKRRASDRGAGETSARAKALGSGISGNNAKRAGPFILGPRLGNSPVPSIVQCLARKDGTDDFYQLKILTLEERGDQGIESQEERQGKMLLHTEYSLLSLLHTQDGVVHHHGLFQDRTCEIVEDTESSRMVKKMKKRICLVLDCLCAHDFSDKTADLINLQHYVIKEKRLSERETVVIFYDVVRVVEALHQKNIVHRDLKLGNMVLNKRTHRITITNFCLGKHLVSEGDLLKDQRGSPAYISPDVLSGRPYRGKPSDMWALGVVLFTMLYGQFPFYDSIPQELFRKIKAAEYTIPEDGRVSENTVCLIRKLLVLDPQQRLAAADVLEALSAIIASWQSLSSLSGPLQVVPDIDDQMSNADSSQEAKVTEECSQYEFENYMRQQLLLAEEKSSIHDARSWVPKRQFGSAPPVRRLGHDAQPMTSLDTAILAQRYLRK

SEQ ID NO: 63163 - protein, 440 aa, Homo sapiens
MKRRASDRGAGETSARAKALGSGISGNNAKRAGPFILALCAVGPRLGNSPVPSIVQCLARKDGTDDFYQLKILTLEERGDQGIESQEERQGKMLLHTEYSLLSLLHTQDGVVHHHGLFQDRTCEIVEDTESSRMVKKMKKRICLVLDCLCAHDFSDKTADLINLQHYVIKEKRLSERETVVIFYDVVRVVEALHQKNIVHRDLKLGNMVLNKRTHRITITNFCLGKHLVSEGDLLKDQRGSPAYISPDVLSGRPYRGKPSDMWALGVVLFTMLYGQFPFYDSIPQELFRKIKAAEYTIPEDGRVSENTVCLIRKLLVLDPQQRLAAADVLEALSAIIASWQSLSSLSGPLQVVPDIDDQMSNADSSQEAKVTEECSQYEFENYMRQQLLLAEEKSSIHDARSWVPKRQFGSAPPVRRLGHDAQPMTSLDTAILAQRYLRK

SEQ ID NO: 63164 - protein, 435 aa, Homo sapiens; identical to SEQ ID NO: 63162

SEQ ID NO: 63165 - protein, 363 aa, Homo sapiens
MAMRQTPLTCSGHTRPVVDLAFSGITPYGYFLISACKGAGQHLPRLSGQHDGKPMLRQGDTGDWIGTFLGHKGAVWGATLNKDATKAATAAADFTAKVWDAVSGDELMTLAHKHIVKTVDFTQDSNYLLTGGQDKLLRIYDLNKPEAEPKEISGHTSGIKKALWCSEDKQILSADDKTVRLWDHATMTEVKSLNFNMSVSSMEYIPEGEILVITYGRSIAFHSAVSLDPIKSFEAPATINSASLHPEKEFLVAGGEDFKLYKYDYNSGEELESYKGHFGPIHCVRFSPDGELYASGSEDGTLRLWQTVVGKTYGLWKCVLPEEDSGELAKPKIGFPETTEEELEEIASENSDCIFPSAPDVKA

SEQ ID NO: 63166 - protein, 350 aa, Homo sapiens
MAMRQTPLTCSGHTRPVVDLAFSGITPYGYFLISACKDGKPMLRQGDTGDWIGTFLGHKGAVWGATLNKDATKAATAAADFTAKVWDAVSGDELMTLAHKHIVKTVDFTQDSNYLLTGGQDKLLRIYDLNKPEAEPKEISGHTSGIKKALWCSEDKQILSADDKTVRLWDHATMTEVKSLNFNMSVSSMEYIPEGEILVITYGRSIAFHSAVSLDPIKSFEAPATINSASLHPEKEFLVAGGEDFKLYKYDYNSGEELESYKGHFGPIHCVRFSPDGELYASGSEDGTLRLWQTVVGKTYGLWKCVLPEEDSGELAKPKIGFPETTEEELEEIASENSDCIFPSAPDVKA

SEQ ID NO: 63167 - protein, 256 aa, Homo sapiens
MTLAHKHIVKTVDFTQDSNYLLTGGQDKLLRIYDLNKPEAEPKEISGHTSGIKKALWCSEDKQILSADDKTVRLWDHATMTEVKSLNFNMSVSSMEYIPEGEILVITYGRSIAFHSAVSLDPIKSFEAPATINSASLHPEKEFLVAGGEDFKLYKYDYNSGEELESYKGHFGPIHCVRFSPDGELYASGSEDGTLRLWQTVVGKTYGLWKCVLPEEDSGELAKPKIGFPETTEEELEEIASENSDCIFPSAPDVKA

SEQ ID NO: 63168 - protein, 568 aa, Homo sapiens
MKNKIQVVVLENEGLQQQLKSQRQEETLREQTLLDASGNMHNSWITTGEDSGVGETSKRPFSHDNADFGKAASAGEQLELEKLKLTYEEKCEIEESQLKFLRNDLAEYQRTCEDLKEQLKHKEFLLAANTCNRVGGLCLKCAQHEAVLSQTHTNVHMQTIERLVKERDDLMSALVSVRSSLADTQQREASAYEQVKQVLQISEEANFEKTKALIQCDQLRKELERQAERLEKELASQQEKRAIEKDMMKKEITKEREYMGSKMLILSQNIAQLEAQVEKVTKEKISAINQLEEIQSQLASREMDVTKVCGEMRYQLNKTNMEKDEAEKEHREFRAKTNRDLEIKDQEIEKLRIELDESKQHLEQEQQKAALAREECLRLTELLGESEHQLHLTRQEKDSIQQSFSKEAKAQALQAQQREQELTQKIQQMEAQHDKTENEQYLLLTSQNTFLTKLKEECCTLAKKLEQISQKTRSEIAQLSQEKRYTYDKLGKLQRRNEELEEQCVQHGRVHETMKQRLRQLDKHSQATAQQLVQLLSKQNQLLLERQSLSEEVDRLRTQLPSMPQSDC

SEQ ID NO: 63169 - protein, 670 aa, Homo sapiens
MAKSPENSTLEEILGQYQRSLREHASRSIHQLTCALKEGDVTIGEDAPNLSFSTSVGNEDARTAWPELQQSHAVNQLKDLLRQQADKESEVSPSRRRKMSPLRSLEHEETNMPTMHDLVHTINDQSQYIHHLEAEVKFCKEELSGMKNKIQVVVLENEGLQQQLKSQRQEETLREQTLLDASEKLKLTYEEKCEIEESQLKFLRNDLAEYQRTCEDLKEQLKHKEFLLAANTCNRVGGLCLKCAQHEAVLSQTHTNVHMQTIERLVKERDDLMSALVSVRSSLADTQQREASAYEQVKQVLQISEEANFEKTKALIQCDQLRKELERQAERLEKELASQQEKRAIEKDMMKKEITKEREYMGSKMLILSQNIAQLEAQVEKVTKEKISAINQLEEIQSQLASREMDVTKVCGEMRYQLNKTNMEKDEAEKEHREFRAKTNRDLEIKDQEIEKLRIELDESKQHLEQEQQKAALAREECLRLTELLGESEHQLHLTRQEKDSIQQSFSKEAKAQALQAQQREQELTQKIQQMEAQHDKTENEQYLLLTSQNTFLTKLKEECCTLAKKLEQISQKTRSEIAQLSQEKRYTYDKLGKLQRRNEELEEQCVQHGRVHETMKQRLRQLDKHSQATAQQLVQLLSKQNQLLLERQSLSEEVDRLRTQLPSMPQSDC

SEQ ID NO: 63170 - protein, 713 aa, Homo sapiens
MAKSPENSTLEEILGQYQRSLREHASRSIHQLTCALKEGDVTIGEDAPNLSFSTSVGNEDARTAWPELQQSHAVNQLKDLLRQQADKESEVSPSRRRKMSPLRSLEHEETNMPTMHDLVHTINDQSQYIHHLEAEVKFCKEELSGMKNKIQVVVLENEGLQQQLKSQRQEETLREQTLLDASGNMHNSWITTGEDSGVGETSKRPFSHDNADFGKAASAGEQLELEKLKLTYEEKCEIEESQLKFLRNDLAEYQRTCEDLKEQLKHKEFLLAANTCNRVGGLCLKCAQHEAVLSQTHTNVHMQTIERLVKERDDLMSALVSVRSSLADTQQREASAYEQVKQVLQISEEANFEKTKALIQCDQLRKELERQAERLEKELASQQEKRAIEKDMMKKEITKEREYMGSKMLILSQNIAQLEAQVEKVTKEKISAINQLEEIQSQLASREMDVTKVCGEMRYQLNKTNMEKDEAEKEHREFRAKTNRDLEIKDQEIEKLRIELDESKQHLEQEQQKAALAREECLRLTELLGESEHQLHLTRQEKDSIQQSFSKEAKAQALQAQQREQELTQKIQQMEAQHDKTENEQYLLLTSQNTFLTKLKEECCTLAKKLEQISQKTRSEIAQLSQEKRYTYDKLGKLQRRNEELEEQCVQHGRVHETMKQRLRQLDKHSQATAQQLVQLLSKQNQLLLERQSLSEEVDRLRTQLPSMPQSDC

SEQ ID NO: 63171 - protein, 360 aa, Homo sapiens
MAKSPENSTLEEILGQYQRSLREHASRSIHQLTCALKEGDVTIGEDAPNLSFSTSVGNEDARTAWPELQQSHAVNQLKDLLRQQADKESEVSPSRRRKMSPLRSLEHEETNMPTMHDLVHTINDQSQYIHHLEAEVKFCKEELSGMKNKIQVVVLENEGLQQQLKSQRQEETLREQTLLDASGNMHNSWITTGEDSGVGETSKRPFSHDNADFGKAASAGEQLELEKLKLTYEEKCEIEESQLKFLRNDLAEYQRTCEDLKEQLKHKEFLLAANTCNRVGGLCLKCAQHEAVLSQTHTNVHMQTIERLVKERDDLMSALVSVRSSLADTQQREASAYEQVKQVLQISEEANFEKTKHPSQ

SEQ ID NO: 63172 - protein, 414 aa, Homo sapiens
LLDASEKLKLTYEEKCEIEESQLKFLRNDLAEYQRTCEDLKEQLKHKEFLLAANTCNRVGGLCLKCAQHEAVLSQTHTNVHMQTIERLVKERDDLMSALVSVRSSLADTQQREASAYEQVKQVLQISEEANFEKTKALIQCDQLRKELERQAERLEKELASQQEKRAIEKDMMKKEITKEREYMGSKMLILSQNIAQLEAQVEKVTKEKISAINQLEEIQSQLASREMDVTKVCGEMRYQLNKTNMEKDEAEKEHREFRAKTNRDLEIKDQEIEKLRIELDESKQHLEQEQQKAALAREECLRLTELLGESEHQLHLTRSEIAQLSQEKRYTYDKLGKLQRRNEELEEQCVQHGRVHETMKQRLRQLDKHSQATAQQLVQLLSKQNQLLLERQSLSEEVDRLRTQLPSMPQSDC

SEQ ID NO: 63173 - protein, 242 aa, Homo sapiens
MDDLCEANGTFAISLFKILGEEDNSRNVFFSPMSISSALAMVFMGAKGSTAAQMSQALCLYKDGDIHRGFQSLLSEVNRTGTQYLLRTANRLFGEKTCDFLPDFKEYCQKFYQAELEELSFAEDTEECRKHINDWVAEKTEGKISEVLDAGTVDPLTKLVLVNAIYFKGKWNEQFDRKYTRGMLFKTNEEKKTVQMMFKEAKFKMGYADEVHTQVLELPYVEEELSMVILLPDDNTDLAVKE

SEQ ID NO: 63174 - protein, 444 aa, Homo sapiens
MKVVPSLLLSVLLAQVWLVPGLAPSPQSPETPAPQNQTSRVVQAPKEEEEDEQEASEEKASEEEKAWLMASRQQLAKETSNFGFSLLRKISMRHDGNMVFSPFGMSLAMTGLMLGATGPTETQIKRGLHLQALKPTKPGLLPSLFKGLRETLSRNLELGLTQGSFAFIHKDFDVKETFFNLSKRYFDTECVPMNFRNASQAKRLMNHYINKETRGKIPKLFDEINPETKLILVDYILFKGKWLTPFDPVFTEVDTFHLDKYKTIKVPMMYGAGKFASTFDKNFRCHVLKLPYQGNATMLVVLMEKMGDHLALEDYLTTDLVETWLRNMKTRNMEVFFPKFKLDQKYEMHELLRQMGIRRIFSPFADLSELSATGRNLQVSRVLQRTVIEVDERGTEAVAGILSEITAYSMPPVIKVDRPFHFMIYEETSGMLLFLGRVVNPTLL

SEQ ID NO: 63175 - protein, 444 aa, Homo sapiens; identical to SEQ ID NO: 63174

SEQ ID NO: 63176 - protein, 444 aa, Homo sapiens; identical to SEQ ID NO: 63174

SEQ ID NO: 63177 - protein, 484 aa, Homo sapiens
MSRSTQELLGYHCRLQDKLQEQEGSLAAEGRHSLASAADHMKVVPSLLLSVLLAQVWLVPGLAPSPQSPETPAPQNQTSRVVQAPKEEEEDEQEASEEKASEEEKAWLMASRQQLAKETSNFGFSLLRKISMRHDGNMVFSPFGMSLAMTGLMLGATGPTETQIKRGLHLQALKPTKPGLLPSLFKGLRETLSRNLELGLTQGSFAFIHKDFDVKETFFNLSKRYFDTECVPMNFRNASQAKRLMNHYINKETRGKIPKLFDEINPETKLILVDYILFKGKWLTPFDPVFTEVDTFHLDKYKTIKVPMMYGAGKFASTFDKNFRCHVLKLPYQGNATMLVVLMEKMGDHLALEDYLTTDLVETWLRNMKTRNMEVFFPKFKLDQKYEMHELLRQMGIRRIFSPFADLSELSATGRNLQVSRVLQRTVIEVDERGTEAVAGILSEITAYSMPPVIKVDRPFHFMIYEETSGMLLFLGRVVNPTLL

SEQ ID NO: 63178 - protein, 95 aa, Homo sapiens
MERMLPLLALGLLAAGFCPAVLCHPNSPLDEENLTQENQDRGTHVDLGLASANVDFAFSLYKHPHRWSIRLCLMYLRRAQKHLLPQQSKSPSFLH

SEQ ID NO: 63179 - protein, 423 aa, Homo sapiens
MERMLPLLALGLLAAGFCPAVLCHPNSPLDEENLTQENQDRGTHVDLGLASANVDFAFSLYKQLVLKAPDKNVIFSPLSISTALAFLSLGAHNTTLTEILKGLKFNLTETSEAEIHQSFQHLLRTLNQSSDELQLSMGNAMFVKEQLSLLDRFTEDAKRLYGSEAFATDFQDSAAAKKLINDYVKNGTRGKITDLIKDLDSQTMMVLVNYIFFKAKWEMPFDPQDTHQSRFYLSKKKWVMVPMMSLHHLTIPYFRDEELSCTVVELKYTGNASALFILPDQDKMEEVEAMLLPETLKRWRDSLEFREIGELYLPKFSISRDYNLNDILLQLGIEEAFTSKADLSGITGARNLAVSQVVHKAVLDVFEEGTEASAATAVKITLLSALVETRTIVRFNRPFLMIIVPTDTQNIFFMSKVTNPKQA

SEQ ID NO: 63180 - protein, 423 aa, Homo sapiens; identical to SEQ ID NO: 63179

SEQ ID NO: 63181 - protein, 423 aa, Homo sapiens; identical to SEQ ID NO: 63179

SEQ ID NO: 63182 - protein, 448 aa, Homo sapiens
MKIHYSRQTALESTSYIQLPEAELRMERMLPLLALGLLAAGFCPAVLCHPNSPLDEENLTQENQDRGTHVDLGLASANVDFAFSLYKQLVLKAPDKNVIFSPLSISTALAFLSLGAHNTTLTEILKGLKFNLTETSEAEIHQSFQHLLRTLNQSSDELQLSMGNAMFVKEQLSLLDRFTEDAKRLYGSEAFATDFQDSAAAKKLINDYVKNGTRGKITDLIKDLDSQTMMVLVNYIFFKAKWEMPFDPQDTHQSRFYLSKKKWVMVPMMSLHHLTIPYFRDEELSCTVVELKYTGNASALFILPDQDKMEEVEAMLLPETLKRWRDSLEFREIGELYLPKFSISRDYNLNDILLQLGIEEAFTSKADLSGITGARNLAVSQVVHKAVLDVFEEGTEASAATAVKITLLSALVETRTIVRFNRPFLMIIVPTDTQNIFFMSKVTNPKQA

SEQ ID NO: 63183 - protein, 305 aa, Homo sapiens
MERMLPLLALGLLAAGFCPAVLCHPNSPLDEENLTQENQDRGTHVDLGLASANVDFAFSLYKQLVLKAPDKNVIFSPLSISTALAFLSLGAHNTTLTEILKGLKFNLTETSEAEIHQSFQHLLRTLNQSSDELQLSMGNAMFVKEQLSLLDRFTEDAKRLYGSEAFATDFQDSAAAKKLINDYVKNGTRGKITDLIKDLDSQTMMVLVNYIFFKAKWEMPFDPQDTHQSRFYLSKKKWVMVPMMSLHHLTIPYFRDEELSCTVVELKYTGNASALFILPDQDKMEEVEAMLLPETLKRWRDSLEF

SEQ ID NO: 63184 - protein, 427 aa, Homo sapiens
MHLIDYLLLLLVGLLALSHGQLHVEHDGESCSNSSHQQILETGEGSPSLKIAPANADFAFRFYYLIASETPGKNIFFSPLSISAAYAMLSLGACSHSRSQILEGLGFNLTELSESDVHRGFQHLLHTLNLPGHGLETRVGSALFLSHNLKFLAKFLNDTMAVYEAKLFHTNFYDTVGTIQLINDHVKKETRGKIVDLVSELKKDVLMVLVNYIYFKALWEKPFISSRTTPKDFYVDENTTVRVPMMLQDQEHHWYLHDRYLPCSVLRMDYKGDATVFFILPNQGKMREIEEVLTPEMLMRWNNLLRKRNFYKKLELHLPKFSISGSYVLDQILPRLGFTDLFSKWADLSGITKQQKLEASKSFHKATLDVDEAGTEAAAATSFAIKFFSAQTNRHILRFNRPFLVVIFSTSTQSVLFLGKVVDPTKP

SEQ ID NO: 63185 - protein, 427 aa, Homo sapiens; identical to SEQ ID NO: 63184

SEQ ID NO: 63186 - protein, 427 aa, Homo sapiens; identical to SEQ ID NO: 63184

SEQ ID NO: 63187 - protein, 405 aa, Homo sapiens
MPLLLYTCLLWLPTSGLWTVQAMDPNAAYVNMSNHHRGLASANVDFAFSLYKHLVALSPKKNIFISPVSISMALAMLSLGTCGHTRAQLLQGLGFNLTERSETEIHQGFQHLHQLFAKSDTSLEMTMGNALFLDGSLELLESFSADIKHYYESEVLAMNFQDWATASRQINSYVKNKTQGKIVDLFSGLDSPAILVLVNYIFFKGTWTQPFDLASTREENFYVDETTVVKVPMMLQSSTISYLHDSELPCQLVQMNYVGNGTVFFILPDKGKMNTVIAALSRDTINRWSAGLTSSQVDLYIPKVTISGVYDLGDVLEEMGIADLFTNQANFSRITQDAQLKSSKVVHKAVLQLNEEGVDTAGSTGVTLNLTSKPIILRFNQPFIIMIFDHFTWSSLFLARVMNPV

SEQ ID NO: 63188 - protein, 136 aa, Homo sapiens
MPLLLYTCLLWLPTSGLWTVQAMDPNAAYVNMSNHHRGLASANVDFAFSLYKHLVALSPKKNIFISPVSISMALAMLSLGTCGHTRAQLLQGLGFNLTERSETEIHQGFQHLHQLFAKSDTSLEMTMGNALFLDGS

SEQ ID NO: 63189 - protein, 397 aa, Homo sapiens
MDSLATSINQFALELSKKLAESAQGKNIFFSSWSISTSLTIVYLGAKGTTAAQMAQVLQFNRDQGVKCDPESEKKRKMEFNLSNSEEIHSDFQTLISEILKPNDDYLLKTANAIYGEKTYAFHNKYLEDMKTYFGAEPQPVNFVEASDQIRKDINSWVERQTEGKIQNLLPDDSVDSTTRMILVNALYFKGIWEHQFLVQNTTEKPFRINETTSKPVQMMFMKKKLHIFHIEKPKAVGLQLYYKSRDLSLLILLPEDINGLEQLEKAITYEKLNEWTSADMMELYEVQLHLPKFKLEDSYDLKSTLSSMGMSDAFSQSKADFSGMSSARNLFLSNVFHKAFVEINEQGTEAAAGSGSEIDIRIRVPSIEFNANHPFLFFIRHNKTNTILFYGRLCSP

SEQ ID NO: 63190 - protein, 339 aa, Homo sapiens
MDSLGAVSTRLGFDLFKELKKTNDGNIFFSPVGILTAIGMVLLGTRGATASQLEEVFHSEKETKSSRIKAEEKEVIENTEAVHQQFQKFLTEISKLTNDYELNITNRLFGEKTYLFLQKYLDYVEKYYHASLEPVDFVNAADESRKKINSWVESKTNEKIKDLFPDGSISSSTKLVLVNMVYFKGQWDREFKKENTKEEKFWMNKIIDKISPEKLVEWTSPGHMEERKVNLHLPRFEVEDGYDLEAVLAAMGMGDAFSEHKADYSGMSSGSGLYAQKFLHSSFVAVTEEGTEAAAATGIGFTVTSAPGHENVHCNHPFLFFIRHNESNSILFFGRFSSP

SEQ ID NO: 63191 - protein, 391 aa, Homo sapiens
MDSLGAVSTRLGFDLFKELKKTNDGNIFFSPVGILTAIGMVLLGTRGATASQLEEVFHSEKETKSSRIKAEEKEVIENTEAVHQQFQKFLTEISKLTNDYELNITNRLFGEKTYLFLQKYLDYVEKYYHASLEPVDFVNAADESRKKINSWVESKTNEKIKDLFPDGSISSSTKLVLVNMVYFKGQWDREFKKENTKEEKFWMNKSTSKSVQMMTQSHSFSFTFLEDLQAKILGIPYKNNDLSMFVLLPNDIDGLEKIIDKISPEKLVEWTSPGHMEERKVNLHLPRFEVEDGYDLEAVLAAMGMGDAFSEHKADYSGMSSGSGLYAQKFLHSSFVAVTEEGTEAAAATGIGFTVTSAPGHENVHCNHPFLFFIRHNESNSILFFGRFSSP

SEQ ID NO: 63192 - protein, 309 aa, Homo sapiens
MDSLGAVSTRLGFDLFKELKKTNDGNIFFSPVGILTAIGMVLLGTRGATASQLEEVFHSEKETKSSRIKAEEKEVEKIKDLFPDGSISSSTKLVLVNMVYFKGQWDREFKKENTKEEKFWMNKSTSKSVQMMTQSHSFSFTFLEDLQAKILGIPYKNNDLSMFVLLPNDIDGLEKIIDKISPEKLVEWTSPGHMEERKVNLHLPRFEVEDGYDLEAVLAAMGMGDAFSEHKADYSGMSSGSGLYAQKFLHSSFVAVTEEGTEAAAATGIGFTVTSAPGHENVHCNHPFLFFIRHNESNSILFFGRFSSP

SEQ ID NO: 63193 - protein, 390 aa, Homo sapiens
MNSLSEANTKFMFDLFQQFRKSKENNIFYSPISITSALGMVLLGAKDNTAQQIKKVLHFDQVTENTTGKAATYHVDRSGNVHHQFQKLLTEFNKSTDAYELKIANKLFGEKTYLFLQEYLDAIKKFYQTSVESVDFANAPEESRKKINSWVESQTNEKIKNLIPEGNIGSNTTLVLVNAIYFKGQWEKKFNKEDTKEEKFWPNKNTYKSIQMMRQYTSFHFASLEDVQAKVLEIPYKGKDLSMIVLLPNEIDGLQKLEEKLTAEKLMEWTSLQNMRETRVDLHLPRFKVEESYDLKDTLRTMGMVDIFNGDADLSGMTGSRGLVLSGVLHKAFVEVTEEGAEAAAATAVVGFGSSPTSTNEEFHCNHPFLFFIRQNKTNSILFYGRFSSP

SEQ ID NO: 63194 - protein, 390 aa, Homo sapiens
MNSLSEANTKFMFDLFQQFRKSKENNIFYSPISITSALGMVLLGAKDNTAQQISKVLHFDQVTENTTEKAATYHVDRSGNVHHQFQKLLTEFNKSTDAYELKIANKLFGEKTYQFLQEYLDAIKKFYQTSVESTDFANAPEESRKKINSWVESQTNEKIKNLFPDGTIGNDTTLVLVNAIYFKGQWENKFKKENTKEEKFWPNKNTYKSVQMMRQYNSFNFALLEDVQAKVLEIPYKGKDLSMIVLLPNEIDGLQKLEEKLTAEKLMEWTSLQNMRETCVDLHLPRFKMEESYDLKDTLRTMGMVNIFNGDADLSGMTWSHGLSVSKVLHKAFVEVTEEGVEAAAATAVVVVELSSPSTNEEFCCNHPFLFFIRQNKTNSILFYGRFSSP

SEQ ID NO: 63195 - protein, 338 aa, Homo sapiens
MNSLSEANTKFMFDLFQQFRKSKENNIFYSPISITSALGMVLLGAKDNTAQQISKVLHFDQVTENTTEKAATYHVDRSGNVHHQFQKLLTEFNKSTDAYELKIANKLFGEKTYQFLQEYLDAIKKFYQTSVESTDFANAPEESRKKINSWVESQTNEKIKNLFPDGTIGNDTTLVLVNAIYFKGQWENKFKKENTKEEKFWPNKLEEKLTAEKLMEWTSLQNMRETCVDLHLPRFKMEESYDLKDTLRTMGMVNIFNGDADLSGMTWSHGLSVSKVLHKAFVEVTEEGVEAAAATAVVVVELSSPSTNEEFCCNHPFLFFIRQNKTNSILFYGRFSSP

SEQ ID NO: 63196 - protein, 375 aa, Homo sapiens
MDALQLANSAFAVDLFKQLCEKEPLGNVLFSPICLSTSLSLAQVGAKGDTANEIGQVLHFENVKDVPFGFQTVTSDVNKLSSFYSLKLIKRLYVDKSLNLSTEFISSTKRPYAKELETVDFKDKLEETKGQINNSIKDLTDGHFENILADNSVNDQTKILVVNAAYFVGKWMKKFSESETKECPFRVNKTDTKPVQMMNMEATFCMGNIDSINCKIIELPFQNKHLSMFILLPKDVEDESTGLEKIEKQLNSESLSQWTNPSTMANAKVKLSIPKFKVEKMIDPKACLENLGLKHIFSEDTSDFSGMSETKGVALSNVIHKVCLEITEDGGDSIEVPGARILQHKDELNADHPFIYIIRHNKTRNIIFFGKFCSP

SEQ ID NO: 63197 - protein, 129 aa, Homo sapiens
MDALQLANSAFAVDLFKQLCEKEPLGNVLFSPICLSTSLSLAQVGAKGDTANEIGQVLHFENVKDVPFGFQTVTSDVNKLSSFYSLKLIKRLYVDKSLNLSTEFISSTKRPYAKELETVDFKDKLEETK

SEQ ID NO: 63198 - protein, 376 aa, Homo sapiens
MDVLAEANGTFALNLLKTLGKDNSKNVFFSPMSMSCALAMVYMGAKGNTAAQMAQILSFNKSGGGGDIHQGFQSLLTEVNKTGTQYLLRMANRLFGEKSCDFLSSFRDSCQKFYQAEMEELDFISAVEKSRKHINTWVAEKTEGKIAELLSPGSVDPLTRLVLVNAVYFRGNWDEQFDKENTEERLFKVSKNEEKPVQMMFKQSTFKKTYIGEIFTQILVLPYVGKELNMIIMLPDETTDLRTVEKELTYEKFVEWTRLDMMDEEEVEVSLPRFKLEESYDMESVLRNLGMTDAFELGKADFSGMSQTDLSLSKVVHKSFVEVNEEGTEAAAATAAIMMMRCARFVPRFCADHPFLFFIQHSKTNGILFCGRFSSP

SEQ ID NO: 63199 - protein, 181 aa, Homo sapiens
  VARIANT 1: note = MOD_RES - Any amino acid
XLNLLKTLGKDNSKNVFFSPMSMSCALAMVYMGAKGNTAAQMAQILSFNKSGGGGDIHQGFQSLLTEVNKTGTQYLLRMANRESYDMESVLRNLGMTDAFELGKADFSGMSQTDLSLSKVVHKSFVEVNEEGTEAAAATAAIMMMRCARFVPRFCADHPFLFFIQHSKTNGILFCGRFSSP

SEQ ID NO: 63200 - protein, 376 aa, Homo sapiens; identical to SEQ ID NO: 63198

SEQ ID NO: 63201 - protein, 376 aa, Homo sapiens; identical to SEQ ID NO: 63198

SEQ ID NO: 63202 - protein, 376 aa, Homo sapiens; identical to SEQ ID NO: 63198

SEQ ID NO: 63203 - protein, 376 aa, Homo sapiens; identical to SEQ ID NO: 63198

SEQ ID NO: 63204 - protein, 376 aa, Homo sapiens; identical to SEQ ID NO: 63198

SEQ ID NO: 63205 - protein, 192 aa, Homo sapiens
MDVLAEANGTFALNLLKTLGKDNSKNVFFSPMSMSCALAMVYMGAKGNTAAQMAQILSFNKSGGGGDIHQGFQSLLTEVNKTGTQYLLRMANRESYDMESVLRNLGMTDAFELGKADFSGMSQTDLSLSKVVHKSFVEVNEEGTEAAAATAAIMMMRCARFVPRFCADHPFLFFIQHSKTNGILFCGRFSSP

SEQ ID NO: 63206 - protein, 380 aa, Homo sapiens
MASLAAANAEFCFNLFREMDDNQGNGNVFFSSLSLFAALALVRLGAQDDSLSQIDKLLHVNTASGYGNSSNSQSGLQSQLKRVFSDINASHKDYDLSIVNGLFAEKVYGFHKDYIECAEKLYDAKVERVDFTNHLEDTRRNINKWVENETHGKIKNVIGEGGISSSAVMVLVNAVYFKGKWQSAFTKSETINCHFKSPKCSGKAVAMMHQERKFNLSVIEDPSMKILELRYNGGINMYVLLPENDLSEIENKLTFQNLMEWTNPRRMTSKYVEVFFPQFKIEKNYEMKQYLRALGLKDIFDESKADLSGIASGGRLYISRMMHKSYIEVTEEGTEATAATGSNIVEKQLPQSTLFRADHPFLFVIRKDDIILFSGKVSCP

SEQ ID NO: 63207 - protein, 380 aa, Homo sapiens; identical to SEQ ID NO: 63206

SEQ ID NO: 63208 - protein, 128 aa, Homo sapiens
MASLAAANAEFCFNLFREMDDNQGNGNVFFSSLSLFAALALVRLGAQDDSLSQIDKLLHVNTASGYGNSSNSQSGLQSQLKRVFSDINASHKDYDLSIVNGLFAEKVYGFHKDYIECAEKLYDAKVER

SEQ ID NO: 63209 - protein, 128 aa, Homo sapiens; identical to SEQ ID NO: 63208

SEQ ID NO: 63210 - protein, 165 aa, Homo sapiens
MASLAAANAEFCFNLFREMDDNQGNGNVFFSSLSLFAALALVRLGAQDDSLSQIDKLLHVNTASGYGNSSNSQSGLQSQLKRVFSDINASHKDYDLSIVNGLFAEKVYGFHKDYIECAEKLYDAKVERVDFTNHLEDTRRNINKWVENETHGKIKNVIGEGGISS

SEQ ID NO: 63211 - protein, 363 aa, Homo sapiens
MASLAAANAEFCFNLFREMDDNQGNGNVFFSSLSLFAALALVRLGAQDDSLSQIDKSGLQSQLKRVFSDINASHKDYDLSIVNGLFAEKVYGFHKDYIECAEKLYDAKVERVDFTNHLEDTRRNINKWVENETHGKIKNVIGEGGISSSAVMVLVNAVYFKGKWQSAFTKSETINCHFKSPKCSGKAVAMMHQERKFNLSVIEDPSMKILELRYNGGINMYVLLPENDLSEIENKLTFQNLMEWTNPRRMTSKYVEVFFPQFKIEKNYEMKQYLRALGLKDIFDESKADLSGIASGGRLYISRMMHKSYIEVTEEGTEATAATGSNIVEKQLPQSTLFRADHPFLFVIRKDDIILFSGKVSCP

SEQ ID NO: 63212 - protein, 380 aa, Homo sapiens; identical to SEQ ID NO: 63206

SEQ ID NO: 63213 - protein, 374 aa, Homo sapiens
MDDLCEANGTFAISLFKILGEEDNSRNVFFSPMSISSALAMVFMGAKGSTAAQMSQALCLYKDGDIHRGFQSLLSEVNRTGTQYLLRTANRLFGEKTCDFLPDFKEYCQKFYQAELEELSFAEDTEECRKHINDWVAEKTEGKISEVLDAGTVDPLTKLVLVNAIYFKGKWNEQFDRKYTRGMLFKTNEEKKTVQMMFKEAKFKMGYADEVHTQVLELPYVEEELSMVILLPDDNTDLAVVEKALTYEKFKAWTNSEKLTKSKVQVFLPRLKLEESYDLEPFLRRLGMIDAFDEAKADFSGMSTEKNVPLSKVAHKCFVEVNEEGTEAAAATAVVRNSRCSRMEPRFCADHPFLFFIRHHKTNCILFCGRFSSP

SEQ ID NO: 63214 - protein, 374 aa, Homo sapiens; identical to SEQ ID NO: 63213

SEQ ID NO: 63215 - protein, 164 aa, Homo sapiens
MDDLCEANGTFAISLFKILGEEDNSRNVFFSPMSISSALAMVFMGAKGSTAAQMSQALCLYKDGDIHRGFQSLLSEVNRTGTQYLLRTANRLFGEKTCDFLPDFKEYCQKFYQAELEELSFAEDTEECRKHINDWVAEKTEGKISEVLDAGTVDPLTKLVLVNA

SEQ ID NO: 63216 - protein, 124 aa, Homo sapiens
MDDLCEANGTFAISLFKILGEEDNSRNVFFSPMSISSALAMVFMGAKGSTAAQMSQALCLYKDGDIHRGFQSLLSEVNRTGTQYLLRTANRLFGEKTCDFLPDFKEYCQKFYQAELEELSFAED

SEQ ID NO: 63217 - protein, 192 aa, Homo sapiens
MLFKTNEEKKTVQMMFKEAKFKMGYADEVHTQVLELPYVEEELSMVILLPDDNTDLAVVEKALTYEKFKAWTNSEKLTKSKVQVFLPRLKLEESYDLEPFLRRLGMIDAFDEAKADFSGMSTEKNVPLSKVAHKCFVEVNEEGTEAAAATAVVRNSRCSRMEPRFCADHPFLFFIRHHKTNCILFCGRFSSP

SEQ ID NO: 63218 - protein, 376 aa, Homo sapiens
METLSNASGTFAIRLLKILCQDNPSHNVFCSPVSISSALAMVLLGAKGNTATQMAQALSLNTEEDIHRAFQSLLTEVNKAGTQYLLRTANRLFGEKTCQFLSTFKESCLQFYHAELKELSFIRAAEESRKHINTWVSKKTEGKIEELLPGSSIDAETRLVLVNAIYFKGKWNEPFDETYTREMPFKINQEEQRPVQMMYQEATFKLAHVGEVRAQLLELPYARKELSLLVLLPDDGVELSTVEKSLTFEKLTAWTKPDCMKSTEVEVLLPKFKLQEDYDMESVLRHLGIVDAFQQGKADLSAMSAERDLCLSKFVHKSFVEVNEEGTEAAAASSCFVVAECCMESGPRFCADHPFLFFIRHNRANSILFCGRFSSP

SEQ ID NO: 63219 - protein, 499 aa, Homo sapiens
MKHSLNALLIFLIITSAWGGSKGPLDQLEKGGETAQSADPQWEQLNNKNLSMPLLPADFHKENTVTNDWIPEGEEDDDYLDLEKIFSEDDDYIDIVDSLSVSPTDSDVSAGNILQLFHGKSRIQRLNILNAKFAFNLYRVLKDQVNTFDNIFIAPVGISTAMGMISLGLKGETHEQVHSILHFKDFVNASSKYEITTIHNLFRKLTHRLFRRNFGYTLRSVNDLYIQKQFPILLDFKTKVREYYFAEAQIADFSDPAFISKTNNHIMKLTKGLIKDALENIDPATQMMILNCIYFKGSWVNKFPVEMTHNHNFRLNEREVVKVSMMQTKGNFLAANDQELDCDILQLEYVGGISMLIVVPHKMSGMKTLEAQLTPRVVERWQKSMTNRTREVLLPKFKLEKNYNLVESLKLMGIRMLFDKNGNMAGISDQRIAIDLFKHQGTITVNEEGTQATTVTTVGFMPLSTQVRFTVDRPFLFLIYEHRTSCLLFMGRVANPSRS

SEQ ID NO: 63220 - protein, 499 aa, Homo sapiens; identical to SEQ ID NO: 63219

SEQ ID NO: 63221 - protein, 398 aa, Homo sapiens
MNWHLPLFLLASVTLPSICSHFNPLSLEELGSNTGIQVFNQIVKSRPHDNIVISPHGIASVLGMLQLGADGRTKKQLAMVMRYGVNGVGKILKKINKAIVSKKNKDIVTVANAVFVKNASEIEVPFVTRNKDVFQCEVRNVNFEDPASACDSINAWVKNETRDMIDNLLSPDLIDGVLTRLVLVNAVYFKGLWKSRFQPENTKKRTFVAADGKSYQVPMLAQLSVFRCGSTSAPNDLWYNFIELPYHGESISMLIALPTESSTPLSAIIPHISTKTIDSWMSIMVPKRVQVILPKFTAVAQTDLKEPLKVLGITDMFDSSKANFAKITTGSENLHVSHILQKAKIEVSEDGTKASAATTAILIARSSPPWFIVDRPFLFFIRHNPTGAVLFMGQINKP

SEQ ID NO: 63222 - protein, 397 aa, Homo sapiens
MNWHLPLFLLASVTLPSICSHFNPLSLEELGSNTGIQVFNQIVKSRPHDNIVISPHGIASVLGMLQLGADGRTKKQLAMVMRYGVNGVGKILKKINKAIVSKKNKDIVTVANAVFVKNASEIEVPFVTRNKDVFQCEVRNVNFEDPASACDSINAWVKNETRDMIDNLLSPDLIDGVLTRLVLVNAVYFKGLWKSRFQPENTKKRTFVAADGKSYQVPMLAQLSVFRCGSTSAPNDLWYNFIELPYHGESISMLIALPTESSTPLSAIIPHISTKTIDSWMSIMVPKRVQVILPKFTAVAQTDLKEPLKVLGITDMFDSSKANFAKITRSENLHVSHILQKAKIEVSEDGTKASAATTAILIARSSPPWFIVDRPFLFFIRHNPTGAVLFMGQINKP

SEQ ID NO: 63223 - protein, 397 aa, Homo sapiens; identical to SEQ ID NO: 63222

SEQ ID NO: 63224 - protein, 42 aa, Homo sapiens
MNWHLPLFLLASVTLPSICSHFNPLSLEELGSNTGIQVFNQI

SEQ ID NO: 63225 - protein, 276 aa, Homo sapiens
MNWHLPLFLLASVTLPSICSHFNPLSLEELGSNTGIQVFNQIVKSRPHDNIVISPHGIASVLGMLQLGADGRTKKQLAMVMRYGVNGVGKILKKINKAIVSKKNKDIVTVANAVFVKNASEIEVPFVTRNKDVFQCEVRNVNFEDPASACDSINAWVKNETRDMIDNLLSPDLIDGVLTRLVLVNAVYFKGLWKSRFQPENTKKRTFVAADGKSYQVPMLAQLSVFRCGSTSAPNDLWYNFIELPYHGESISMLIALPTESSTPLSAIIPHISTKT

SEQ ID NO: 63226 - protein, 409 aa, Homo sapiens
MSDCRSSLVEGTMNWHLPLFLLASVTLPSICSHFNPLSLEELGSNTGIQVFNQIVKSRPHDNIVISPHGIASVLGMLQLGADGRTKKQLAMVMRYGVNGVGKILKKINKAIVSKKNKDIVTVANAVFVKNASEIEVPFVTRNKDVFQCEVRNVNFEDPASACDSINAWVKNETRDMIDNLLSPDLIDGVLTRLVLVNAVYFKGLWKSRFQPENTKKRTFVAADGKSYQVPMLAQLSVFRCGSTSAPNDLWYNFIELPYHGESISMLIALPTESSTPLSAIIPHISTKTIDSWMSIMVPKRVQVILPKFTAVAQTDLKEPLKVLGITDMFDSSKANFAKITRSENLHVSHILQKAKIEVSEDGTKASAATTAILIARSSPPWFIVDRPFLFFIRHNPTGAVLFMGQINKP

SEQ ID NO: 63227 - protein, 87 aa, Homo sapiens
MNWHLPLFLLASVTLPSICSHFNPLSLEELGSNTGIQVFNQIVKSRPHDNIVISPHGIASVLGMLQLGADGRTKKQLAMVMRYGVNG

SEQ ID NO: 63228 - protein, 418 aa, Homo sapiens
MQALVLLLCIGALLGHSSCQNPASPPEEGSPDPDSTGALVEEEDPFFKVPVNKLAAAVSNFGYDLYRVRSSTSPTTNVLLSPLSVATALSALSLGAEQRTESIIHRALYYDLISSPDIHGTYKELLDTVTAPQKNLKSASRIVFEKKLRIKSSFVAPLEKSYGTRPRVLTGNPRLDLQEINNWVQAQMKGKLARSTKEIPDEISILLLGVAHFKGQWVTKFDSRKTSLEDFYLDEERTVRVPMMSDPKAVLRYGLDSDLSCKIAQLPLTGSMSIIFFLPLKVTQNLTLIEESLTSEFIHDIDRELKTVQAVLTVPKLKLSYEGEVTKSLQEMKLQSLFDSPDFSKITGKPIKLTQVEHRAGFEWNEDGAGTTPSPGLQPAHLTFPLDYHLNQPFIFVLRDTDTGALLFIGKILDPRGP

SEQ ID NO: 63229 - protein, 410 aa, Homo sapiens
MAFLGLFSLLVLQSMATGATFPEEAIADLSVNMYNRLRATGEDENILFSPLSIALAMGMMELGAQGSTQKEIRHSMGYDSLKNGEEFSFLKEFSNMVTAKESQYVMKIANSLFVQNGFHVNEEFLQMMKKYFNAAVNHVDFSQNVAVANYINKWVENNTNNLVKDLVSPRDFDAATYLALINAVYFKGNWKSQFRPENTRTFSFTKDDESEVQIPMMYQQGEFYYGEFSDGSNEAGGIYQVLEIPYEGDEISMMLVLSRQEVPLATLEPLVKAQLVEEWANSVKKQKVEVYLPRFTVEQEIDLKDVLKALGITEIFIKDANLTGLSDNKEIFLSKAIHKSFLEVNEEGSEAAAVSGMIAISRMAVLYPQVIVDHPFFFLIRNRRTGTILFMGRVMHPETMNTSGHDFEEL

SEQ ID NO: 63230 - protein, 410 aa, Homo sapiens; identical to SEQ ID NO: 63229

SEQ ID NO: 63231 - protein, 245 aa, Homo sapiens
MAFLGLFSLLVLQSMATGATFPEEAIADLSVNMYNRLRATGEDENILFSPLSIALAMGMMELGAQGSTQKEIRHSMGYDSLKNGEEFSFLKEFSNMVTAKESQYVMKIANSLFVQNGFHVNEEFLQMMKKYFNAAVNHVDFSQNVAVANYINKWVENNTNNLVKDLVSPRDFDAATYLALINAVYFKGNWKSQFRPENTRTFSFTKDDESEVQIPMMYQQGEFYYGEFSDGSNEAGGIYQVLEIP

SEQ ID NO: 63232 - protein, 160 aa, Homo sapiens
MAFLGLFSLLVLQSMATGATFPEEAIADLSVNMYNRLRATGEDENILFSPLSIALAMGMMELGAQGSTQKEIRHSMGYDSLKNGEEFSFLKEFSNMVTAKESQYVMKIANSLFVQNGFHVNEEFLQMMKKYFNAAVNHVDFSQNVAVANYINKWVENNTN

SEQ ID NO: 63233 - protein, 196 aa, Homo sapiens
MVGGLKRKHSDLEEEEERWEWSPAGLQSYQQALLRISLDKVQRSLGPRAPSLRRHVLIHNTLQQLQAALRLAPAPALPPEPLFLGEEDFSLSATIGSILRELDTSMDGTEPPQNPVTPLGLQNEVPPQPDPVFLEALSSRYLGDSGLDDFFLDIDTSAVEKEPARAPPEPPHNLFCAPGSWEWNELDHIMEIILGS

SEQ ID NO: 63234 - protein, 196 aa, Homo sapiens; identical to SEQ ID NO: 63233

SEQ ID NO: 63235 - protein, 122 aa, Homo sapiens
MKLLTGLVFCSLVLGVSSRSFFSFLGEAFDGARDMWRAYSDMREANYIGSDKYFHARGNYDAAKRGPGGAWAAEVITDARENIQRFFGHGAEDSLADQAANEWGRSGKDPNHFRPAGLPEKY

SEQ ID NO: 63236 - protein, 122 aa, Homo sapiens; identical to SEQ ID NO: 63235

SEQ ID NO: 63237 - protein, 122 aa, Homo sapiens; identical to SEQ ID NO: 63235

SEQ ID NO: 63238 - protein, 122 aa, Homo sapiens
MKLLTGLVFCSLVLSVSSRSFFSFLGEAFDGARDMWRAYSDMREANYIGSDKYFHARGNYDAAKRGPGGAWAAEVISNARENIQRLTGRGAEDSLADQAANKWGRSGRDPNHFRPAGLPEKY

SEQ ID NO: 63239 - protein, 83 aa, Homo sapiens
MKLLTGLVFCSLVLSVSSRSFFSFLGEAFDGARDMWRAYSDMREANYIGSDKYFHARGNYDAAKRGPGGAWAAEVISLFSAEL

SEQ ID NO: 63240 - protein, 122 aa, Homo sapiens; identical to SEQ ID NO: 63238

SEQ ID NO: 63241 - protein, 122 aa, Homo sapiens; identical to SEQ ID NO: 63238

SEQ ID NO: 63242 - protein, 130 aa, Homo sapiens
MRLFTGIVFCSLVMGVTSESWRSFFKEALQGVGDMGRAYWDIMISNHQNSNRYLYARGNYDAAQRGPGGVWAAKLISRSRVYLQGLIDCYLFGNSSTVLEDSKSNEKAEEWGRSGKDPDRFRPDGLPKKY

SEQ ID NO: 63243 - protein, 425 aa, Homo sapiens
MGEDAAQAEKFQHPGSDMRQEKPSSPSPMPSSTPSPSLNLGNTEEAIRDNSQVNAVTVLTLLDKLVNMLDAVQENQHKMEQRQISLEGSVKGIQNDLTKLSKYQASTSNTVSKLLEKSRKVSAHTRAVKERMDRQCAQVKRLENNHAQLLRRNHFKVLIFQEENEIPASVFVKQPVSGAVEGKEELPDENKSLEETLHTVDLSSDDDLPHDEEALEDSAEEKVEESRAEKIKRSSLKKVDSLKKAFSRQNIEKKMNKLGTKIVSVERREKIKKSLTSNHQKISSGKSSPFKVSPLTFGRKKVREGESHAENETKSEDLPSSEQMPNDQEEESFAEGHSEASLASALVEGEIAEEAAEKATSRGSNSGMDSNIDLTIVEDEEEESVALEQAQKVRYEGSYALTSEEAERSDGDPVQPAVLQVHQTS

SEQ ID NO: 63244 - protein, 429 aa, Homo sapiens
MAQPGTLNLNNEVVKMRKEVKRIRVLVIRKLVRSVGRLKSKKGTEDALLKNQRRAQRLLEEIHAMKELKPDIVTKSALGDDINFEKIFKKPDSTATERAIARLAVHPLLKKKIDVLKAAVQAFKEARQNVAEVESSKNASEDNHSENTLYSNDNGSNLQREATVISEQKVKETKILAKKPIHNSKEKIAKMEHGPKAVTIANSPSKPSEKDSVVSLESQKTPADPKLKTLSQTKKNKGSDSSLSGNSDGGEEFCEEEKEYFDDSTEERFYKQSSMSEDSDSGDDFFIGKVRRTRKKESSCHSSVKEQKPLEKVFLKEDTGETHGDTRNDKIKPSTETRKLESVFFHSLSGSKSSRRNFKEQAPKTRSLDFPQNEPQIKNQFNKKLSGRLENTKQQLQLPLHPSWEASRRRKEQQSNIAVFQGKKITFDD

SEQ ID NO: 63245 - protein, 431 aa, Homo sapiens
MTVKTEAAKGTLTYSRMRGMVAILIAFMKQRRMGLNDFIQKIANNSYACKHPEVQSILKISQPQEPELMNANPSPPPSPSQQINLGPSSNPHAKPSDFHFLKVIGKGSFGKVLLARHKAEEVFYAVKVLQKKAILKKKEEKHIMSERNVLLKNVKHPFLVGLHFSFQTADKLYFVLDYINGGELFYHLQRERCFLEPRARFYAAEIASALGYLHSLNIVYRDLKPENILLDSQGHIVLTDFGLCKENIEHNSTTSTFCGTPEYLAPEVLHKQPYDRTVDWWCLGAVLYEMLYGLPPFYSRNTAEMYDNILNKPLQLKPNITNSARHLLEGLLQKDRTKRLGAKDDFMEIKSHVFFSLINWDDLINKKITPPFNPNVSGPNDLRHFDPEFTEEPVPNSIGKSPDSVLVTASVKEAAEAFLGFSYAPPTDSFL

SEQ ID NO: 63246 - protein, 421 aa, Homo sapiens
MKPSKRFFISPPSSTAFMKQRRMGLNDFIQKIANNSYACKHPEVQSILKISQPQEPELMNANPSPPPSPSQQINLGPSSNPHAKPSDFHFLKVIGKGSFGKVLLARHKAEEVFYAVKVLQKKAILKKKEEKHIMSERNVLLKNVKHPFLVGLHFSFQTADKLYFVLDYINGGELFYHLQRERCFLEPRARFYAAEIASALGYLHSLNIVYRDLKPENILLDSQGHIVLTDFGLCKENIEHNSTTSTFCGTPEYLAPEVLHKQPYDRTVDWWCLGAVLYEMLYGLPPFYSRNTAEMYDNILNKPLQLKPNITNSARHLLEGLLQKDRTKRLGAKDDFMEIKSHVFFSLINWDDLINKKITPPFNPNVSGPNDLRHFDPEFTEEPVPNSIGKSPDSVLVTASVKEAAEAFLGFSYAPPTDSFL

SEQ ID NO: 63247 - protein, 526 aa, Homo sapiens
MVNKDMNGFPVKKCSAFQFFKKRVRRWIKSPMVSVDKHQSPSLKYTGSSMVHIPPGEPDFESSLCQTCLGEHAFQRGVLPQENESCSWETQSGCEVREPCNHANILTKPDPRTFWTNDDPAFMKQRRMGLNDFIQKIANNSYACKHPEVQSILKISQPQEPELMNANPSPPPSPSQQINLGPSSNPHAKPSDFHFLKVIGKGSFGKVLLARHKAEEVFYAVKVLQKKAILKKKEEKHIMSERNVLLKNVKHPFLVGLHFSFQTADKLYFVLDYINGGELFYHLQRERCFLEPRARFYAAEIASALGYLHSLNIVYRDLKPENILLDSQGHIVLTDFGLCKENIEHNSTTSTFCGTPEYLAPEVLHKQPYDRTVDWWCLGAVLYEMLYGLPPFYSRNTAEMYDNILNKPLQLKPNITNSARHLLEGLLQKDRTKRLGAKDDFMEIKSHVFFSLINWDDLINKKITPPFNPNVSGPNDLRHFDPEFTEEPVPNSIGKSPDSVLVTASVKEAAEAFLGFSYAPPTDSFL

SEQ ID NO: 63248 - protein, 445 aa, Homo sapiens
MGEMQGALARARLESLLRPRHKKRAEAQKRSESFLLSGLAFMKQRRMGLNDFIQKIANNSYACKHPEVQSILKISQPQEPELMNANPSPPPSPSQQINLGPSSNPHAKPSDFHFLKVIGKGSFGKVLLARHKAEEVFYAVKVLQKKAILKKKEEKHIMSERNVLLKNVKHPFLVGLHFSFQTADKLYFVLDYINGGELFYHLQRERCFLEPRARFYAAEIASALGYLHSLNIVYRDLKPENILLDSQGHIVLTDFGLCKENIEHNSTTSTFCGTPEYLAPEVLHKQPYDRTVDWWCLGAVLYEMLYGLPPFYSRNTAEMYDNILNKPLQLKPNITNSARHLLEGLLQKDRTKRLGAKDDFMEIKSHVFFSLINWDDLINKKITPPFNPNVSGPNDLRHFDPEFTEEPVPNSIGKSPDSVLVTASVKEAAEAFLGFSYAPPTDSFL

SEQ ID NO: 63249 - protein, 144 aa, Homo sapiens
MVSVDKHQSPSLKYTGSSMVHIPPGEPDFESSLCQTCLGEHAFQRGVLPQENESCSWETQSGCEVREPCNHANILTKPDPRTFWTNDDPAFMKQRRMGLNDFIQKIANNSYACKHPEVQSILKISQPQEPELMNANPSPPPSPS

SEQ ID NO: 63250 - protein, 459 aa, Homo sapiens
MSSQSSSLSEACSREAYSSHNWALPPASRSNPQPAYPWATRRMKEEAIKPPLKAFMKQRRMGLNDFIQKIANNSYACKHPEVQSILKISQPQEPELMNANPSPPPSPSQQINLGPSSNPHAKPSDFHFLKVIGKGSFGKVLLARHKAEEVFYAVKVLQKKAILKKKEEKHIMSERNVLLKNVKHPFLVGLHFSFQTADKLYFVLDYINGGELFYHLQRERCFLEPRARFYAAEIASALGYLHSLNIVYRDLKPENILLDSQGHIVLTDFGLCKENIEHNSTTSTFCGTPEYLAPEVLHKQPYDRTVDWWCLGAVLYEMLYGLPPFYSRNTAEMYDNILNKPLQLKPNITNSARHLLEGLLQKDRTKRLGAKDDFMEIKSHVFFSLINWDDLINKKITPPFNPNVSGPNDLRHFDPEFTEEPVPNSIGKSPDSVLVTASVKEAAEAFLGFSYAPPTDSFL

SEQ ID NO: 63251 - protein, 60 aa, Homo sapiens
MVNKDMNGFPVKKCSAFQFFKKRVRRWIKSPMVSVDKHQSPSLKYTGSSMVHIPPGEPDF

SEQ ID NO: 63252 - protein, 427 aa, Homo sapiens
MQGLLTSGRKPSGGGRCTGRGGWRGQWCLKPWMGGADPPTPTLSCLLLPVPPELPDHCYRMNSSPAGTPSPQPSRANGNINLGPSANPNAQPTDFDFLKVIGKGNYGKVLLAKRKSDGAFYAVKVLQKKSILKKKEQSHIMAERSVLLKNVRHPFLVGLRYSFQTPEKLYFVLDYVNGGELFFHLQRERRFLEPRARFYAAEVASAIGYLHSLNIIYRDLKPENILLDCQGHVVLTDFGLCKEGVEPEDTTSTFCGTPEYLAPEVLRKEPYDRAVDWWCLGAVLYEMLHGLPPFYSQDVSQMYENILHQPLQIPGGRTVAACDLLQSLLHKDQRQRLGSKADFLEIKNHVFFSPINWDDLYHKRLTPPFNPNVTGPADLKHFDPEFTQEAVSKSIGCTPDTVASSSGASSAFLGFSYAPEDDDILDC

SEQ ID NO: 63253 - protein, 366 aa, Homo sapiens
MNSSPAGTPSPQPSRANGNINLGPSANPNAQPTDFDFLKVIGKGNYGKVLLAKRKSDGAFYAVKVLQKKSILKKKESHIMAERSVLLKNVRHPFLVGLRYSFQTPEKLYFVLDYVNGGELFFHLQRERRFLEPRARFYAAEVASAIGYLHSLNIIYRDLKPENILLDCQGHVVLTDFGLCKEGVEPEDTTSTFCGTPEYLAPEVLRKEPYDRAVDWWCLGAVLYEMLHGLPPFYSQDVSQMYENILHQPLQIPGGRTVAACDLLQSLLHKDQRQRLGSKADFLEIKNHVFFSPINWDDLYHKRLTPPFNPNVTGPADLKHFDPEFTQEAVSKSIGCTPDTVASSSGASSAFLGFSYAPEDDDILDC

SEQ ID NO: 63254 - protein, 367 aa, Homo sapiens
MNSSPAGTPSPQPSRANGNINLGPSANPNAQPTDFDFLKVIGKGNYGKVLLAKRKSDGAFYAVKVLQKKSILKKKEQSHIMAERSVLLKNVRHPFLVGLRYSFQTPEKLYFVLDYVNGGELFFHLQRERRFLEPRARFYAAEVASAIGYLHSLNIIYRDLKPENILLDCQGHVVLTDFGLCKEGVEPEDTTSTFCGTPEYLAPEVLRKEPYDRAVDWWCLGAVLYEMLHGLPPFYSQDVSQMYENILHQPLQIPGGRTVAACDLLQSLLHKDQRQRLGSKADFLEIKNHVFFSPINWDDLYHKRLTPPFNPNVTGPADLKHFDPEFTQEAVSKSIGCTPDTVASSSGASSAFLGFSYAPEDDDILDC

SEQ ID NO: 63255 - protein, 367 aa, Homo sapiens; identical to SEQ ID NO: 63254

SEQ ID NO: 63256 - protein, 198 aa, Homo sapiens
MNSSPAGTPSPQPSRANGNINLGPSANPNAQPTDFDFLKVIGKGNYGKVLLAKRKSDGAFYAVKVLQKKSILKKKESHIMAERSVLLKNVRHPFLVGLRYSFQTPEKLYFVLDYVNGGELFFHLQRERRFLEPRARFYAAEVASAIGYLHSLNIIYRDLKPENILLDCQGHVVLTDFGLCKEGVEPEDTTSTFCGTPE

SEQ ID NO: 63257 - protein, 367 aa, Homo sapiens; identical to SEQ ID NO: 63254

SEQ ID NO: 63258 - protein, 393 aa, Homo sapiens
MQGLLTSGRKPSGGGRCTELPDHCYRMNSSPAGTPSPQPSRANGNINLGPSANPNAQPTDFDFLKVIGKGNYGKVLLAKRKSDGAFYAVKVLQKKSILKKKEQSHIMAERSVLLKNVRHPFLVGLRYSFQTPEKLYFVLDYVNGGELFFHLQRERRFLEPRARFYAAEVASAIGYLHSLNIIYRDLKPENILLDCQGHVVLTDFGLCKEGVEPEDTTSTFCGTPEYLAPEVLRKEPYDRAVDWWCLGAVLYEMLHGLPPFYSQDVSQMYENILHQPLQIPGGRTVAACDLLQSLLHKDQRQRLGSKADFLEIKNHVFFSPINWDDLYHKRLTPPFNPNVTGPADLKHFDPEFTQEAVSKSIGCTPDTVASSSGASSAFLGFSYAPEDDDILDC

SEQ ID NO: 63259 - protein, 496 aa, Homo sapiens
MQRDHTMDYKESCPSVSIPSSDEHREKKKRFTVYKVLVSVGRSEWFVFRRYAEFDKLYNTLKKQFPAMALKIPAKRIFGDNFDPDFIKQRRAGLNEFIQNLVRYPELYNHPDVRAFLQMDSPKHQSDPSEDEDERSSQKLHSTSQNINLGPSGNPHAKPTDFDFLKVIGKGSFGKVLLAKRKLDGKFYAVKVLQKKIVLNRKEQKHIMAERNVLLKNVKHPFLVGLHYSFQTTEKLYFVLDFVNGGELFFHLQRERSFPEHRARFYAAEIASALGYLHSIKIVYRDLKPENILLDSVGHVVLTDFGLCKEGIAISDTTTTFCGTPEYLAPEVIRKQPYDNTVDWWCLGAVLYEMLYGLPPFYCRDVAEMYDNILHKPLSLRPGVSLTAWSILEELLEKDRQNRLGAKEDFLEIQNHPFFESLSWADLVQKKIPPPFNPNVAGPDDIRNFDTAFTEETVPYSVCVSSDYSIVNASVLEADDAFVGFSYAPPSEDLFL

SEQ ID NO: 63260 - protein, 496 aa, Homo sapiens; identical to SEQ ID NO: 63259

SEQ ID NO: 63261 - protein, 496 aa, Homo sapiens; identical to SEQ ID NO: 63259

SEQ ID NO: 63262 - protein, 496 aa, Homo sapiens; identical to SEQ ID NO: 63259

SEQ ID NO: 63263 - protein, 464 aa, Homo sapiens
MQRDHTMDYKESCPSVSIPSSDEHREKKKRFTVYKVLVSVGRSEWFVFRRYAEFDKLYNTLKKQFPAMALKIPAKRIFGDNFDPDFIKQRRAGLNEFIQNLVRYPELYNHPDVRAFLQMDSPKHQSDPSEDEDERSSQKLHSTSQNINLGPSGNPHAKPTDFDFLKVIGKGSFGKVLLAKRKLDGKFYAVKVLQKKIVLNRKEQKHIMAERNVLLKNVKHPFLVGLHYSFQTTEKLYFVLDFVNGGELFFHLQRERSFPEHRARFYAAEIASALGYLHSIKIVYRDLKPENILLDSVGHVVLTDFGLCKEGIAISDTTTTFCGTPEPPFYCRDVAEMYDNILHKPLSLRPGVSLTAWSILEELLEKDRQNRLGAKEDFLEIQNHPFFESLSWADLVQKKIPPPFNPNVAGPDDIRNFDTAFTEETVPYSVCVSSDYSIVNASVLEADDAFVGFSYAPPSEDLFL

SEQ ID NO: 63264 - protein, 496 aa, Homo sapiens; identical to SEQ ID NO: 63259

SEQ ID NO: 63265 - protein, 496 aa, Homo sapiens; identical to SEQ ID NO: 63259

SEQ ID NO: 63266 - protein, 514 aa, Homo sapiens
MVLDLDLFRVDKGGDPALIRETQEKRFKDPGLVDQLVKADSEWRRCRFRADNLNKLKNLCSKTIGEKMKKKEPVGDDESVPENVLSFDDLTADALANLKVSQIKKVRLLIDEAILKCDAERIKLEAERFENLREIGNLLHPSVPISNDEDVDNKVERIWGDCTVRKKYSHVDLVVMVDGFEGEKGAVVAGSRGYFLKGVLVFLEQALIQYALRTLGSRGYIPIYTPFFMRKEVMQEVAQLSQFDEELYKVIGKGSEKSDDNSYDEKYLIATSEQPIAALHRDEWLRPEDLPIKYAGLSTCFRQEVGSHGRDTRGIFRVHQFEKIEQFVYSSPHDNKSWEMFEEMITTAEEFYQSLGIPYHIVNIVSGSLNHAASKKLDLEAWFPGSGAFRELVSCSNCTDYQARRLRIRYGQTKKMMDKVEFVHMLNATMCATTRTICAILENYQTEKGITVPEKLKEFMPPGLQELIPFVKPAPIEQEPSKKQKKQHEGSKKKAAARDVTLENRLQNMEVTDA

SEQ ID NO: 63267 - protein, 536 aa, Homo sapiens
MVLDLDLFRVDKGGDPALIRETQEKRFKDPGLVDQLVKADSEWRRCRFRADNLNKLKNLCSKTIGEKMKKKEPVGDDESVPENVLSFDDLTADALANLKVSQIKKVRLLIDEAILKCDAERIKLEAERFENLREIGNLLHPSVPISNDEDVDNKVERIWGDCTVRKKYSHVDLVVMVDGFEGEKGAVVAGSRGYFLKGVLVFLEQALIQYALRTLGSRGYIPIYTPFFMRKEVMQEVAQLSQFDEELYKVIGKGSEKSDDNSYDEKYLIATSEQPIAALHRDEWLRPEDLPIKYAGLSTCFRQEVGSHGRDTRGIFRVHQFEKIEQFVYSSPHDNKSWEMFEEMITTAEEFYQSLGIPYHIVNIVSGSLNHAASKKLDLEAWFPGSGAFRELVSCSNCTDYQARRLRIRYGQTKKMMDKRKNNLHLSTQNKLEASLFSPKKVEFVHMLNATMCATTRTICAILENYQTEKGITVPEKLKEFMPPGLQELIPFVKPAPIEQEPSKKQKKQHEGSKKKAAARDVTLENRLQNMEVTDA

SEQ ID NO: 63268 - protein, 520 aa, Homo sapiens
MAASMARRLWPLLTRRGFRPRGGCISNDSPRRSFTTEKRNRNLLYEYAREGYSALPQLDIERFCACPEEAAHALELRKGELRSADLPAIISTWQELRQLQEQIRSLEEEKAAVTEAVRALLANQDSGEVQQVRLDPGAGSIFGPTFLPFPGQLSLLVEAQLEEQFYLQALKLPNQTHPDVPVGDESQARVLHMVGDKPVFSFQPRGHLEIGEKLDIIRQKRLSHVSGHRSYYLRGAGALLQHGLVNFTFNKLLRRGFTPMTVPDLLRGAVFEGCGMTPNANPSQIYNIDPARFKDLNLAGTAEVGLAGYFMDHTVAFRDLPVRMVCSSTCYRAETNTGQEPRGLYRVHHFTKVEMFGVTGPGLEQSSQLLEEFLSLQMEILTELGLHFRVLDMPTQELGLPAYRKFDIEAWMPGRGRFGEVTSASNCTDFQSRRLHIMFQTEAGELQFAHTVNATACAVPRLLIALLESNQQKDGSVLVPPALQSYLGTDRITAPTHVPLQYIGPNQPRKPGLPGQPAVS

SEQ ID NO: 63269 - protein, 518 aa, Homo sapiens
MAASMARRLWPLLTRRGFRPRGGCISNDSPRRSFTTEKRNRNLLYEYAREGYSALPQLDIERFCACPEEAAHALELRKGELRSADLPAIISTWQELRQLQEQIRSLEEEKAAVTEAVRALLANQDSGEVQQDPKYQGLRARGREIRKELVHLYPREAQLEEQFYLQALKLPNQTHPDVPVGDESQARVLHMVGDKPVFSFQPRGHLEIGEKLDIIRQKRLSHVSGHRSYYLRGAGALLQHGLVNFTFNKLLRRGFTPMTVPDLLRGAVFEGCGMTPNANPSQIYNIDPARFKDLNLAGTAEVGLAGYFMDHTVAFRDLPVRMVCSSTCYRAETNTGQEPRGLYRVHHFTKVEMFGVTGPGLEQSSQLLEEFLSLQMEILTELGLHFRVLDMPTQELGLPAYRKFDIEAWMPGRGRFGEVTSASNCTDFQSRRLHIMFQTEAGELQFAHTVNATACAVPRLLIALLESNQQKDGSVLVPPALQSYLGTDRITAPTHVPLQYIGPNQPRKPGLPGQPAVS

SEQ ID NO: 63270 - protein, 278 aa, Homo sapiens
MGARLSRRRLPADPSLALDALPPELLVQVLSHVPPRSLVTRCRPVCRAWRDIVDGPTVWLLQLARDRSAEGRALYAVAQRCLPSNEDKEEFPLCALARYCLRAPFGRNLIFNSCGEQGFRGWEVEHGGNGWAIEKNLTPVPGAPSQTCFVTSFEWCSKRQLVDLVMEGVWQELLDSAQIEICVADWWGARENCGCVYQLRVRLLDVYEKEVVKFSASPDPVLQWTERGCRQVSHVFTNFGKGIRYVSFEQYGRDVSSWVGHYGALVTHSSVRVRIRLS

SEQ ID NO: 63271 - protein, 287 aa, Homo sapiens
FKQGLWLLEMGARLSRRRLPADPSLALDALPPELLVQVLSHVPPRSLVTRCRPVCRAWRDIVDGPTVWLLQLARDRSAEGRALYAVAQRCLPSNEDKEEFPLCALARYCLRAPFGRNLIFNSCGEQGFRGWEVEHGGNGWAIEKNLTPVPGAPSQTCFVTSFEWCSKRQLVDLVMEGVWQELLDSAQIEICVADWWGARENCGCVYQLRVRLLDVYEKEVVKFSASPDPVLQWTERGCRQVSHVFTNFGKGIRYVSFEQYGRDVSSWVGHYGALVTHSSVRVRIRLS

SEQ ID NO: 63272 - protein, 520 aa, Homo sapiens; identical to SEQ ID NO: 63268

SEQ ID NO: 63273 - protein, 518 aa, Homo sapiens
MEGVWQELLDSAQIEICVADWWGARENCGCVYQLRVRLLDVYEKEVVKFSASPDPVLQWTERGCRQVSHVFTNFGKGIRYVSFEQYGRDISTWQELRQLQEQIRSLEEEKAAVTEAVRALLANQDSGEVQQDPKYQGLRARGREIRKELVHLYPREAQLEEQFYLQALKLPNQTHPDVPVGDESQARVLHMVGDKPVFSFQPRGHLEIGEKLDIIRQKRLSHVSGHRSYYLRGAGALLQHGLVNFTFNKLLRRGFTPMTVPDLLRGAVFEGCGMTPNANPSQIYNIDPARFKDLNLAGTAEVGLAGYFMDHTVAFRDLPVRMVCSSTCYRAETNTGQEPRGLYRVHHFTKVEMFGVTGPGLEQSSQLLEEFLSLQMEILTELGLHFRVLDMPTQELGLPAYRKFDIEAWMPGRGRFGEVTSASNCTDFQSRRLHIMFQTEAGELQFAHTVNATACAVPRLLIALLESNQQKDGSVLVPPALQSYLGTDRITAPTHVPLQYIGPNQPRKPGLPGQPAVS

SEQ ID NO: 63274 - protein, 236 aa, Homo sapiens
MAASMARRLWPLLTRRGFRPRGGCISNDSPRRSFTTEKRNRNLLYEYAREGYSALPQLDIERFCACPEEAAHALELRKGELRSADLPAIISTWQELRQLQEQIRSLEEEKAAVTEAVRALLANQDSGEVQQDPKYQGLRARGREIRKELVHLYPREAQLEEQFYLQALKLPNQTHPDVPVGDESQARVLHMVGDKPGACPTCLATGPITCAGLEPSCSTAWSTSHSTSFSAGASPP

SEQ ID NO: 63275 - protein, 426 aa, Homo sapiens
MHALFADSFAALGRLDNITLVMVFHPQYLESFLKTQHYLLQMDGPLPLHYRHYIGIMAAARHQCSYLVNLHVNDFLHVGGDPKWLNGLENAPQKLQNLGELNKVLAHRPWLITKEHIEGLLKAEEHSWSLAELVHAVVLLTHYHSLASFTFGCGISPEIHCDGGHTFRPPSVSNYCICDITNGNHSVDEMPVNSAENVSVSDSFFEVEALMEKMRQLQECRDEEEASQEEMASRFEIEKRESMFVFSSDDEEVTPARAVSRHFEDTSYGYKDFSRHGMHVPTFRVQDYCWEDHGYSLVNRLYPDVGQLIDEKFHIAYNLTYNTMAMHKDVDTSMLRRAIWNYIHCMFGIRYDDYDYGEINQLLDRSFKVYIKTVVCTPEKVTKRMYDSFWRQFKHSEKVHVNLLLIEARMQAELLYALRAITRYMT

SEQ ID NO: 63276 - protein, 492 aa, Homo sapiens
MRLAAAANEAYTAPLAVSGLLGCKQCGGGRDQDEELGIRIPRPLGQGPSRFIPEKEILQVGSEDAQMHALFADSFAALGRLDNITLVMVFHPQYLESFLKTQHYLLQMDGPLPLHYRHYIGIMAAARHQCSYLVNLHVNDFLHVGGDPKWLNGLENAPQKLQNLGELNKVLAHRPWLITKEHIEGLLKAEEHSWSLAELVHAVVLLTHYHSLASFTFGCGISPEIHCDGGHTFRPPSVSNYCICDITNGNHSVDEMPVNSAENVSVSDSFFEVEALMEKMRQLQECRDEEEASQEEMASRFEIEKRESMFVFSSDDEEVTPARAVSRHFEDTSYGYKDFSRHGMHVPTFRVQDYCWEDHGYSLVNRLYPDVGQLIDEKFHIAYNLTYNTMAMHKDVDTSMLRRAIWNYIHCMFGIRYDDYDYGEINQLLDRSFKVYIKTVVCTPEKVTKRMYDSFWRQFKHSEKVHVNLLLIEARMQAELLYALRAITRYMT

SEQ ID NO: 63277 - protein, 551 aa, Homo sapiens
MAEGENEVRWDGLCSRDSTTRETALENIRQTILRKTEYLRSVKETPHRPSDGLSNTESSDGLNKLLAHLLMLSKRCPFKDVREKSEFILKSIQELGIRIPRPLGQGPSRFIPEKEILQVGSEDAQMHALFADSFAALGRLDNITLVMVFHPQYLESFLKTQHYLLQMDGPLPLHYRHYIGIMAAARHQCSYLVNLHVNDFLHVGGDPKWLNGLENAPQKLQNLGELNKVLAHRPWLITKEHIEGLLKAEEHSWSLAELVHAVVLLTHYHSLASFTFGCGISPEIHCDGGHTFRPPSVSNYCICDITNGNHSVDEMPVNSAENVSVSDSFFEVEALMEKMRQLQECRDEEEASQEEMASRFEIEKRESMFVFSSDDEEVTPARAVSRHFEDTSYGYKDFSRHGMHVPTFRVQDYCWEDHGYSLVNRLYPDVGQLIDEKFHIAYNLTYNTMAMHKDVDTSMLRRAIWNYIHCMFGIRYDDYDYGEINQLLDRSFKVYIKTVVCTPEKVTKRMYDSFWRQFKHSEKVHVNLLLIEARMQAELLYALRAITRYMT

SEQ ID NO: 63278 - protein, 433 aa, Homo sapiens
MRAEGLGGLERFCSPGKGRGLRALQPFQVGDLLFSCPAYAYVLTVNERGNHCEYCFTRKEGLSKCGRCKQAFYCNVECQKEDWPMHKLECSPMVVFGENWNPSETVRLTARILAKQKIHPERTPSEKLLAVKEFESHLDKLDNEKKDLIQSDIAALHHFYSKHLGFPDNDSLVVLFAQVNCNGFTIEDEELSHLGSAIFPDVALMNHSCCPNVIVTYKGTLAEVRAVQEIKPGEEVFTSYIDLLYPTEDRNDRLRDSYFFTCECQECTTKDKDKAKVEIRKLSDPPKAEAIRDMVRYARNVIEEFRRAKHYKSPSELLEICELSQEKMSSVFEDSNVYMLHMMYQAMGVCLYMQDWEGALQYGQKIIKPYSKHYPLYSLNVASMWLKLGRLYMGLEHKAAGEKALKKAIAIMEVAHGKDHPYISEIKQEIESH

SEQ ID NO: 63279 - protein, 272 aa, Homo sapiens
MRAEGLGGLERFCSPGKGRGLRALQPFQVGDLLFSCPAYAYVLTVNERGNHCEYCFTRKEGLSKCGRCKQAFYCNVECQKEDWPMHKLECSPMVVFGENWNPSETVRLTARILAKQKIHPERTPSEKLLAVKEFESHLDKLDNEKKDLIQSDIAALHHFYSKHLGFPDNDSLVVLFAQVNCNGFTIEDEELSHLGSAIFPDVALMNHSCCPNVIVTYKGTLAEVRAVQEIKPGEEVFTSYIDLLYPTEDRNDRLRDSYFFTCECQECTTKDK

SEQ ID NO: 63280 - protein, 1903 aa, Homo sapiens
MAAGTWAAAAAAAAADYFVLVAFGPHPRGSGEGQGQILQRFPEKDWEDNPFPQGIELFCQPSGWQLCPERNPPTFFVAVLTDINSERHYCACLTFWEPAEPSQETTRVEDATEREEEGDEGGQTHLSPTAPAPSAQLFAPKTLVLVSRLDHTEVFRNSLGLIYAIHVEGLNVCLENVIGNLLTCTVPLAGGSQRTISLGAGDRQVIQTPLADSLPVSRCSVALLFRQLGITNVLSLFCAALTEHKVLFLSRSYQRLADACRGLLALLFPLRYSFTYVPILPAQLLEVLSTPTPFIIGVNAAFQAETQELLDVIVADLDGGTVTIPECVHIPPLPEPLQSQTHSVLSMVLDPELELADLAFPPPTTSTSSLKMQDKELRAVFLRLFAQLLQGYRWCLHVVRIHPEPVIRFHKAAFLGQRGLVEDDFLMKVLEGMAFAGFVSERGVPYRPTDLFDELVAHEVARMRADENHPQRVLRHVQELAEQLYKNENPYPAVAMHKVQRPGESSHLRRVPRPFPRLDEGTVQWIVDQAAAKMQGAPPAVKAERRTTVPSGPPMTAILERCSGLHVNSARRLEVVRNCISYVFEGKMLEAKKLLPAVLRALKGRAARRCLAQELHLHVQQNRAVLDHQQFDFVVRMMNCCLQDCTSLDEHGIAAALLPLVTAFCRKLSPGVTQFAYSCVQEHVVWSTPQFWEAMFYGDVQTHIRALYLEPTEDLAPAQEVGEAPSQEDERSALDVASEQRRLWPTLSREKQQELVQKEESTVFSQAIHYANRMSYLLLPLDSSKSRLLRERAGLGDLESASNSLVTNSMAGSVAESYDTESGFEDAETCDVAGAVVRFINRFVDKVCTESGVTSDHLKGLHVMVPDIVQMHIETLEAVQRESRRLPPIQKPKLLRPRLLPGEECVLDGLRVYLLPDGREEGAGGSAGGPALLPAEGAVFLTTYRVIFTGMPTDPLVGEQVVVRSFPVAALTKEKRISVQTPVDQLLQDGLQLRSCTFQLLKMAFDEEVGSDSAELFRKQLHKLRYPPDIRATFAFTLGSAHTPGRPPRVTKDKGPSLRTLSRNLVKNAKKTIGRQHVTRKKYNPPSWEHRGQPPPEDQEDEISVSEELEPSTLTPSSALKPSDRMTMSSLVERACCRDYQRLGLGTLSSSLSRAKSEPFRISPVNRMYAICRSYPGLLIVPQSVQDNALQRVSRCYRQNRFPVVCWRSGRSKAVLLRSGGLHGKGVVGLFKAQNAPSPGQSQADSSSLEQEKYLQAVVSSMPRYADASGRNTLSGFSSAHMGSHVPSPRARVTTLSNPMAASASRRTAPRGKWGSVRTSGRSSGLGTDVGSRLAGRDALAPPQANGGPPDPGFLRPQRAALYILGDKAQLKGVRSDPLQQWELVPIEVFEARQVKASFKKLLKACVPGCPAAEPSPASFLRSLEDSEWLIQIHKLLQVSVLVVELLDSGSSVLVGLEDGWDITTQVVSLVQLLSDPFYRTLEGFRLLVEKEWLSFGHRFSHRGAHTLAGQSSGFTPVFLQFLDCVHQVHLQFPMEFEFSQFYLKFLGYHHVSRRFRTFLLDSDYERIELGLLYEEKGERRGQVPCRSVWEYVDRLSKRTPVFHNYMYAPEDAEVLRPYSNVSNLKVWDFYTEETLAEGPPYDWELAQGPPEPPEEERSDGGAPQSRRRVVWPCYDSCPRAQPDAISRLLEELQRLETELGQPAERWKDTWDRVKAAQRLEGRPDGRGTPSSLLVSTAPHHRRSLGVYLQEGPVGSTLSLSLDSDQSSGSTTSGSRQAARRSTSTLYSQFQTAESENRSYEGTLYKKGAFMKPWKARWFVLDKTKHQLRYYDHRVDTECKGVIDLAEVEAVAPGTPTMGAPKTVDEKAFFDVKTTRRVYNFCAQDVPSAQQWVDRIQSCLSDA

SEQ ID NO: 63281 - protein, 898 aa, Homo sapiens
MAAGTWAAAAAAAAADYFVLVAFGPHPRGSGEGQGQILQRFPEKDWEDNPFPQGIELFCQPSGWQLCPERNPPTFFVAVLTDINSERHYCACLTFWEPAEPSQQETTRVEDATEREEEGDEGGQTHLSPTAPAPSAQLFAPKTLVLVSRLDHTEVFRNSLGLIYAIHVEGLNVCLENVIGNLLTCTVPLAGGSQRTISLGAGDRQVIQTPLADSLPVSRCSVALLFRQLGITNVLSLFCAALTEHKVLFLSRSYQRLADACRGLLALLFPLRYSFTYVPILPAQLLEVLSTPTPFIIGVNAAFQAETQELLDVIVADLDGGTVTIPECVHIPPLPEPLQSQTHSVLSMVLDPELELADLAFPPPTTSTSSLKMQDKELRAVFLRLFAQLLQGYRWCLHVVRIHPEPVIRFHKAAFLGQRGLVEDDFLMKVLEGMAFAGFVSERGVPYRPTDLFDELVAHEVARMRADENHPQRVLRHVQELAEQLYKNENPYPAVAMHKVQRPGESSHLRRVPRPFPRLDEGTVQWIVDQAAAKMQGAPPAVKAERRTTVPSGPPMTAILERCSGLHVNSARRLEVVRNCISYVFEGKMLEAKKLLPAVLRALKGRAARRCLAQELHLHVQQNRAVLDHQQFDFVVRMMNCCLQDCTSLDEHGIAAALLPLVTAFCRKLSPGVTQFAYSCVQEHVVWSTPQFWEAMFYGDVQTHIRALYLEPTEDLAPAQEVGEAPSQEDERSALDVASEQRRLWPTLSREKQQELVQKEESTVFSQAIHYANRMSYLLLPLDSSKSRLLRERAGLGDLESASNSLVTNSMAGSVAESYDTESGFEDAETCDVAGAVVRFINRFVDKVCTESGVTSDHLKGLHVMVPDIVQMHIETLEAVQRESRRLPPIQKPKLLRP

SEQ ID NO: 63282 - protein, 1893 aa, Homo sapiens
MARLADYFVLVAFGPHPRGSGEGQGQILQRFPEKDWEDNPFPQGIELFCQPSGWQLCPERNPPTFFVAVLTDINSERHYCACLTFWEPAEPSQETTRVEDATEREEEGDEGGQTHLSPTAPAPSAQLFAPKTLVLVSRLDHTEVFRNSLGLIYAIHVEGLNVCLENVIGNLLTCTVPLAGGSQRTISLGAGDRQVIQTPLADSLPVSRCSVALLFRQLGITNVLSLFCAALTEHKVLFLSRSYQRLADACRGLLALLFPLRYSFTYVPILPAQLLEVLSTPTPFIIGVNAAFQAETQELLDVIVADLDGGTVTIPECVHIPPLPEPLQSQTHSVLSMVLDPELELADLAFPPPTTSTSSLKMQDKELRAVFLRLFAQLLQGYRWCLHVVRIHPEPVIRFHKAAFLGQRGLVEDDFLMKVLEGMAFAGFVSERGVPYRPTDLFDELVAHEVARMRADENHPQRVLRHVQELAEQLYKNENPYPAVAMHKVQRPGESSHLRRVPRPFPRLDEGTVQWIVDQAAAKMQGAPPAVKAERRTTVPSGPPMTAILERCSGLHVNSARRLEVVRNCISYVFEGKMLEAKKLLPAVLRALKGRAARRCLAQELHLHVQQNRAVLDHQQFDFVVRMMNCCLQDCTSLDEHGIAAALLPLVTAFCRKLSPGVTQFAYSCVQEHVVWSTPQFWEAMFYGDVQTHIRALYLEPTEDLAPAQEVGEAPSQEDERSALDVASEQRRLWPTLSREKQQELVQKEESTVFSQAIHYANRMSYLLLPLDSSKSRLLRERAGLGDLESASNSLVTNSMAGSVAESYDTESGFEDAETCDVAGAVVRFINRFVDKVCTESGVTSDHLKGLHVMVPDIVQMHIETLEAVQRESRRLPPIQKPKLLRPRLLPGEECVLDGLRVYLLPDGREEGAGGSAGGPALLPAEGAVFLTTYRVIFTGMPTDPLVGEQVVVRSFPVAALTKEKRISVQTPVDQLLQDGLQLRSCTFQLLKMAFDEEVGSDSAELFRKQLHKLRYPPDIRATFAFTLGSAHTPGRPPRVTKDKGPSLRTLSRNLVKNAKKTIGRQHVTRKKYNPPSWEHRGQPPPEDQEDEISVSEELEPSTLTPSSALKPSDRMTMSSLVERACCRDYQRLGLGTLSSSLSRAKSEPFRISPVNRMYAICRSYPGLLIVPQSVQDNALQRVSRCYRQNRFPVVCWRSGRSKAVLLRSGGLHGKGVVGLFKAQNAPSPGQSQADSSSLEQEKYLQAVVSSMPRYADASGRNTLSGFSSAHMGSHVPSPRARVTTLSNPMAASASRRTAPRGKWGSVRTSGRSSGLGTDVGSRLAGRDALAPPQANGGPPDPGFLRPQRAALYILGDKAQLKGVRSDPLQQWELVPIEVFEARQVKASFKKLLKACVPGCPAAEPSPASFLRSLEDSEWLIQIHKLLQVSVLVVELLDSGSSVLVGLEDGWDITTQVVSLVQLLSDPFYRTLEGFRLLVEKEWLSFGHRFSHRGAHTLAGQSSGFTPVFLQFLDCVHQVHLQFPMEFEFSQFYLKFLGYHHVSRRFRTFLLDSDYERIELGLLYEEKGERRGQVPCRSVWEYVDRLSKRTPVFHNYMYAPEDAEVLRPYSNVSNLKVWDFYTEETLAEGPPYDWELAQGPPEPPEEERSDGGAPQSRRRVVWPCYDSCPRAQPDAISRLLEELQRLETELGQPAERWKDTWDRVKAAQRLEGRPDGRGTPSSLLVSTAPHHRRSLGVYLQEGPVGSTLSLSLDSDQSSGSTTSGSRQAARRSTSTLYSQFQTAESENRSYEGTLYKKGAFMKPWKARWFVLDKTKHQLRYYDHRVDTECKGVIDLAEVEAVAPGTPTMGAPKTVDEKAFFDVKTTRRVYNFCAQDVPSAQQWVDRIQSCLSDA

SEQ ID NO: 63283 - protein, 1867 aa, Homo sapiens
MARLADYFVLVAFGPHPRGSGEGQGQILQRFPEKDWEDNPFPQGIELFCQPSGWQLCPERNPPTFFVAVLTDINSERHYCACLTFWEPAEPSQETTRVEDATEREEEGDEGGQTHLSPTAPAPSAQLFAPKTLVLVSRLDHTEVFRNSLGLIYAIHVEGLNVCLENVIGNLLTCTVPLAGGSQRTISLGAGDRQVIQTPLADSLPVSRCSVALLFRQLGITNVLSLFCAALTEHKVLFLSRSYQRLADACRGLLALLFPLRYSFTYVPILPAQLLEVLSTPTPFIIGVNAAFQAETQELLDVIVADLDGGTVTIPECVHIPPLPEPLQSQTHSVLSMVLDPELELADLAFPPPTTSTSSLKMQDKELRAVFLRLFAQLLQGYRWCLHVVRIHPEPVIRFHKAAFLGQRGLVEDDFLMKVLEGMAFAGFVSERGVPYRPTDLFDELVAHEVARMRADENHPQRVLRHVQELAEQLYKNENPYPAVAMHKVQRPGESSHLRRVPRPFPRLDEGTVQWIVDQAAAKMQGAPPAVKAERRTTVPSGPPMTAILERCSGLHVNSARRLEVVRNCISYVFEGKMLEAKKLLPAVLRALKGRAARRCLAQELHLHVQQNRAVLDHQQFDFVVRMMNCCLQDCTSLDEHGIAAALLPLVTAFCRKLSPGVTQFAYSCVQEHVVWSTPQFWEAMFYGDVQTHIRALYLEPTEDLAPAQEVGEAPSQEDERSALDVASEQRRLWPTLSREKQQELVQKEESTVFSQAIHYANRMSYLLLPLDSSKSRLLRERAGLGDLESASNSLVTNSMAGSVAESYDTESGFEDAETCDVAGAVVRFINRFVDKVCTESGVTSDHLKGLHVMVPDIVQMHIETLEAVQRESRRLPPIQKPKLLRPRLLPGEECVLDGLRVYLLPDGREEGAGGSAGGPALLPAEGAVFLTTYRVIFTGMPTDPLVGEQVVVRSFPVAALTKEKRISVQTPVDQLLQDGLQLRSCTFQLLKMAFDEEVGSDSAELFRKQLHKLRYPPDIRATFAFTLGSAHTPGRPPRVTKDKGPSLRTLSRNLVKNAKKTIGRQHVTRKKYNPPSWEHRGQPPPEDQEDEISVSEELEPSTLTPSSALKPSDRMTMSSLVERACCRDYQRLGLGTLSSSLSRAKSEPFRISPVNRMYAICRSYPGLLIVPQSVQDNALQRVSRCYRQNRFPVVCWRSGRSKAVLLRSGGLHGKGVVGLFKAQNAPSPGQSQADSSSLEQEKYLQAVVSSMPRYADASGRNTLSGFSSAHMGSHGKWGSVRTSGRSSGLGTDVGSRLAGRDALAPPQANGGPPDPGFLRPQRAALYILGDKAQLKGVRSDPLQQWELVPIEVFEARQVKASFKKLLKACVPGCPAAEPSPASFLRSLEDSEWLIQIHKLLQVSVLVVELLDSGSSVLVGLEDGWDITTQVVSLVQLLSDPFYRTLEGFRLLVEKEWLSFGHRFSHRGAHTLAGQSSGFTPVFLQFLDCVHQVHLQFPMEFEFSQFYLKFLGYHHVSRRFRTFLLDSDYERIELGLLYEEKGERRGQVPCRSVWEYVDRLSKRTPVFHNYMYAPEDAEVLRPYSNVSNLKVWDFYTEETLAEGPPYDWELAQGPPEPPEEERSDGGAPQSRRRVVWPCYDSCPRAQPDAISRLLEELQRLETELGQPAERWKDTWDRVKAAQRLEGRPDGRGTPSSLLVSTAPHHRRSLGVYLQEGPVGSTLSLSLDSDQSSGSTTSGSRQAARRSTSTLYSQFQTAESENRSYEGTLYKKGAFMKPWKARWFVLDKTKHQLRYYDHRVDTECKGVIDLAEVEAVAPGTPTMGAPKTVDEKAFFDVKTTRRVYNFCAQDVPSAQQWVDRIQSCLSDA

SEQ ID NO: 63284 - protein, 1849 aa, Homo sapiens
MARLADYFIVVGYDHEKPGSGEGLGKIIQRFPQKDWDDTPFPQGIELFCQPGGWQLSRERKQPTFFVVVLTDIDSDRHYCSCLTFYEAEINLQGTKKEEIEGEAKVSGLIQPAEVFAPKSLVLVSRLYYPEIFRACLGLIYTVYVDSLNVSLESLIANLCACLVPAAGGSQKLFSLGAGDRQLIQTPLHDSLPITGTSVALLFQQLGIQNVLSLFCAVLTENKVLFHSASFQRLSDACRALESLMFPLKYSYPYIPILPAQLLEVLSSPTPFIIGVHSVFKTDVHELLDVIIADLDGGTIKIPECIHLSSLPEPLLHQTQSALSLILHPDLEVADHAFPPPRTALSHSKMLDKEVRAVFLRLFAQLFQGYRSCLQLIRIHAEPVIHFHKTAFLGQRGLVENDFLTKVLSGMAFAGFVSERGPPYRSCDLFDELVAFEVERIKVEENNPVKMIKHVRELAEQLFKNENPNPHMAFQKVPRPTEGSHLRVHILPFPEINEARVQELIQENVAKNQNAPPATRIEKKCVVPAGPPVVSIMDKVTTVFNSAQRLEVVRNCISFIFENKILETEKTLPAALRALKGKAARQCLTDELGLHVQQNRAILDHQQFDYIIRMMNCTLQDCSSLEEYNIAAALLPLTSAFYRKLAPGVSQFAYTCVQDHPIWTNQQFWETTFYNAVQEQVRSLYLSAKEDNHAPHLKQKDKLPDDHYQEKTAMDLAAEQLRLWPTLSKSTQQELVQHEESTVFSQAIHFANLMVNLLVPLDTSKNKLLRTSAPGDWESGSNSIVTNSIAGSVAESYDTESGFEDSENTDIANSVVRFITRFIDKVCTESGVTQDHIKSLHCMIPGIVAMHIETLEAVHRESRRLPPIQKPKILRPALLPGEEIVCEGLRVLLDPDGREEATGGLLGGPQLLPAEGALFLTTYRILFRGTPHDQLVGEQTVVRSFPIASITKEKKITMQNQLQQNMQEGLQITSASFQLIKVAFDEEVSPEVVEIFKKQLMKFRYPQSIFSTFAFAAGQTTPQIILPKQKEKNTSFRTFSKTIVKGAKRAGKMTIGRQYLLKKKTGTIVEERVNRPGWNEDDDVSVSDESELPTSTTLKASEKSTMEQLVEKACFRDYQRLGLGTISGSSSRSRPEYFRITASNRMYSLCRSYPGLLVVPQAVQDSSLPRVARCYRHNRLPVVCWKNSRSGTLLLRSGGFHGKGVVGLFKSQNSPQAAPTSSLESSSSIEQEKYLQALLNAVSVHQKLRGNSTLTVRPAFALSPGVWASLRSSTRLISSPTSFIDVGARLAGKDHSASFSNSSYLQNQLLKRQAALYIFGEKSQLRNFKVEFALNCEFVPVEFHEIRQVKASFKKLMRACIPSTIPTDSEVTFLKALGDSEWFPQLHRIMQLAVVVSEVLENGSSVLVCLEEGWDITAQVTSLVQLLSDPFYRTLEGFQMLVEKEWLSFGHKFSQRSSLTLNCQGSGFAPVFLQFLDCVHQVHNQYPTEFEFNLYYLKFLAFHYVSNRFKTFLLDSDYERLEHGTLFDDKGEKHAKKGVCIWECIDRMHKRSPIFFNYLYSPLEIEALKPNVNVSSLKKWDYYIEETLSTGPSYDWMMLTPKHFPSEDSDLAGEAGPRSQRRTVWPCYDDVSCTQPDALTSLFSEIEKLEHKLNQAPEKWQQLWERVTVDLKEEPRTDRSQRHLSRSPGIVSTNLPSYQKRSLLHLPDSSMGEEQNSSISPSNGVERRAATLYSQYTSKNDENRSFEGTLYKRGALLKGWKPRWFVLDVTKHQLRYYDSGEDTSCKGHIDLAEVEMVIPAGPSMGAPKHTSDKAFFDLKTSKRVYNFCAQDGQSAQQWMDKIQSCISDA

SEQ ID NO: 63285 - protein, 1596 aa, Homo sapiens
MESRETLSSSRQRGGESDFLPVSSAKPPAAPGCAGEPLLSTPGPGKGIPVGGERMEPEEEDELGSGRDVDSNSNADSEKWVAGDGLEEQEFSIKEANFTEGSLKLKIQTTKRAKKPPKNLENYICPPEIKITIKQSGDQKVSRAGKNSKATKEEERSHSKKKLLTASDLAASDLKGFQPQAYERPQKHSTLHYDTGLPQDFTGDTLKPKHQQKSSSQNHMDWSTNSDSGPVTQNCFISPESGRETASTSKIPALEPVASFAKAQGKKGSAGNTWSQLSNNNKDLLLGGVAPSPSSHSSPAPPSSSAECNGLQPLVDQDGGGTKEPPEPPTVGSKKKSSKKDVISQTIPNPDLDWVKNAQKAFDNTEGKREGYSADSAQEASPARQNVSSASNPENDSSHVRITIPIKAPSLDPTNHKRKKRQSIKAVVEKIMPEKALASGITMSSEVVNRILSNSEGNKKDPRVPKLSKMIENESPSVGLETGGNAEKVIPGGVSKPRKPPMVMTPPTCTDHSPSRKLPEIQHPKFAAKRRWTCSKPKPSTMLREAVMATSDKLMLEPPSAYPITPSSPLYTNTDSLTVITPVKKKRGRPKKQPLLTVETIHEGTSTSPVSPISREFPGTKKRKRRRNLAKLAQLVPGEDKPMSEMKFHKKVGKLGVLDKKTIKTINKMKTLKRKNILNQILSCSSSVALKAKAPPETSPGAAAIESKLGKQINVSKRGTIYIGKKRGRKPRAELPPPSEEPKTAIKHPRPVSSQPDVPAVPSNFQSLVASSPAAMHPLSTQLGGSNGNLSPASTETNFSELKTMPNLQPISALPTKTQKGIHSGTWKLSPPRLMANSPSHLCEIGSLKEITLSPVSESHSEETIPSDSGIGTDNNSTSDQAEKSSESRRRYSFDFCSLDNPEAIPSDTSTKNRHGHRQKHLIVDNFLAHESLKKPKHKRKRKSLQNRDDLQFLADLEELITKFQVFRISHRSYTFYHENPYPSIFRINFDHYYPVPYIQYDPLLYLRRTSDLKSKKKRGRPAKTNDTMTKVPFLQGFSYPIPSGSYYAPYGMPYTSMPMMNLGYYGQYPAPLYLSHTLGAASPFMRPTVPPPQFHTNSHVKMSGAAKHKAKHGVHLQGPVSMGLGDMQPSLNPPKVGSASLSSGRLHKRKHKHKHKHKEDRILGTHDNLSGLFAGKATGFSSHILSERLSSADKELPLVSEKNKHKEKQKHQHSEAGHKASKNNFEVDTLSTLSLSDAQHWTQAKEKGDLSSEPVDSCTKRYSGSGGDGGSTRSENLDVFSEMNPSNDKWDSDVSGSKRRSYEGFGTYREKDIQAFKMNRKERSSYDSSMSPGMPSPHLKVDQTAVHSKNEGSVPTMMTRKKPAAVDSVTIPPAPVLSLLAASAATSDAVGSSLKKRFKRREIEAIQCEVRKMCNYTKILSTKKNLDHVNKILKAKRLQRQSKTGNNFVKKRRGRPRKQPTQFDEDSRDQMPVLEKCIDLPSKRGQKPSLSPLVLEPAASQDTIMATIEAVIHMAREAPPLPPPPPPPLPPPPPPPLPPPPPLPKTPRGGKRKHKPQAPAQPPQQSPPQQPLPQEEEVKAKRQRKSRGSESEVLP

SEQ ID NO: 63286 - protein, 242 aa, Homo sapiens
MESRETLSSSRQRGGESDFLPVSSAKPPAAPGCAGEPLLSTPGPGKGIPVGGERMEPEEEDELGSGRDVDSNSNADSEKWVAGDGLEEQEFSIKEANFTEGSLKLKIQTTKRAKKPPKNLENYICPPEIKITIKQSGDQKVSRAGKNSKATKEEERSHSKKKLLTASDLAASDLKGFQPQIKDSSKEEVWKRRGGQGIPFKKQFLSQERAMCFSCPRNPFPAKPGSLTLPFHSEPAVWAQEV

SEQ ID NO: 63287 - protein, 137 aa, Homo sapiens
MESRETLSSSRQRGGESDFLPVSSAKPPAAPGCAGEPLLSTPGPGKGIPVGGERMEPEEEDELGSGRDVDSNSNADSEKWVAGDGLEEQEFSIKEANFTEGSLKLKIQTTKRAKKPPKNLENYICPPEIKITIKQSG

SEQ ID NO: 63288 - protein, 684 aa, Homo sapiens
MFAEAAKTTRPCGMAEFKEKPEAPTEQLDVACGQENLPVGAWPPGAAPAPFQYTPDHVVGPGADIDPTQITFPGCICVKTPCLPGTCSCLRHGENYDDNSCLRDIGSGGKYAEPVFECNVLCRCSDHCRNRVVQKGLQFHFQVFKTHKKGWGLRTLEFIPKGRFVCEYAGEVLGFSEVQRRIHLQTKSDSNYIIAIREHVYNGQVMETFVDPTYIGNIGRFLNHSCEPNLLMIPVRIDSMVPKLALFAAKDIVPEEELSYDYSGRYLNLTVSEDKERLDHGKLRKPCYCGAKSCTAFLPFDSSLYCPVEKSNISCGNEKEPSMCGSAPSVFPSCKRLTLETMKMMLDKKQIRAIFLFEFKMGRKAAETTRNINNAFGPGTANERTVQWWFKKFCKGDESLEDEERSGRPSEVDNDQLRAIIEADPLTTTREVAEELNVNHSTVVRHLKQIGKVKKLDKWVPHELTENQKNRRFEVSSSLILRNHNEPFLDRIVTCDEKWILYDNRRRSAQWLDQEEAPKHFPKPILHPKKVMVTIWWSAAGLIHYSFLNPGETITSEKYAQEIDEMNQKLQRLQLALVNRKGPILLHDNARPHVAQPTLQKLNELGYEVLPHPPYSPDLLPTNYHVFKHLNNFLQGKRFHNQQDAENAFQEFVESQSTDFYATGINQLISRWQKCVDCNGSYFD

SEQ ID NO: 63289 - protein, 365 aa, Homo sapiens
MFAEAAKTTRPCGMAEFKEKPEAPTEQLDVACGQENLPVGAWPPGAAPAPFQYTPDHVVGPGADIDPTQITFPGCICVKTPCLPGTCSCLRHGENYDDNSCLRDIGSGGKYAEPVFECNVLCRCSDHCRNRVVQKGLQFHFQVFKTHKKGWGLRTLEFIPKGRFVCEYAGEVLGFSEVQRRIHLQTKSDSNYIIAIREHVYNGQVMETFVDPTYIGNIGRFLNHSCEPNLLMIPVRIDSMVPKLALFAAKDIVPEEELSYDYSGRYLNLTVSEDKERLDHGKLRKPCYCGAKSCTAFLPFDSSLYCPVEKSNISCGNEKEPSMCGSAPSVFPSCKRLTLEVSLFSDKQLAPPYSGRQWLASFTSA

SEQ ID NO: 63290 - protein, 171 aa, Homo sapiens
MFAEAAKTTRPCGMAEFKEKPEAPTEQLDVACGQENLPVGAWPPGAAPAPFQYTPDHVVGPGADIDPTQITFPGCICVKTPCLPGTCSCLRHGENYDDNSCLRDIGSGGKYAEPVFECNVLCRCSDHCRNRVVQKGLQFHFQVFKTHKKGWGLRTLEFIPKGRKVEHQLWK

SEQ ID NO: 63291 - protein, 366 aa, Homo sapiens
MDSDDEMVEEAVEGHLDDDGLPHGFCTVTYSSTDRFEGNFVHGEKNGRGKFFFFDGSTLEGYYVDDALQGQGVYTYEDGGVLQGTYVDGELNGPAQEYDTDGRLIFKGQYKDNIRHGVCWIYYPDGGSLVGEVNEDGEMTGEKIAYVYPDERTALYGKFIDGEMIEGKLATLMSTEEGRPHFELMPGNSVYHFDKSTSSCISTNALLPDPYESERVYVAESLISSAGEGLFSKVAVGPNTVMSFYNGVRITHQEVDSRDWALNGNTLSLDEETVIDVPEPYNHVSKYCASLGHKANHSFTPNCIYDMFVHPRFGPIKCIRTLRAVEADEELTVAYGYDHSPPGKSGPEAPEWYQVELKAFQATQQK

SEQ ID NO: 63292 - protein, 1707 aa, Homo sapiens
MDQEGGGDGQKAPSFQWRNYKLIVDPALDPALRRPSQKVYRYDGVHFSVNDSKYIPVEDLQDPRCHVRSKNRDFSLPVPKFKLDEFYIGQIPLKEVTFARLNDNVRETFLKDMCRKYGEVEEVEILLHPRTRKHLGLARVLFTSTRGAKETVKNLHLTSVMGNIIHAQLDIKGQQRMKYYELIVNGSYTPQTVPTGGKALSEKFQGSGAATETAESRRRSSSDTAAYPAGTTAVGTPGNGTPCSQDTSFSSSRQDTPSSFGQFTPQSSQGTPYTSRGSTPYSQDSAYSSSTTSTSFKPRRSENSYQDAFSRRHFSASSASTTASTAIAATTAATASSSASSSSLSSSSSSSSSSSSSQFRSSDANYPAYYESWNRYQRHTSYPPRRATREEPPGAPFAENTAERFPPSYTSYLPPEPSRPTDQDYRPPASEAPPPEPPEPGGGGGGGGPSPEREEVRTSPRPASPARSGSPAPETTNESVPFAQHSSLDSRIEMLLKEQRSKFSFLASDTEEEEENSSMVLGARDTGSEVPSGSGHGPCTPPPAPANFEDVAPTGSGEPGATRESPKANGQNQASPCSSGDDMEISDDDRGGSPPPAPTPPQQPPPPPPPPPPPPPYLASLPLGYPPHQPAYLLPPRPDGPPPPEYPPPPPPPPHIYDFVNSLELMDRLGAQWGGMPMSFQMQTQMLTRLHQLRQGKGLIAASAGPPGGAFGEAFLPFPPPQEAAYGLPYALYAQGQEGRGAYSREAYHLPMPMAAEPLPSSSVSGEEARLPPREEAELAEGKTLPTAGTVGRVLAMLVQEMKSIMQRDLNRKMVENVAFGAFDQWWESKEEKAKPFQNAAKQQAKEEDKEKTKLKEPGLLSLVDWAKSGGTTGIEAFAFGSGLRGALRLPSFKVKRKEPSEISEASEEKRPRPSTPAEEDEDDPEQEKEAGEPGRPGTKPPKRDEERGKTQGKHRKSFALDSEGEEASQESSSEKDEEDDEEDEEDEDREEAVDTTKKETEVSDGEDEESDSSSKCSLYADSDGENDSTSDSESSSSSSSSSSSSSSSSSSSSSSSSESSSEDEEEEERPAALPSASPPPREVPVPTPAPVEVPVPERVAGSPVTPLPEQEASPARPAGPTEESPPSAPLRPPEPPAGPPAPAPRPDERPSSPIPLLPPPKKRRKTVSFSAIEVVPAPEPPPATPPQAKFPGPASRKAPRGVERTIRNLPLDHASLVKSWPEEVSRGGRSRAGGRGRLTEEEEAEPGTEVDLAVLADLALTPARRGLPALPAVEDSEATETSDEAERPRPLLSHILLEHNYALAVKPTPPAPALRPPEPVPAPAALFSSPADEVLEAPEVVVAEAEEPKPQQLQQQREEGEEEGEEEGEEEEEESSDSSSSSDGEGALRRRSLRSHARRRRPPPPPPPPPPRAYEPRSEFEQMTILYDIWNSGLDSEDMSYLRLTYERLLQQTSGADWLNDTHWVHHTITNLTTPKRKRRPQDGPREHQTGSARSEGYYPISKKEKDKYLDVCPVSARQLEGVDTQGTNRVLSERRSEQRRLLSAIGTSAIMDSDLLKLNQLKFRKKKLRFGRSRIHEWGLFAMEPIAADEMVIEYVGQNIRQMVADMREKRYVQEGIGSSYLFRVDHDTIIDATKCGNLARFINHCCTPNCYAKVITIESQKKIVIYSKQPIGVDEEITYDYKFPLEDNKIPCLCGTESCRGSLN

SEQ ID NO: 63293 - protein, 70 aa, Homo sapiens
MDQEGGGDGQKAPSFQWRNYKLIVDPALDPALRRPSQKVYRYDGVHFSVNDSKYIPVEDLQDPRCHVRSK

SEQ ID NO: 63294 - protein, 247 aa, Homo sapiens
MDQEGGGDGQKAPSFQWRNYKLIVDPALDPALRRPSQKVYRYDGVHFSVNDSKYIPVEDLQDPRCHVRSKNRDFSLPVPKFKLDEFYIGQIPLKEVTFARLNDNVRETFLKDMCRKYGEVEEVEILLHPRTRKHLGLARVLFTSTRGAKETVKNLHLTSVMGNIIHAQLDIKGQQRMKYYELIVNGSYTPQTVPTGGKALSEKFQGSGAATETAESRRRSSSDTAAYPAGTTAVGTPGNGTPCSQDT

SEQ ID NO: 63295 - protein, 1923 aa, Homo sapiens
MENSHPPHHHHQQPPPQPGPSGERRNHHWRSYKLMIDPALKKGHHKLYRYDGQHFSLAMSSNRPVEIVEDPRVVGIWTKNKELELSVPKFKIDEFYVGPVPPKQVTFAKLNDNIRENFLRDMCKKYGEVEEVEILYNPKTKKHLGIAKVVFATVRGAKDAVQHLHSTSVMGNIIHVELDTKGETRMRFYELLVTGRYTPQTLPVGELDAVSPIVNETLQLSDALKRLKDGGLSAGCGSGSSSVTPNSGGTPFSQDTAYSSCRLDTPNSYGQGTPLTPRLGTPFSQDSSYSSRQPTPSYLFSQDPAVTFKARRHESKFTDAYNRRHEHHYVHNSPAVTAVAGATAAFRGSSDLPFGAVGGTGGSSGPPFKAQPQDSATFAHTPPPAQATPAPGFKSAFSPYQTPVAHFPPPPEEPTATAAFGARDSGEFRRAPAPPPLPPAEPLAKEKPGTPPGPPPPDTNSMELGGRPTFGWSPEPCDSPGTPTLESSPAGPEKPHDSLDSRIEMLLKEQRTKLLFLREPDSDTELQMEGSPISSSSSQLSPLAPFGTNSQPGFRGPTPPSSRPSSTGLEDISPTPLPDSDEDEELDLGLGPRPPPEPGPPDPAGLLSQTAEVALDLVGDRTPTSEKMDEGQQSSGEDMEISDDEMPSAPITSADCPKPMVVTPGAAAVAAPSVLAPTLPLPPPPGFPPLPPPPPPPPPQPGFPMPPPLPPPPPPPPPAHPAVTVPPPPLPAPPGVPPPPILPPLPPFPPGLFPVMQVDMSHVLGGQWGGMPMSFQMQTQVLSRLMTGQGACPYPPFMAAAAAAASAGLQFVNLPPYRGPFSLSNSGPGRGQHWPPLPKFDPSVPPPGYMPRQEDPHKATVDGVLLVVLKELKAIMKRDLNRKMVEVVAFRAFDEWWDKKERMAKASLTPVKSGEHKDEDRPKPKDRIASCLLESWGKGEGLGYEGLGLGIGLRGAIRLPSFKVKRKEPPDTTSSGDQKRLRPSTSVDEEDEESERERDRDMADTPCELAKRDPKGVGVRRRPARPLELDSGGEEDEKESLSEEQESTEEEEEAEEEEEEEDDDDDDSDDRDESENDDEDTALSEASEKDEGDSDEEETVSIVTSKAEATSSSESSESSEFESSSESSPSSSEDEEEVVAREEEEEEEEEEMVAEESMASAGPEDFEQDGEEAALAPGAPAVDSLGMEEEVDIETEAVAPEERPSMLDEPPLPVGVEEPADSREPPEEPGLSQEGAMLLSPEPPAKEVEARPPLSPERAPEHDLEVEPEPPMMLPLPLQPPLPPPRPPRPPSPPPEPETTDASHPSVPPEPLAEDHPPHTPGLCGSLAKSQSTETVPATPGGEPPLSGGSSGLSLSSPQVPGSPFSYPAPSPSLSSGGLPRTPGRDFSFTPTFSEPSGPLLLPVCPLPTGRRDERSGPLASPVLLETGLPLPLPLPLPLPLALPAVLRAQARAPTPLPPLLPAPLASCPPPMKRKPGRPRRSPPSMLSLDGPLVRPPAGAALGRELLLLPGQPQTPVFPSTHDPRTVTLDFRNAGIPAPPPPLPPQPPPPPPPPPVEPTKLPFKELDNQWPSEAIPPGPRGRDEVTEEYMELAKSRGPWRRPPKKRHEDLVPPAGSPELSPPQPLFRPRSEFEEMTILYDIWNGGIDEEDIRFLCVTYERLLQQDNGMDWLNDTLWVYHPSTSLSSAKKKKRDDGIREHVTGCARSEGFYTIDKKDKLRYLNSSRASTDEPPADTQGMSIPAQPHASTRAGSERRSEQRRLLSSFTGSCDSDLLKFNQLKFRKKKLKFCKSHIHDWGLFAMEPIAADEMVIEYVGQNIRQVIADMREKRYEDEGIGSSYMFRVDHDTIIDATKCGNFARFINHSCNPNCYAKVITVESQKKIVIYSKQHINVNEEITYDYKFPIEDVKIPCLCGSENCRGTLN

SEQ ID NO: 63296 - protein, 1923 aa, Homo sapiens; identical to SEQ ID NO: 63295

SEQ ID NO: 63297 - protein, 2564 aa, Homo sapiens
MKQLQPQPPPKMGDFYDPEHPTPEEEENEAKIENVQKTGFIKGPMFKGVASSRFLPKGTKTKVNLEEQGRQKVSFSFSLTKKTLQNRFLTALGNEKQSDTPNPPAVPLQVDSTPKMKMEIGDTLSTAEESSPPKSRVELGKIHFKKHLLHVTSRPLLATTTAVASPPTHAAPLPAVIAESTTVDSPPSSPPPPPPPAQATTLSSPAPVTEPVALPHTPITVLMAAPVPLPVDVAVRSLKEPPIIIVPESLEADTKQDTISNSLEEHVTQILNEQADISSKKEDSHIGKDEEIPDSSKISLSCKKTGSKKKSSQSEGIFLGSESDEDSVRTSSSQRSHDLKFSASIEKERDFKKSSAPLKSEDLGKPSRSKTDRDDKYFSYSKLERDTRYVSSRCRSERERRRSRSHSRSERGSRTNLSYSRSERSHYYDSDRRYHRSSPYRERTRYSRPYTDNRARESSDSEEEYKKTYSRRTSSHSSSYRDLRTSSYSKSDRDCKTETSYLEMERRGKYSSKLERESKRTSENEAIKRCCSPPNELGFRRGSSYSKHDSSASRYKSTLSKPIPKSDKFKNSFCCTELNEEIKQSHSFSLQTPCSKGSELRMINKNPEREKAGSPAPSNRLNDSPTLKKLDELPIFKSEFITHDSHDSIKELDSLSKVKNDQLRSFCPIELNINGSPGAESDLATFCTSKTDAVLMTSDDSVTGSELSPLVKACMLSSNGFQNISRCKEKDLDDTCMLHKKSESPFRETEPLVSPHQDKLMSMPVMTVDYSKTVVKEPVDTRVSCCKTKDSDIYCTLNDSNPSLCNSEAENIEPSVMKISSNSFMNVHLESKPVICDSRNLTDHSKFACEEYKQSIGSTSSASVNHFDDLYQPIGSSGIASSLQSLPPGIKVDSLTLLKCGENTSPVLDAVLKSKKSSEFLKHAGKETIVEVGSDLPDSGKGFASRENRRNNGLSGKCLQEAQEEGNSILPERRGRPEISLDERGEGGHVHTSDDSEVVFSSCDLNLTMEDSDGVTYALKCDSSGHAPEIVSTVHEDYSGSSESSNDESDSEDTDSDDSSIPRNRLQSVVVVPKNSTLPMEETSPCSSRSSQSYRHYSDHWEDERLESRRHLYEEKFESIASKACPQTDKFFLHKGTEKNPEISFTQSSRKQIDNRLPELSHPQSDGVDSTSHTDVKSDPLGHPNSEETVKAKIPSRQQEELPIYSSDFEDVPNKSWQQTTFQNRPDSRLGKTELSFSSSCEIPHVDGLHSSEELRNLGWDFSQEKPSTTYQQPDSSYGACGGHKYQQNAEQYGGTRDYWQGNGYWDPRSGRPPGTGVVYDRTQGQVPDSLTDDREEEENWDQQDGSHFSDQSDKFLLSLQKDKGSVQAPEISSNSIKDTLAVNEKKDFSKNLEKNDIKDRGPLKKRRQEIESDSESDGELQDRKKVRVEVEQGETSVPPGSALVGPSCVMDDFRDPQRWKECAKQGKMPCYFDLIEENVYLTERKKNKSHRDIKRMQCECTPLSKDERAQGEIACGEDCLNRLLMIECSSRCPNGDYCSNRRFQRKQHADVEVILTEKKGWGLRAAKDLPSNTFVLEYCGEVLDHKEFKARVKEYARNKNIHYYFMALKNDEIIDATQKGNCSRFMNHSCEPNCETQKWTVNGQLRVGFFTTKLVPSGSELTFDYQFQRYGKEAQKCFCGSANCRGYLGGENRVSIRAAGGKMKKERSRKKDSVDGELEALMENGEGLSDKNQVLSLSRLMVRIETLEQKLTCLELIQNTHSQSCLKSFLERHGLSLLWIWMAELGDGRESNQKLQEEIIKTLEHLPIPTKNMLEESKVLPIIQRWSQTKTAVPPLSEGDGYSSENTSRAHTPLNTPDPSTKLSTEADTDTPKKLMFRRLKIISENSMDSAISDATSELEGKDGKEDLDQLENVPVEEEEELQSQQLLPQQLPECKVDSETNIEASKLPTSEPEADAEIEPKESNGTKLEEPINEETPSQDEEEGVSDVESERSQEQPDKTVDISDLATKLLDSWKDLKEVYRIPKKSQTEKENTTTERGRDAVGFRDQTPAPKTPNRSRERDPDKQTQNKEKRKRRSSLSPPSSAYERGTKRPDDRYDTPTSKKKVRIKDRNKLSTEERRKLFEQEVAQREAQKQQQQMQNLGMTSPLPYDSLGYNAPHHPFAGYPPGYPMQAYVDPSNPNAGKVLLPTPSMDPVCSPAPYDHAQPLVGHSTEPLSAPPPVPVVPHVAAPVEVSSSQYVAQSDGVVHQDSSVAVLPVPAPGPVQGQNYSVWDSNQQSVSVQQQYSPAQSQATIYYQGQTCPTVYGVTSPYSQTTPPIVQSYAQPSLQYIQGQQIFTAHPQGVVVQPAAAVTTIVAPGQPQPLQPSEMVVTNNLLDLPPPSPPKPKTIVLPPNWKTARDPEGKIYYYHVITRQTQWDPPTWESPGDDASLEHEAEMDLGTPTYDENPMKASKKPKTAEADTSSELAKKSKEVFRKEMSQFIVQCLNPYRKPDCKVGRITTTEDFKHLARKLTHGVMNKELKYCKNPEDLECNENVKHKTKEYIKKYMQKFGAVYKPKEDTELE

SEQ ID NO: 63298 - protein, 2564 aa, Homo sapiens
MKQLQPQPPPKMGDFYDPEHPTPEEQEPEAKIENVQKTGFIKGPMFKGVASSRFLPKGTKTKVNLEEQGRQKVSFSFSLTKKTLQNRFLTALGNEKQSDTPNPPAVPLQVDSTPKMKMEIGDTLSTAEESSPPKSRVELGKIHFKKHLLHVTSRPLLATTTAVASPPTHAAPLPAVIAESTTVDSPPSSPPPPPPPAQATTLSSPAPVTEPVALPHTPITVLMAAPVPLPVDVAVRSLKEPPIIIVPESLEADTKQDTISNSLEEHVTQILNEQADISSKKEDSHIGKDEEIPDSSKISLSCKKTGSKKKSSQSEGIFLGSESDEDSVRTSSSQRSHDLKFSASIEKERDFKKSSAPLKSEDLGKPSRSKTDRDDKYFSYSKLERDTRYVSSRCRSERERRRSRSHSRSERGSRTNLSYSRSERSHYYDSDRRYHRSSPYRERTRYSRPYTDNRARESSDSEEEYKKTYSRRTSSHSSSYRDLRTSSYSKSDRDCKTETSYLEMERRGKYSSKLERESKRTSENEAIKRCCSPPNELGFRRGSSYSKHDSSASRYKSTLSKPIPKSDKFKNSFCCTELNEEIKQSHSFSLQTPCSKGSELRMINKNPEREKAGSPAPSNRLNDSPTLKKLDELPIFKSEFITHDSHDSIKELDSLSKVKNDQLRSFCPIELNINGSPGAESDLATFCTSKTDAVLMTSDDSVTGSELSPLVKACMLSSNGFQNISRCKEKDLDDTCMLHKKSESPFRETEPLVSPHQDKLMSMPVMTVDYSKTVVKEPVDTRVSCCKTKDSDIYCTLNDSNPSLCNSEAENIEPSVMKISSNSFMNVHLESKPVICDSRNLTDHSKFACEEYKQSIGSTSSASVNHFDDLYQPIGSSGIASSLQSLPPGIKVDSLTLLKCGENTSPVLDAVLKSKKSSEFLKHAGKETIVEVGSDLPDSGKGFASRENRRNNGLSGKCLQEAQEEGNSILPERRGRPEISLDERGEGGHVHTSDDSEVVFSSCDLNLTMEDSDGVTYALKCDSSGHAPEIVSTVHEDYSGSSESSNDESDSEDTDSDDSSIPRNRLQSVVVVPKNSTLPMEETSPCSSRSSQSYRHYSDHWEDERLESRRHLYEEKFESIASKACPQTDKFFLHKGTEKNPEISFTQSSRKQIDNRLPELSHPQSDGVDSTSHTDVKSDPLGHPNSEETVKAKIPSRQQEELPIYSSDFEDVPNKSWQQTTFQNRPDSRLGKTELSFSSSCEIPHVDGLHSSEELRNLGWDFSQEKPSTTYQQPDSSYGACGGHKYQQNAEQYGGTRDYWQGNGYWDPRSGRPPGTGVVYDRTQGQVPDSLTDDREEEENWDQQDGSHFSDQSDKFLLSLQKDKGSVQAPEISSNSIKDTLAVNEKKDFSKNLEKNDIKDRGPLKKRRQEIESDSESDGELQDRKKVRVEVEQGETSVPPGSALVGPSCVMDDFRDPQRWKECAKQGKMPCYFDLIEENVYLTERKKNKSHRDIKRMQCECTPLSKDERAQGEIACGEDCLNRLLMIECSSRCPNGDYCSNRRFQRKQHADVEVILTEKKGWGLRAAKDLPSNTFVLEYCGEVLDHKEFKARVKEYARNKNIHYYFMALKNDEIIDATQKGNCSRFMNHSCEPNCETQKWTVNGQLRVGFFTTKLVPSGSELTFDYQFQRYGKEAQKCFCGSANCRGYLGGENRVSIRAAGGKMKKERSRKKDSVDGELEALMENGEGLSDKNQVLSLSRLMVRIETLEQKLTCLELIQNTHSQSCLKSFLERHGLSLLWIWMAELGDGRESNQKLQEEIIKTLEHLPIPTKNMLEESKVLPIIQRWSQTKTAVPPLSEGDGYSSENTSRAHTPLNTPDPSTKLSTEADTDTPKKLMFRRLKIISENSMDSAISDATSELEGKDGKEDLDQLENVPVEEEEELQSQQLLPQQLPECKVDSETNIEASKLPTSEPEADAEIEPKESNGTKLEEPINEETPSQDEEEGVSDVESERSQEQPDKTVDISDLATKLLDSWKDLKEVYRIPKKSQTEKENTTTERGRDAVGFRDQTPAPKTPNRSRERDPDKQTQNKEKRKRRSSLSPPSSAYERGTKRPDDRYDTPTSKKKVRIKDRNKLSTEERRKLFEQEVAQREAQKQQQQMQNLGMTSPLPYDSLGYNAPHHPFAGYPPGYPMQAYVDPSNPNAGKVLLPTPSMDPVCSPAPYDHAQPLVGHSTEPLSAPPPVPVVPHVAAPVEVSSSQYVAQSDGVVHQDSSVAVLPVPAPGPVQGQNYSVWDSNQQSVSVQQQYSPAQSQATIYYQGQTCPTVYGVTSPYSQTTPPIVQSYAQPSLQYIQGQQIFTAHPQGVVVQPAAAVTTIVAPGQPQPLQPSEMVVTNNLLDLPPPSPPKPKTIVLPPNWKTARDPEGKIYYYHVITRQTQWDPPTWESPGDDASLEHEAEMDLGTPTYDENPMKASKKPKTAEADTSSELAKKSKEVFRKEMSQFIVQCLNPYRKPDCKVGRITTTEDFKHLARKLTHGVMNKELKYCKNPEDLECNENVKHKTKEYIKKYMQKFGAVYKPKEDTELE

SEQ ID NO: 63299 - protein, 1714 aa, Homo sapiens
MKQLQPQPPPKMGDFYDPEHPTPEKKEREAKIENVQKTGFIKGPMFKGVASSRFLPKGTKTKVNLEEQGRQKVSFSFSLTKKTLQNRFLTALGNEKQSDTPNPPAVPLQVDSTPKMKMEIGDTLSTAEESSPPKSRVELGKIHFKKHLLHVTSRPLLATTTAVASPPTHAAPLPAVIAESTTVDSPPSSPPPPPPPAQATTLSSPAPVTEPVALPHTPITVLMAAPVPLPVDVAVRSLKEPPIIIVPESLEADTKQDTISNSLEEHVTQILNEQADISSKKEDSHIGKDEEIPDSSKISLSCKKTGSKKKSSQSEGIFLGSESDEDSVRTSSSQRSHDLKFSASIEKERDFKKSSAPLKSEDLGKPSRSKTDRDDKYFSYSKLERDTRYVSSRCRSERERRRSRSHSRSERGSRTNLSYSRSERSHYYDSDRRYHRSSPYRERTRYSRPYTDNRARESSDSEEEYKKTYSRRTSSHSSSYRDLRTSSYSKSDRDCKTETSYLEMERRGKYSSKLERESKRTSENEAIKRCCSPPNELGFRRGSSYSKHDSSASRYKSTLSKPIPKSDKFKNSFCCTELNEEIKQSHSFSLQTPCSKGSELRMINKNPEREKAGSPAPSNRLNDSPTLKKLDELPIFKSEFITHDSHDSIKELDSLSKVKNDQLRSFCPIELNINGSPGAESDLATFCTSKTDAVLMTSDDSVTGSELSPLVKACMLSSNGFQNISRCKEKDLDDTCMLHKKSESPFRETEPLVSPHQDKLMSMPVMTVDYSKTVVKEPVDTRVSCCKTKDSDIYCTLNDSNPSLCNSEAENIEPSVMKISSNSFMNVHLESKPVICDSRNLTDHSKFACEEYKQSIGSTSSASVNHFDDLYQPIGSSGIASSLQSLPPGIKVDSLTLLKCGENTSPVLDAVLKSKKSSEFLKHAGKETIVEVGSDLPDSGKGFASRENRRNNGLSGKCLQEAQEEGNSILPERRGRPEISLDERGEGGHVHTSDDSEVVFSSCDLNLTMEDSDGVTYALKCDSSGHAPEIVSTVHEDYSGSSESSNDESDSEDTDSDDSSIPRNRLQSVVVVPKNSTLPMEETSPCSSRSSQSYRHYSDHWEDERLESRRHLYEEKFESIASKACPQTDKFFLHKGTEKNPEISFTQSSRKQIDNRLPELSHPQSDGVDSTSHTDVKSDPLGHPNSEETVKAKIPSRQQEELPIYSSDFEDVPNKSWQQTTFQNRPDSRLGKTELSFSSSCEIPHVDGLHSSEELRNLGWDFSQEKPSTTYQQPDSSYGACGGHKYQQNAEQYGGTRDYWQGNGYWDPRSGRPPGTGVVYDRTQGQVPDSLTDDREEEENWDQQDGSHFSDQSDKFLLSLQKDKGSVQAPEISSNSIKDTLAVNEKKDFSKNLEKNDIKDRGPLKKRRQEIESDSESDGELQDRKKVRVEVEQGETSVPPGSALVGPSCVMDDFRDPQRWKECAKQGKMPCYFDLIEENVYLTERKKNKSHRDIKRMQCECTPLSKDERAQGEIACGEDCLNRLLMIECSSRCPNGDYCSNRRFQRKQHADVEVILTEKKGWGLRAAKDLPSNTFVLEYCGEVLDHKEFKARVKEYARNKNIHYYFMALKNDEIIDATQKGNCSRFMNHSCEPNCETQKWTVNGQLRVGFFTTKLVPSGSELTFDYQFQRYGKEAQKCFCGSANCRGYLGGENRVSIRAAGGKMKKERSRKKDS

SEQ ID NO: 63300 - protein, 1291 aa, Homo sapiens
MSSLPGCIGLDAATATVESEEIAELQQAVVEELGISMEELRHFIDEELEKMDCVQQRKKQLAELETWVIQKESEVAHVDQLFDDASRAVTNCESLVKDFYSKLGLQYRDSSSEDESSRPTEIIEIPDEDDDVLSIDSGDAGSRTPKDQKLREAMAALRKSAQDVQKFMDAVNKKSSSQDLHKGTLSQMSGELSKDGDLIVSMRILGKKRTKTWHKGTLIAIQTVGPGKKYKVKFDNKGKSLLSGNHIAYDYHPPADKLYVGSRVVAKYKDGNQVWLYAGIVAETPNVKNKLRFLIFFDDGYASYVTQSELYPICRPLKKTWEDIEDISCRDFIEEYVTAYPNRPMVLLKSGQLIKTEWEGTWWKSRVEEVDGSLVRILFLDDKRCEWIYRGSTRLEPMFSMKTSSASALEKKQGQLRTRPNMGAVRSKGPVVQYTQDLTGTGTQFKPVEPPQPTAPPAPPFPPAPPLSPQAGDSDLESQLAQSRKQVAKKSTSFRPGSVGSGHSSPTSPALSENVSGGKPGINQTYRSPLGSTASAPAPSALPAPPAPPVFHGMLERAPAEPSYRAPMEKLFYLPHVCSYTCLSRVRPMRNEQYRGKNPLLVPLLYDFRRMTARRRVNRKMGFHVIYKTPCGLCLRTMQEIERYLFETGCDFLFLEMFCLDPYVLVDRKFQPYKPFYYILDITYGKEDVPLSCVNEIDTTPPPQVAYSKERIPGKGVFINTGPEFLVGCDCKDGCRDKSKCACHQLTIQATACTPGGQINPNSGYQYKRLEECLPTGVYECNKRCKCDPNMCTNRLVQHGLQVRLQLFKTQNKGWGIRCLDDIAKGSFVCIYAGKILTDDFADKEGLEMGDEYFANLDHIESVENFKEGYESDAPCSSDSSGVDLKDQEDGNSGTEDPEESNDDSSDDNFCKDEDFSTSSVWRSYATRRQTRGQKENGLSETTSKDSHPPDLGPPHIPVPPSIPVGGCNPPSSEETPKNKVASWLSCNSVSEGGFADSDSHSSFKTNEGGEGRAGGSRMEAEKASTSGLGIKDEGDIKQAKKEDTDDRNKMSVVTESSRNYGYNPSPVKPEGLRRPPSKTSMHQSRRLMASAQSNPDDVLTLSSSTESEGESGTSRKPTAGQTSATAVDSDDIQTISSGSEGDDFEDKKNMTGPMKRQVAVKSTRGFALKSTHGIAIKSTNMASVDKGESAPVRKNTRQFYDGEESCYIIDAKLEGNLGRYLNHSCSPNLFVQNVFVDTHDLRFPWVAFFASKRIRAGTELTWDYNYEVGSVEGKELLCCCGAIECRGRLL

SEQ ID NO: 63301 - protein, 397 aa, Homo sapiens
MSSLPGCIGLDAATATVESEEIAELQQAVVEELGISMEELRHFIDEELEKMDCVQQRKKQLAELETWVIQKESEVAHVDQLFDDASRAVTNCESLVKDFYSKLGLQYRDSSSEDESSRPTEIIEIPDEDDDVLSIDSGDAGSRTPKDQKLREAMAALRKSAQDVQKFMDAVNKKSSSQDLHKGTLSQMSGELSKDGDLIVSMRILGKKRTKTWHKGTLIAIQTVGPGKKYKVKFDNKGKSLLSGNHIAYDYHPPADKLYVGSRVVAKYKDGNQVWLYAGIVAETPNVKNKLRFLIFFDDGYASYVTQSELYPICRPLKKTWEDIEDISCRDFIEEYVTAYPNRPMVLLKSGQLIKTEWEGTWWKSRVEEVDGSLVRILFLVLFFSTILEAEVGGGGT

SEQ ID NO: 63302 - protein, 249 aa, Homo sapiens
MSSLPGCIGLDAATATVESEEIAELQQAVVEELGISMEELRHFIDEELEKMDCVQQRKKQLAELETWVIQKESEVAHVDQLFDDASRAVTNCESLVKDFYSKLGLQYRDSSSEDESSRPTEIIEIPDEDDDVLSIDSGDAGSRTPKDQKLREAMAALRKSAQDVQKFMDAVNKKSSSQDLHKGTLSQMSGELSKDGDLIVSMRILGKKRTKTWHKGTLIAIQTVGFSFSLMMAMLPMSHSRNCIPFAGH

SEQ ID NO: 63303 - protein, 1290 aa, Homo sapiens
MSSLPGCIGLDAATATVESEEIAELQQAVVEELGISMEELRHFIDEELEKMDCVQQRKKQLAELETWVIQKESEVAHVDQLFDDASRAVTNCESLVKDFYSKLGLQYRDSSSEDESSRPTEIIEIPDEDDDVLSIDSGDAGSRTPKDQKLREAMAALRKSAQDVQKFMDAVNKKSSSQDLHKGTLSQMSGELSKDGDLIVSMRILGKKRTKTWHKGTLIAIQTVGPGKKYKVKFDNKGKSLLSGNHIAYDYHPPADKLYVGSRVVAKYKDGNQVWLYAGIVAETPNVKNKLRFLIFFDDGYASYVTQSELYPICRPLKKTWEDIEDISCRDFIEEYVTAYPNRPMVLLKSGQLIKTEWEGTWWKSRVEEVDGSLVRILFLDDKRCEWIYRGSTRLEPMFSMKTSSASALEKKQGQLRTRPNMGAVRSKGPVVQYTQDLTGTGTQFKPVEPPQPTAPPAPPFPPAPPLSPQAGDSDLESQLAQSRKQVAKKSTSFRPGSVGSGHSSPTSPALSENVSGGKPGINQTYRSPLGSTASAPAPSALPAPPAPPVFHGMLERAPAEPSYRAPMEKLFYLPHVCSYTCLSRVRPMRNEQYRGKNPLLVPLLYDFRRMTARRRVNRKMGFHVIYKTPCGLCLRTMQEIERYLFETGCDFLFLEMFCLDPYVLVDRKFQPYKPFYYILDITYGKEDVPLSCVNEIDTTPPPQVAYSKERIPGKGVFINTGPEFLVGCDCKDGCRDKSKCACHQLTIQATACTPGGQINPNSGYQYKRLEECLPTGVYECNKRCKCDPNMCTNRLVQHGLQVRLQLFKTQNKGWGIRCLDDIAKGSFVCIYAGKILTDDFADKEGLEMGDEYFANLDHIESVENFKEGYESDAPCSSDSSGVDLKDQEDGNSGTEDPEESNDDSSDDNFCKDEDFSTSSVWRSYATRRQTRGQKENGLSETTSKDSHPPDLGPPHIPVPPSIPVGGCNPPSSEETPKNKVASWLSCNSVSEGGFADSDSHSSFKTNEGGEGRAGGSRMEAEKASTSGLGIKDEGDIKQAKKEDTDDRNKMSVVTESSRNYGYNPSPVKPEGLRRPPSKTSMHQSRRLMASAQSNPDDVLTLSSSTESEGESGTSRKPTAGQTSATAVDSDDIQTISSGSEGDDFEDKKNMTGPMKRQVAVKSTRGFALKSTHGIAIKSTNMASVDKGESAPVRKNTRQFYDGEESCYIIDAKLEGNLGRYLNHSCSPNLFVQNVFVDTHDLRFPWVAFFASKIRAGTELTWDYNYEVGSVEGKELLCCCGAIECRGRLL

SEQ ID NO: 63304 - protein, 167 aa, Homo sapiens
MSSLPGCIGLDAATATVESEEIAELQQAVVEELGISMEELRHFIDEELEKMDCVQQRKKQLAELETVGPGKKYKVKFDNKGKSLLSGNHIAYDYHPPADKLYVGSRVVAKYKDGNQVWLYAGIVAETPNVKNKLRFLIFFDDGYASYVTQSELYPICRPRECFSLIP

SEQ ID NO: 63305 - protein, 156 aa, Homo sapiens
MSSLPGCIGLDAATATVESEEIAELQQAVVEELGISMEELRHFIDEELEKMDCVQQRKKQLAELETWVIQKESEVAHVDQLFDDASRAVTNCESLVKDFYSKLGLQYRDSSSEDESSRPTEIIEIPDEDDDVLSIDSGDAGSRTPKDQKLREAMAA

SEQ ID NO: 63306 - protein, 1259 aa, Homo sapiens
MSSLPGCIGLDAATATVESEEIAELQQAVVEELGISMEELRHFIDEELEKMDCVQQRKKQLAELETWVIQKESEVAHVDQLFDDASRAVTNCESLVKDFYSKLGLQYRDSSSEDESSRPTEIIEIPDEDDDVLSIDSGDAGSRTPKDQKLREAMAALRKSAQDVQKFMDAVNKKSSSQDLHKGTLSQMSGELSKDGDLIVSMRILGKKRTKTWHKGTLIAIQTVGPGKKYKVKFDNKGKSLLSGNHIAYDYHPPADKLYVGSRVVAKYKDGNQVWLYAGIVAETPNVKNKLRFLIFFDDGYASYVTQSELYPICRPLKKTWEDIEDISCRDFIEEYVTAYPNRPMVLLKSGQLIKTEWEGTWWKSRVEEVDGSLVRILFLDDKRCEWIYRGSTRLEPMFSMKTSSASALEKKQGQLRTRPNMGAVRSKGPVVQYTQDLTGTGTQFKPVEPPQPTAPPAPPFPPAPPLSPQAGDSDLESQLAQSRKQVAKKSTSFRPGSVGSGHSSPTSPALSENVSGGKPGINQTYRSPLGSTASAPAPSALPAPPAPPVFHGMLERAPAEPSYRAPMEKLFYLPHVCSYTCLSRVRPMRNEQYRGKNPLLVPLLYDFRRMTARRRVNRKMGFHVIYKTPCGLCLRTMQEIERYLFETGCDFLFLEMFCLDPYVLVDRKFQPYKPFYYILDITYGKEDVPLSCVNEIDTTPPPQVAYSKERIPGKGVFINTGPEFLVGCDCKDGCRDKSKCACHQLTIQATACTPGGQINPNSGYQYKRLEECLPTGVYECNKRCKCDPNMCTNRLVQHGLQVRLQLFKTQNKGWGIRCLDDIAKGSFVCIYAGKILTDDFADKEGLEMGDEYFANLDHIESVENFKEGYESDAPCSSDSSGVDLKDQEDGNSGTEDPEESNDDSSDDNFCKDEDFSTSSVWRSYATRRQTRGQKENGLSETTSKDSHPPDLGPPHIPVPPSIPVGGCNPPSSEETPKNKVASWLSCNSVSEGGFADSDSHSSFKTNEGGEGRAGGSRMEAEKASTSGLGIKDEGDIKQAKKEDTDDRNKMSVVTESSRNYGYNPSPVKPEGLRRPPSKTSMHQSRRLMASAQSNPDDVLTLSSSTESEGESGTSRKPTAGQTSATAVDSDDIQTISSGSEGDDFEDKKNMTGPMKRQVAVKSTRGFALKSTHGIAIKSTNMASVDKGESAPVRKNTRQFYDGEESCYIIDAKLEGNLGRYLNVRPLSPPLDAGLSHGPQISFNILYKPFSCYKLLISK

SEQ ID NO: 63307 - protein, 163 aa, Homo sapiens
MSSLPGCIGLDAATATVESEEIAELQQAVVEELGISMEELRHFIDEELEKMDCVQQRKKQLAELETWVIQKESEVAHVDQLFDDASRAVTNCESLVKDFYSKLGLQYRDSSSEDESSRPTEIIEIPDEDDDVLSIDSGDAGSRTPKDQKLREAMAALRKSAQD

SEQ ID NO: 63308 - protein, 636 aa, Homo sapiens
MSSLPGCIGLDAATATVESEEIAELQQAVVEELGISMEELRHFIDEELEKMDCVQQRKKQLAELETWVIQKESEVAHVDQLFDDASRAVTNCESLVKDFYSKLGLQYRDSSSEDESSRPTEIIEIPDEDDDVLSIDSGDAGSRTPKDQKLREAMAALRKSAQDVQKFMDAVNKKSSSQDLHKGTLSQMSGELSKDGDLIVSMRILGKKRTKTWHKGTLIAIQTVGPGKKYKVKFDNKGKSLLSGNHIAYDYHPPADKLYVGSRVVAKYKDGNQVWLYAGIVAETPNVKNKLRFLIFFDDGYASYVTQSELYPICRPLKKTWEDIEDISCRDFIEEYVTAYPNRPMVLLKSGQLIKTEWEGTWWKSRVEEVDGSLVRILFLDDKRCEWIYRGSTRLEPMFSMKTSSASALEKKQGQLRTRPNMGAVRSKGPVVQYTQDLTGTGTQFKPVEPPQPTAPPAPPFPPAPPLSPQAGDSESLESQLAQSRKQVAKKSTSFRPGSVGSGHSSPTSPALSENVSGGKPGINQTYRSPLGSTASAPAPSALPAPPAPPVFHGMLERAPAEPSYRAPMEKLFYLPHVCSYTCLSRVRPMRNEQYRGKNPLLVPLLYDFRRMTARRRVNRKMGFHVIYKTPCGLCL

SEQ ID NO: 63309 - protein, 719 aa, Homo sapiens
MGEKNGDAKTFWMELEDDGKVDFIFEQVQNVLQSLKQKIKDGSATNKEYIQAMILVNEATIINSSTSIKGASQKEVNAQSSDPMPVTQKEQENKSNAFPSTSCENSFPEDCTFLTTENKEILSLEDKVVDFREKDSSSNLSYQSHDCSGACLMKMPLNLKGENPLQLPIKCHFQRRHAKTNSHSSALHVSYKTPCGRSLRNVEEVFRYLLETECNFLFTDNFSFNTYVQLARNYPKQKEVVSDVDISNGVESVPISFCNEIDSRKLPQFKYRKTVWPRAYNLTNFSSMFTDSCDCSEGCIDITKCACLQLTARNAKTSPLSSDKITTGYKYKRLQRQIPTGIYECSLLCKCNRQLCQNRVVQHGPQVRLQVFKTEQKGWGVRCLDDIDRGTFVCIYSGRLLSRANTEKSYGIDENGRDENTMKNIFSKKRKLEVACSDCEVEVLPLGLETHPRTAKTEKCPPKFSNNPKELTVETKYDNISRIQYHSVIRDPESKTAIFQHNGKKMEFVSSESVTPEDNDGFKPPREHLNSKTKGAQKDSSSNHVDEFEDNLLIESDVIDITKYREETPPRSRCNQATTLDNQNIKKAIEVQIQKPQEGRSTACQRQQVFCDEELLSETKNTSSDSLTKFNKGNVFLLDATKEGNVGRFLNHSCCPNLLVQNVFVETHNRNFPLVAFFTNRYVKARTELTWDYGYEAGTVPEKEIFCQCGVNKCRKKIL

SEQ ID NO: 63310 - protein, 707 aa, Homo sapiens
MGEKNGDAKTFWMELEDDGKVDFIFEQVQNVLQSLKQKIKDGSATNKEYIQAMILVNEATIINSSTSIKDPMPVTQKEQENKSNAFPSTSCENSFPEDCTFLTTENKEILSLEDKVVDFREKDSSSNLSYQSHDCSGACLMKMPLNLKGENPLQLPIKCHFQRRHAKTNSHSSALHVSYKTPCGRSLRNVEEVFRYLLETECNFLFTDNFSFNTYVQLARNYPKQKEVVSDVDISNGVESVPISFCNEIDSRKLPQFKYRKTVWPRAYNLTNFSSMFTDSCDCSEGCIDITKCACLQLTARNAKTSPLSSDKITTGYKYKRLQRQIPTGIYECSLLCKCNRQLCQNRVVQHGPQVRLQVFKTEQKGWGVRCLDDIDRGTFVCIYSGRLLSRANTEKSYGIDENGRDENTMKNIFSKKRKLEVACSDCEVEVLPLGLETHPRTAKTEKCPPKFSNNPKELTVETKYDNISRIQYHSVIRDPESKTAIFQHNGKKMEFVSSESVTPEDNDGFKPPREHLNSKTKGAQKDSSSNHVDEFEDNLLIESDVIDITKYREETPPRSRCNQATTLDNQNIKKAIEVQIQKPQEGRSTACQRQQVFCDEELLSETKNTSSDSLTKFNKGNVFLLDATKEGNVGRFLNHSCCPNLLVQNVFVETHNRNFPLVAFFTNRYVKARTELTWDYGYEAGTVPEKEIFCQCGVNKCRKKIL

SEQ ID NO: 63311 - protein, 324 aa, Homo sapiens
MSRPSSTGPSANKPCSKQPPPQPQHTPSPAAPPAAATISAAGPGSSAVPAAAAVISGPGGGGGAGPVSPQHHELTSLFECPVCFDYVLPPILQCQAGHLVCNQCRQKLSCCPTCRGALTPSIRNLAMEKVASAVLFPCKYATTGCSLTLHHTEKPEHEDICEYRPYSCPCPGASCKWQGSLEAVMSHLMHAHKSITTLQGEDIVFLATDINLPGAVDWVMMQSCFGHHFMLVLEKQEKYEGHQQFFAIVLLIGTRKQAENFAYRLELNGNRRRLTWEATPRSIHDGVAAAIMNSDCLVFDTAIAHLFADNGNLGINVTISTCCP

SEQ ID NO: 63312 - protein, 329 aa, Homo sapiens
MMSNSSSEIDVIKTRIPTYDEDDNTILYAYETKPEFVNKEPNIVSDASCNTEEQLKTVDDVLIHCQVIYDALQNLDKKIDVIRRKVSKIQRFHARSLWTNHKRYGYKKHSYRLVKKLKLQKMKKNEVYETFSYPESYSPTLPVSRRENNSPSNLPRPSFCMEEYQRAELEEDPILSRTPSPVHPSDFSEHNCQPYYASDGATYGSSSGLCLGNPRADSIHNTYSTDHASAAPPSVTRSPVENDGYIEEGSITKHPSTWSVEAVVLFLKQTDPLALCPLVDLFRSHEIDGKALLLLTSDVLLKHLGVKLGTAVKLCYYIDRLKQGKCFEN

SEQ ID NO: 63313 - protein, 302 aa, Homo sapiens
MMSNSSSEIDVQEPNIVSDASCNTEEQLKTVDDVLIHCQVIYDALQNLDKKIDVIRRKVSKIQRFHARSLWTNHKRYGYKKHSYRLVKKLKLQKMKKNEVYETFSYPESYSPTLPVSRRENNSPSNLPRPSFCMEEYQRAELEEDPILSRTPSPVHPSDFSEHNCQPYYASDGATYGSSSGLCLGNPRADSIHNTYSTDHASAAPPSVTRSPVENDGYIEEGSITKHPSTWSVEAVVLFLKQTDPLALCPLVDLFRSHEIDGKALLLLTSDVLLKHLGVKLGTAVKLCYYIDRLKQGKCFEN

SEQ ID NO: 63314 - protein, 208 aa, Homo sapiens
MKKNEVYETFSYPESYSPTLPVSRRENNSPSNLPRPSFCMEEYQRAELEEDPILSRTPSPVHPSDFSEHNCQPYYASDGATYGSSSGLCLGNPRADSIHNTYSTDHASAAPPSVTRSPVENDGYIEEGSITKHPSTWSVEAVVLFLKQTDPLALCPLVDLFRSHEIDGKALLLLTSDVLLKHLGVKLGTAVKLCYYIDRLKQGKCFEN

SEQ ID NO: 63315 - protein, 208 aa, Homo sapiens; identical to SEQ ID NO: 63314

SEQ ID NO: 63316 - protein, 148 aa, Homo sapiens
MMSNSSSEIDVQEPNIVSDASCNTEEQLKTVDDVLIHCQVIYDALQNLDKKIDVIRRKVSKIQRFHARSLWTNHKRYGYKKHSYRLVKKLKLQKMKKNEVYETFSYPESYSPTLPVSRRENNSPSNLPRPSFCMEEYQRAELEEDPIL

SEQ ID NO: 63317 - protein, 700 aa, Homo sapiens
MGQTVNEDSMDVKKENQEKTPQSSTSSVQRDDFHWEEYLKETGSISAPSECFRQSQIPPVNDFKVGMKLEARDPRNATSVCIATVIGITGARLRLRLDGSDNRNDFWRLVDSPDIQPVGTCEKEGDLLQPPLGYQMNTSSWPMFLLKTLNGSEMASATLFKKEPPKPPLNNFKVGMKLEAIDKKNPYLICPATIGDVKGDEVHITFDGWSGAFDYWCKYDSRDIFPAGWCRLTGDVLQPPGTSVPIVKNIAKTESSPSEASQHSMQSPQKTTLILPTQQVRRSSRIKPPGPTAVPKRSSSVKNITPRKKGPNSGKKEKPLPVICSTSAASLKSLTRDRGMLYKDVASGPCKIVMSTVCVYVNKHGNFGPHLDPKRIQQLPDHFGPGPVNVVLRRIVQACVDCALETKTVFGYLKPDNRGGEVITASFDGETHSIQLPPVNSASFALRFLENFCHSLQCDNLLSSQPFSSSRGHTHSSAEHDKNQSAKEDVTERQSTKRSPQQTVPYVVPLSPKLPKTKEYASEGEPLFAGGSAIPKEENLSEDSKSSSLNSGNYLNPACRNPMYIHTSVSQDFSRSVPGTTSSPLVGDISPKSSPHEVKFQMQRKSEAPSYIAVPDPSVLKQGFSKDPSTWSVDEVIQFMKHTDPQISGPLADLFRQHEIDGKALFLLKSDVMMKYMGLKLGPALKLCYYIEKLKEGKYS

SEQ ID NO: 63318 - protein, 345 aa, Homo sapiens
MQSPQKTTLILPTQQVRRSSRIKPPGPTAVPKRSSSVKNITPRKKGPNSGKKEKPLPVICSTSAASLKSLTRDRGMLYKDVASGPCKIVMSTVCVYVNKHGNFGPHLDPKRIQQLPDHFGPGPVNVVLRRIVQACVDCALETKTVFGYLKPDNRGGEVITASFDGETHSIQLPPVNSASFALRFLENFCHSLQCDNLLSSQPFSSSRGHTHSSAEHDKNQSAKEDVTERQSTKRSPQQTVPYVVPLSPKLPKTKEYASEGEPLFAGGSAIPKEENLSEDSKSSSLNSGNYLNPACRNPMYIHTSVSQDFSRSVPGTTSSPLVGDISPKSSPHEVKFQMQRKSEGN

SEQ ID NO: 63319 - protein, 125 aa, Homo sapiens
  VARIANT 1: note = MOD_RES - Any amino acid
XAKEDVTERQSTKRSPQQTVPYVVPLSPKLPKTKEYASEGEPLFAGGSAIPKEENLSEDSKSSSLNSGNYLNPACRNPMYIHTSVSQDFSRSVPGTTSSPLVGDISPKSSPHEVKFQMQRKSEGN

SEQ ID NO: 63320 - protein, 577 aa, Homo sapiens
MGQTVNEDSMDVKKENQEKTPQSQIPPVNDFKVGMKLEARDPRNATSVCIATVIGITGARLRLRLDGSDNRNDFWRLVDSPDIQPVGTCEKEGDLLQPPLGYQMNTSSWPMFLLKTLNGSEMASATLFKKEPPKPPLNNFKVGMKLEAIDKKNPYLICPATIGDVKGDEVHITFDGWSGAFDYWCKYDSRDIFPAGWCRLTGDVLQPPGTSVPIVKNIAKTESSPSEASQHSMQSPQKTTLILPTQQVRRSSRIKPPGPTAVPKRSSSVKNITPRKKGPNSGKKEKPLPVICSTSAASLKSLTRDRGMLYKDVASGPCKIVMSTVCVYVNKHGNFGPHLDPKRIQQLPDHFGPGPVNVVLRRIVQACVDCALETKTVFGYLKPDNRGGEVITASFDGETHSIQLPPVNSASFALRFLENFCHSLQCDNLLSSQPFSSSRGHTHSSAEHDKNQSAKEDVTERQSTKRSPQQTVPYVVPLSPKLPKTKEYASEGEPLFAGGSAIPKEENLSEDSKSSSLNSGNYLNPACRNPMYIHTSVSQDFSRSVPGTTSSPLVGDISPKSSPHEVKFQMQRKSEGN

SEQ ID NO: 63321 - protein, 204 aa, Homo sapiens
MQSYASAMLSVFNSDDYSPAVQENIPALRRSSSFLCTESCNSKYQCETGENSKGNVQDRVKRPMNAFIVWSRDQRRKMALENPRMRNSEISKQLGYQWKMLTEAEKWPFFQEAQKLQAMHREKYPNYKYRPRRKAKMLPKNCSLLPADPASVLCSEVQLDNRLYRDDCTKATHSRMEHQLGHLPPINAASSPQQRDRYSHWTKL

SEQ ID NO: 63322 - protein, 197 aa, Homo sapiens
MQSYASAMLSVFNSDDYSPAVQENIPALRRSSSFLCTESCNSKYQCETGENSKGNVQDRVKRPMNAFIVWSRDQRRKMALENPRMRNSEISKQLGYQWKMLTEAEKWPFFQEAQKLQAMHREKYPNYKYRPRRKAKMLPKNCSLLPADPASVLCSEVQLDNRLYRDDCTKATHSRMEHQLGHLPPINAASAATGPLQ

SEQ ID NO: 63323 - protein, 165 aa, Homo sapiens
MQSYASAMLSVFNSDDYSPAVQENIPALRRSSSFLCTESCNSKYQCETGENSKGNVQDRVKRPMNAFIVWSRDQRRKMALENPRMRNSEISKQLGYQWKMLTEAEKWPFFQEAQKLQAMHREKYPNYKYRPRRKAKMLPKNCSLLPADPASVLCSEVQGQQVVQG

SEQ ID NO: 63324 - protein, 1242 aa, Homo sapiens
MKNLLTEKCISSHNFHQKVIKQRMEKKVDSRYFKDGAVKKPYSAKTLSNKKSSASFGIRRELPSTSHLVQYRGTHTCTRQGRLRELRIRCVARKFLYLWIRMTFGRVFPSKARFYYEQRLLRKVFEEWKEEWWVFQHEWKLCVRADCHYRYYLYNLMFQTWKTYVRQQQEMRNKYIRAEVHDAKQKMRQAWKSWLIYVVVRRTKLQMQTTALEFRQRIILRVWWSTWRQRLGQVRVSRALHASALKHRALSLQVQAWSQWREQLLYVQKEKQKVVSAVKHHQHWQKRRFLKAWLEYLQVRRVKRQQNEMAERFHHVTVLQIYFCDWQQAWERRESLYAHHAQVEKLARKMALRRAFTHWKHYMLLCAEEAAQFEMAEEHHRHSQLYFCFRALKDNVTHAHLQQIRRNLAHQQHGVTLLHRFWNLWRSQIEQKKERELLPLLHAAWDHYRIALLCKCIELWLQYTQKRRYKQLLQARADGHFQQRALPAAFHTWNRLWRWRHQENVLSARATRFHRETLEKQVFSLWRQKMFQHRENRLAERMAILHAERQLLYRSWFMWHQQAAARHQEQEWQTVACAHHRHGRLKKAFCLWRESAQGLRTERTGRVRAAEFHMAQLLRWAWSQWRECLALRGAERQKLMRADLHHQHSVLHRALQAWVTYQGRVRSILREVAARESQHNRQLLRGALRRWKENTMARVDEAKKTFQASTHYRRTICSKVLVQWREAVSVQMYYRQQEDCAIWEAQKVLDRGCLRTWFQRWWDCSRRSAQQRLQLERAVQHHHRQLLLEGLARWKTHHLQCVRKRLLHRQSTQLLAQRLSRTCFRQWRQQLAARRQEQRATVRALWFWAFSLQAKVWATWLAFVLERRRKKARLQWALQAYQGQLLQEGATRLLRFAASMKASRQQLQAQQQVQAAHSLHRAVRRCATLWKQKVLGRGGKPQPLAAIAPSRKVTFEGPLLNRIAAGAGDGTLETKRPQASRPLGALGRLAAEEPHALELNTAHSARKQPRRPHFLLEPAQSQRPQKPQEHGLGMAQPAAPSLTRPFLAEAPTALVPHSPLPGALSSAPGPKQPPTASTGPELLLLPLSSFMPCGAAAPARVSAQRATPRDKPPVPSSLASVPDPHLLLPGDFSATRAGPGLSTAGSLDLEAELEEIQQQLLHYQTTKQNLWSCRRQASSLRRWLELNREEPGPEDQEVEQQVQKELEQVEMQIQLLAEELQAQRQPIGACVARIQALRQALC

SEQ ID NO: 63325 - protein, 1160 aa, Homo sapiens
MKNLLTEKCISSHNFHQKVIKQRMEKKVDSRFYYEQRLLRKVFEEWKEEWWVFQHEWKLCVRADCHYRYYLYNLMFQTWKTYVRQQQEMRNKYIRAEVHDAKQKMRQAWKSWLIYVVVRRTKLQMQTTALEFRQRIILRVWWSTWRQRLGQVRVSRALHASALKHRALSLQVQAWSQWREQLLYVQKEKQKVVSAVKHHQHWQKRRFLKAWLEYLQVRRVKRQQNEMAERFHHVTVLQIYFCDWQQAWERRESLYAHHAQVEKLARKMALRRAFTHWKHYMLLCAEEAAQFEMAEEHHRHSQLYFCFRALKDNVTHAHLQQIRRNLAHQQHGVTLLHRFWNLWRSQIEQKKERELLPLLHAAWDHYRIALLCKCIELWLQYTQKRRYKQLLQARADGHFQQRALPAAFHTWNRLWRWRHQENVLSARATRFHRETLEKQVFSLWRQKMFQHRENRLAERMAILHAERQLLYRSWFMWHQQAAARHQEQEWQTVACAHHRHGRLKKAFCLWRESAQGLRTERTGRVRAAEFHMAQLLRWAWSQWRECLALRGAERQKLMRADLHHQHSVLHRALQAWVTYQGRVRSILREVAARESQHNRQLLRGALRRWKENTMARVDEAKKTFQASTHYRRTICSKVLVQWREAVSVQMYYRQQEDCAIWEAQKVLDRGCLRTWFQRWWDCSRRSAQQRLQLERAVQHHHRQLLLEGLARWKTHHLQCVRKRLLHRQSTQLLAQRLSRTCFRQWRQQLAARRQEQRATVRALWFWAFSLQAKVWATWLAFVLERRRKKARLQWALQAYQGQLLQEGATRLLRFAASMKASRQQLQAQQQVQAAHSLHRAVRRCATLWKQKVLGRGGKPQPLAAIAPSRKVTFEGPLLNRIAAGAGDGTLETKRPQASRPLGALGRLAAEEPHALELNTAHSARKQPRRPHFLLEPAQSQRPQKPQEHGLGMAQPAAPSLTRPFLAEAPTALVPHSPLPGALSSAPGPKQPPTASTGPELLLLPLSSFMPCGAAAPARVSAQRATPRDKPPVPSSLASVPDPHLLLPGDFSATRAGPGLSTAGSLDLEAELEEIQQQLLHYQTTKQNLWSCRRQASSLRRWLELNREEPGPEDQEVEQQVQKELEQVEMQIQLLAEELQAQRQPIGACVARIQALRQALC

SEQ ID NO: 63326 - protein, 1031 aa, Homo sapiens
MKNLLTEKCISSHNFHQKVIKQRMEKKVDSRFYYEQRLLRKVFEEWKEEWWVFQHEWKLCVRADCHYRVWWSTWRQRLGQVRVSRALHASALKHRALSLQVQAWSQWREQLLYVQKEKQKVVSAVKHHQHWQKRRFLKAWLEYLQVRRVKRQQNEMAERFHHVTVLQIYFCDWQQAWERRESLYAHHAQVEKLARKMALRRAFTHWKHYMLLCAEEAAQFEMAEEHHRHSQLYFCFRALKDNVTHAHLQQIRRNLAHQQHGVTLLHRFWNLWRSQIEQKKERELLPLLHAAWDHYRIALLCKCIELWLQYTQKRRYKQLLQARADGHFQQRALPAAFHTWNRLWRWRHQENVLSARATRFHRETLEKQVFSLWRQKMFQHRENRLAERMAILHAERQLLYRSWFMWHQQAAARHQEQEWQTVACAHHRHGRLKKAFCLWRESAQGLRTERTGRVRAAEFHMAQLLRWAWSQWRECLALRGAERQKLMRADLHHQHSVLHRALQAWVTYQGRVRSILREVAARESQHNRQLLRGALRRWKENTMARVDEAKKTFQASTHYRRTICSKVLVQWREAVSVQMYYRQQEDCAIWEAQKVLDRGCLRTWFQRWWDCSRRSAQQRLQLERAVQHHHRQLLLEGLARWKTHHLQCVRKRLLHRQSTQLLAQRLSRTCFRQWRQQLAARRQEQRATVRALWFWAFSLQAKVWATWLAFVLERRRKKARLQWALQAYQGQLLQEGATRLLRFAASMKASRQQLQAQQQVQAAHSLHRAVRRCATLWKQKVLGRGGKPQPLAAIAPSRKVTFEGPLLNRIAAGAGDGTLETKRPQASRPLGALGRLAAEEPHALELNTAHSARKQPRRPHFLLEPAQSQRPQKPQEHGLGMAQPAAPSLTRPFLAEAPTALVPHSPLPGALSSAPGPKQPPTASTGPELLLLPLSSFMPCGAAAPARVSAQRATPRDKPPVPSSLASVPDPHLLLPGDFSATRAGPGLSTAAWTLRLNLRRSSSNYCTTRPPSRTSGPVGGKRAACAGGWS

SEQ ID NO: 63327 - protein, 991 aa, Homo sapiens
MKNLLTEKCISSHNFHQKVIKQRMEKKVDSRYFKDGAVKKPYSAKTLSNKKSSASFGIRRELPSTSHLVQYRGTHTCTRQGRLRELRIRFYYEQRLLRKVFEEWKEEWWVFQHEWKLCVRADCHYRYYLYNLMFQTWKTYVRQQQEMRNKYIRAEVHDAKQKMRQAWKSWLIYVVVRRTKLQMQTTALEFRQRIILRVWWSTWRQRLGQVRVSRALHASALKHRALSLQVQAWSQWREQLLYVQKEKQKVVSAVKHHQHWQKRRFLKAWLEYLQVRRVKRQQNEMAERFHHVTVLQIYFCDWQQAWERRESLYAHHAQVEKLARKMALRRAFTHWKHYMLLCAEEAAQFEMAEEHHRHSQLYFCFRALKDNVTHAHLQQIRRNLAHQQHGVTLLHRFWNLWRSQIEQKKERELLPLLHAAWDHYRIALLCKCIELWLQYTQKRRYKQLLQARADGHFQQRALPAAFHTWNRLWRWRHQENVLSARATRFHRETLEKQVFSLWRQKMFQHRENRLAERMAILHAERQLLYRSWFMWHQQAAARHQEQEWQTVACAHHRHGRLKKAFCLWRESAQGLRTERTGRVRAAEFHMAQLLRWAWSQWRECLALRGAERQKLMRADLHHQHSVLHRALQAWVTYQGRVRSILREVAARESQQLQAQQQVQAAHSLHRAVRRCATLWKQKVLGRGGKPQPLAAIAPSRKVTFEGPLLNRIAAGAGDGTLETKRPQASRPLGALGRLAAEEPHALELNTAHSARKQPRRPHFLLEPAQSQRPQKPQEHGLGMAQPAAPSLTRPFLAEAPTALVPHSPLPGALSSAPGPKQPPTASTGPELLLLPLSSFMPCGAAAPARVSAQRATPRDKPPVPSSLASVPDPHLLLPGDFSATRAGPGLSTAGSLDLEAELEEIQQQLLHYQTTKQNLWSCRRQASSLRRWLELNREEPGPEDQEVEQQVQKELEQVEMQIQLLAEELQAQRQPIGACVARIQALRQALC

SEQ ID NO: 63328 - protein, 1211 aa, Homo sapiens
MKNLLTEKCISSHNFHQKVIKQRMEKKVDSRYFKDGAVKKPYSAKTLSNKKSSASFGIRRELPSTSHLVQYRGTHTCTRQGRLRELRIRCVARKFLYLWIRMTFGRVFPSKARFYYEQRLLRKVFEEWKEEWWVFQHEWKLCVRADCHYRYYLYNLMFQTWKTYVRQQQEMRNKYIRAEVHDAKQKMRQAWKSWLIYVVVRRTKLQMQTTALEFRQRIILRVWWSTWRQRLGQVRVSRALHASALKHRALSLQVQAWSQWREQLLYVQKEKQKVVSAVKHHQHWQKRRFLKAWLEYLQVRRVKRQQNEMAERFHHVTVLQIYFCDWQQAWERRESLYAHHAQVEKLARKMALRRAFTHWKHYMLLCAEEAAQFEMAEEHHRHSQLLLHRFWNLWRSQIEQKKERELLPLLHAAWDHYRIALLCKCIELWLQYTQKRRYKQLLQARADGHFQQRALPAAFHTWNRLWRWRHQENVLSARATRFHRETLEKQVFSLWRQKMFQHRENRLAERMAILHAERQLLYRSWFMWHQQAAARHQEQEWQTVACAHHRHGRLKKAFCLWRESAQGLRTERTGRVRAAEFHMAQLLRWAWSQWRECLALRGAERQKLMRADLHHQHSVLHRALQAWVTYQGRVRSILREVAARESQHNRQLLRGALRRWKENTMARVDEAKKTFQASTHYRRTICSKVLVQWREAVSVQMYYRQQEDCAIWEAQKVLDRGCLRTWFQRWWDCSRRSAQQRLQLERAVQHHHRQLLLEGLARWKTHHLQCVRKRLLHRQSTQLLAQRLSRTCFRQWRQQLAARRQEQRATVRALWFWAFSLQAKVWATWLAFVLERRRKKARLQWALQAYQGQLLQEGATRLLRFAASMKASRQQLQAQQQVQAAHSLHRAVRRCATLWKQKVLGRGGKPQPLAAIAPSRKVTFEGPLLNRIAAGAGDGTLETKRPQASRPLGALGRLAAEEPHALELNTAHSARKQPRRPHFLLEPAQSQRPQKPQEHGLGMAQPAAPSLTRPFLAEAPTALVPHSPLPGALSSAPGPKQPPTASTGPELLLLPLSSFMPCGAAAPARVSAQRATPRDKPPVPSSLASVPDPHLLLPGDFSATRAGPGLSTAGSLDLEAELEEIQQQLLHYQTTKQNLWSCRRQASSLRRWLELNREEPGPEDQEVEQQVQKELEQVEMQIQLLAEELQAQRQPIGACVARIQALRQALC

SEQ ID NO: 63329 - protein, 1160 aa, Homo sapiens; identical to SEQ ID NO: 63325

SEQ ID NO: 63330 - protein, 79 aa, Homo sapiens
MKNLLTEKCISSHNFHQKVIKQRMEKKVDSRYFKDGAVKKPYSAKTLSNKKSSASFGIRRELPSTSHLVQYRGTHTCTR

SEQ ID NO: 63331 - protein, 1187 aa, Homo sapiens
MKNLLTEKCISSHNFHQKVIKQRMEKKVDSRYFKDGAVKKPYSAKTLSNKKSSASFGIRRELPSTSHLVQYRGTHTCTRQGRLRELRIRFYYEQRLLRKVFEEWKEEWWVFQHEWKLCVRADCHYRYYLYNLMFQTWKTYVRQQQEMRNKYIRAEVHDAKQKMRQAWKSWLIYVVVRRTKLQMQTTALEFRQRIILRVWWSTWRQRLGQVRVSRALHASALKHRALSLQVQAWSQWREQLLYVQKEKQKVVSAVKHHQHWQKRRFLKAWLEYLQVRRVKRQQNEMAERFHHVTVLQIYFCDWQQAWERRESLYAHHAQVEKLARKMALRRAFTHWKHYMLLCAEEAAQFEMAEEHHRHSQLLLHRFWNLWRSQIEQKKERELLPLLHAAWDHYRIALLCKCIELWLQYTQKRRYKQLLQARADGHFQQRALPAAFHTWNRLWRWRHQENVLSARATRFHRETLEKQVFSLWRQKMFQHRENRLAERMAILHAERQLLYRSWFMWHQQAAARHQEQEWQTVACAHHRHGRLKKAFCLWRESAQGLRTERTGRVRAAEFHMAQLLRWAWSQWRECLALRGAERQKLMRADLHHQHSVLHRALQAWVTYQGRVRSILREVAARESQHNRQLLRGALRRWKENTMARVDEAKKTFQASTHYRRTICSKVLVQWREAVSVQMYYRQQEDCAIWEAQKVLDRGCLRTWFQRWWDCSRRSAQQRLQLERAVQHHHRQLLLEGLARWKTHHLQCVRKRLLHRQSTQLLAQRLSRTCFRQWRQQLAARRQEQRATVRALWFWAFSLQAKVWATWLAFVLERRRKKARLQWALQAYQGQLLQEGATRLLRFAASMKASRQQLQAQQQVQAAHSLHRAVRRCATLWKQKVLGRGGKPQPLAAIAPSRKVTFEGPLLNRIAAGAGDGTLETKRPQASRPLGALGRLAAEEPHALELNTAHSARKQPRRPHFLLEPAQSQRPQKPQEHGLGMAQPAAPSLTRPFLAEAPTALVPHSPLPGALSSAPGPKQPPTASTGPELLLLPLSSFMPCGAAAPARVSAQRATPRDKPPVPSSLASVPDPHLLLPGDFSATRAGPGLSTAGSLDLEAELEEIQQQLLHYQTTKQNLWSCRRQASSLRRWLELNREEPGPEDQEVEQQVQKELEQVEMQIQLLAEELQAQRQPIGACVARIQALRQALC

SEQ ID NO: 63332 - protein, 125 aa, Homo sapiens
MDAVAVYHGKISRETGEKLLLATGLDGSYLLRDSESVPGVYCLCVLYHGYIYTYRVSQTETGSWSAETAPGVHKRYFRKIKNLISAFQKPDQGIVIPLQYPVEKKSSARSTQGIREDPDVCLKAP

SEQ ID NO: 63333 - protein, 128 aa, Homo sapiens
MDAVAVYHGKISRETGEKLLLATGLDGSYLLRDSESVPGVYCLCVLYHGYIYTYRVSQTETGSWSAETAPGVHKRYFRKIKNLISAFQKPDQGIVIPLQYPVEKKSSARSTQGTTGIREDPDVCLKAP

SEQ ID NO: 63334 - protein, 58 aa, Homo sapiens
MDAVAVYHGKISRETGEKLLLATGLDGSYLLRDSESVPGVYCLCVLHHWGYIKFINKL

SEQ ID NO: 63335 - protein, 77 aa, Homo sapiens
MDLPYYHGRLTKQDCETLLLKEGVDGNFLLRDSESIPGVLCLCVSFKNIVYTYRIFREKHGYYRIQNSNSDYVDVLP

SEQ ID NO: 63336 - protein, 132 aa, Homo sapiens
MDLPYYHGRLTKQDCETLLLKEGVDGNFLLRDSESIPGVLCLCVSFKNIVYTYRIFREKHGYYRIQTAEGSPKQVFPSLKELISKFEKPNQGMVVHLLKPIKRTSPSLRWRGLKLELETFVNSNSDYVDVLP

SEQ ID NO: 63337 - protein, 756 aa, Homo sapiens
MNGAPSPEDGASPSSPPLPPPPPPSWREFCESHARAAALDFARRFRLYLASHPQYAGPGAEAAFSRRFAELFLQHFEAEVARASGSLSPPILAPLSPGAEISPHDLSLESCRVGGPLAVLGPSRSSEDLAGPLPSSVSSSSTTSSKPKLKKRFSLRSVGRSVRGSVRGILQWRGTVDPPSSAGPLETSSGPPVLGGNSNSNSSGGAGTVGRGLVSDGTSPGERWTHRFERLRLSRGGGALKDGAGMVQREELLSFMGAEEAAPDPAGVGRGGGVAGPPSGGGGQPQWQKCRLLLRSEGEGGGGSRLEFFVPPKASRPRLSIPCSSITDVRTTTALEMPDRENTFVVKVEGPSEYIMETVDAQHVKAWVSDIQECLSPGPCPATSPRPMTLPLAPGTSFLTRENTDSLELSCLNHSESLPSQDLLLGPSESNDRLSQGAYGGLSDRPSASISPSSASIAASHFDSMELLPPELPPRIPIEEGPPTGTVHPLSAPYPPLDTPETATGSFLFQGEPEGGEGDQPLSGYPWFHGMLSRLKAAQLVLTGGTGSHGVFLVRQSETRRGEYVLTFNFQGKAKHLRLSLNEEGQCRVQHLWFQSIFDMLEHFRVHPIPLESGGSSDVVLVSYVPSSQRQQEPTTSHDPPQPPEPPSWTDPPQPGAEEASRAPEVAAAAAAAAKERQEKEKAGGGGVPEELVPVVELVPVVELEEAIAPGSEAQGAGSGGDAGVPPMVQLQQSPLGGDGEEGGHPRAINNQYSFV

SEQ ID NO: 63338 - protein, 671 aa, Homo sapiens
MNGAPSPEDGASPSSPPLPPPPPPSWREFCESHARAAALDFARRFRLYLASHPQYAGPGAEAAFSRRFAELFLQHFEAEVARASGSLSPPILAPLSPGAEISPHDLSLESCRVGGPLAVLGPSRSSEDLAGPLPSSVSSSSTTSSKPKLKKRFSLRSVGRSVRGSVRGILQWRGTVDPPSSAGPLETSSGPPVLGGNSNSNSSGGAGTVGRGLVSDGTSPGERWTHRFERLRLSRGGGALKDGAGMVQREELLSFMGAEEAAPDPAGVGRGGGVAGPPSGGGGQPQWQKCRLLLRSEGEGGGGSRLEFFVPPKASRPRLSIPCSSITDVRTTTALEMPDRENTFVVKVEGPSEYIMETVDAQHVKAWVSDIQECLSPGPCPATSPRPMTLPLAPGTSFLTRENTDSLELSCLNHSESLPSQDLLLGPSESNDRLSQGAYGGLSDRPSASISPSSASIAASHFDSMELLPPELPPRIPIEEGPPTGTVHPLSAPYPPLDTPETATGSFLFQGEPEGGEGDQPLSGYPWFHGMLSRLKAAQLVLTGGTGSHGVFLVRQSETRRGEYVLTFNFQGKAKHLRLSLNEEGQCRVQHLWFQSIFDMLEHFRVHPIPLESGGSSDVVLVSYVPSSQRQQGREQAGSHAGVCEGDGCHPDASCTLMPFGASDCVTDHLP

SEQ ID NO: 63339 - protein, 683 aa, Homo sapiens
MNGAPSPEDGASPSSPPLPPPPPPSWREFCESHARAAALDFARRFRLYLASHPQYAGPGAEAAFSRRFAELFLQHFEAEVARASGSLSPPILAPLSPGAEISPHDLSLESCRVGGPLAVLGPSRSSEDLAGPLPSSVSSSSTTSSKPKLKKRFSLRSVGRSVRGSVRGILQWRGTVDPPSSAGPLETSSGPPVLGGNSNSNSSGGAGTVGRGLVSDGTSPGERWTHRFERLRLSRGGGALKDGAGMVQREELLSFMGAEEAAPDPAGVGRGGGVAGPPSGGGGQPQWQKCRLLLRSEGEGGGGSRLEFFVPPKASRPRLSIPCSSITDVRTTTALEMPDRENTFVVKVEGPSEYIMETVDAQHVKAWVSDIQECLSPGPCPATSPRPMTLPLAPGTSFLTRENTDSLELSCLNHSESLPSQDLLLGPSESNDRLSQGAYGGLSDRPSASISPSSASIAASHFDSMELLPPELPPRIPIEEGPPTGTVHPLSAPYPPLDTPETATGSFLFQGEPEGGEGDQPLSGYPWFHGMLSRLKAAQLVLTGGTGSHGVFLVRQSETRRGEYVLTFNFQGKAKHLRLSLNEEGQCRVQHLWFQSIFDMLEHFRVHPIPLESGGSSDVVLVSYVPSSQRQQGEQSRSAGEEVPVHPRSEAGSRLGAMRGCAREMDATPMPPAPSCPSERVTV

SEQ ID NO: 63340 - protein, 671 aa, Homo sapiens; identical to SEQ ID NO: 63338

SEQ ID NO: 63341 - protein, 335 aa, Homo sapiens
MPDRENTFVVKVEGPSEYIMETVDAQHVKAWVSDIQECLSPGPCPATSPRPMTLPLAPGTSFLTRENTDSLELSCLNHSESLPSQDLLLGPSESNDRLSQGAYGGLSDRPSASISPSSASIAASHFDSMELLPPELPPRIPIEEGPPTGTVHPLSAPYPPLDTPETATGSFLFQGEPEGGEGDQPLSGYPWFHGMLSRLKAAQLVLTGGTGSHGVFLVRQSETRRGEYVLTFNFQGKAKHLRLSLNEEGQCRVQHLWFQSIFDMLEHFRVHPIPLESGGSSDVVLVSYVPSSQRQQGREQAGSHAGVCEGDGCHPDASCTLMPFGASDCVTDHLP

SEQ ID NO: 63342 - protein, 373 aa, Homo sapiens
MAEASRPRLSIPCSSITDVRTTTALEMPDRENTFVVKVEGPSEYIMETVDAQHVKAWVSDIQECLSPGPCPATSPRPMTLPLAPGTSFLTRENTDSLELSCLNHSESLPSQDLLLGPSESNDRLSQGAYGGLSDRPSASISPSSASIAASHFDSMELLPPELPPRIPIEEGPPTGTVHPLSAPYPPLDTPETATGSFLFQGEPEGGEGDQPLSGYPWFHGMLSRLKAAQLVLTGGTGSHGVFLVRQSETRRGEYVLTFNFQGKAKHLRLSLNEEGQCRVQHLWFQSIFDMLEHFRVHPIPLESGGSSDVVLVSYVPSSQRQQGEQSRSAGEEVPVHPRSEAGSRLGAMRGCAREMDATPMPPAPSCPSERVTV

SEQ ID NO: 63343 - protein, 575 aa, Homo sapiens
MNGPALQPSSPSSAPSASPAAAPRGWSEFCELHAVAAARELARQYWLFAREHPQHAPLRAELVSLQFTDLFQRYFCREVRDGRAPGRDYRDTGRGPPAKAEASPEPGPGPAAPGLPKARSSEELAPPRPPGPCSFQHFRRSLRHIFRRRSAGELPAAHTAAAPGTPGEAAETPARPGLAKKFLPWSLAREPPPEALKEAVLRYSLADEASMDSGARWQRGRLALRRAPGPDGPDRVLELFDPPKSSRPKLQAACSSIQEVRWCTRLEMPDNLYTFVLKVKDRTDIIFEVGDEQQLNSWMAELSECTGRGLESTEAEMHIPSALEPSTSSSPRGSTDSLNQGASPGGLLDPACQKTDHFLSCYPWFHGPISRVKAAQLVQLQGPDAHGVFLVRQSETRRGEYVLTFNFQGIAKHLRLSLTERGQCRVQHLHFPSVVDMLHHFQRSPIPLECGAACDVRLSSYVVVVSQPPGSCNTVLFPFSLPHWDSESLPHWGSELGLPHLSSSGCPRGLSPEGLPGRSSPPEQIFHLVPSPEELANSLQHLEHEPVNRARDSDYEMDSSSRSHLRAIDNQYTPL

SEQ ID NO: 63344 - protein, 373 aa, Homo sapiens
MGFPVLCRGWRRTWPGCASWLGAPPPQKPLLSPLLLNHRSSKSSRPKLQAACSSIQEVRWCTRLEMPDNLYTFVLKVKDRTDIIFEVGDEQQLNSWMAELSECTGRGLESTEAEMHIPSALEPSTSSSPRGSTDSLNQGASPGGLLDPACQKTDHFLSCYPWFHGPISRVKAAQLVQLQGPDAHGVFLVRQSETRRGEYVLTFNFQGIAKHLRLSLTERGQCRVQHLHFPSVVDMLHHFQRSPIPLECGAACDVRLSSYVVVVSQPPGSCNTVLFPFSLPHWDSESLPHWGSELGLPHLSSSGCPRGLSPEGLPGRSSPPEQIFHLVPSPEELANSLQHLEHEPVNRARDSDYEMDSSSRSHLRAIDNQYTPL

SEQ ID NO: 63345 - protein, 402 aa, Homo sapiens
MIPPSSPREDGVDGLPKEAVGAEQPPSPASTSSQESKLQKLKRSLSFKTKSLRSKSADNFFQRTNSEDMKLQAHMVAEISPSSSPLPAPGSLTSTPARAGLHPGGKAHAFQEYIFKKPTFCDVCNHMIVGTNAKHGLRCKACKMSIHHKCTDGLAPQRCMGKLPKGFRRYYSSPLLIHEQFGCIKEVMPIACGNKVDPVYETLRFGTSLAQRTKKGSSGSGSDSPHRTSTSDLVEVPEEANGPGGGYDLRKRSNSVFTYPENGTDDFRDPAKNINHQGSLSKDPLQMNTYVALYKFVPQENEDLEMRPGDIITLLEDSNEDWWKGKIQDRIGFFPANFVQRLQQNEKIFRCVRTFIGCKEQGQITLKENQICVSSEEEQDGFIRVLSGKKKGLIPLDVLENI

SEQ ID NO: 63346 - protein, 334 aa, Homo sapiens
MKLQAHMVAEISPSSSPLPAPGSLTSTPARAGLHPGGKAHAFQEYIFKKPTFCDVCNHMIVGTNAKHGLRCKACKMSIHHKCTDGLAPQRCMGKLPKGFRRYYSSPLLIHEQFGCIKEVMPIACGNKVDPVYETLRFGTSLAQRTKKGSSGSGSDSPHRTSTSDLVEVPEEANGPGGGYDLRKRSNSVFTYPENGTDDFRDPAKNINHQGSLSKDPLQMNTYVALYKFVPQENEDLEMRPGDIITLLEDSNEDWWKGKIQDRIGFFPANFVQRLQQNEKIFRCVRTFIGCKEQGQITLKENQICVSSEEEQDGFIRVLSGKKKGLIPLDVLENI

SEQ ID NO: 63347 - protein, 1473 aa, Homo sapiens
VAIIAGNFELAEYIKNHKETDIVPFREAPAYSNRRRRPPNTLAAPRVLLRSNSDNNLNASAPDWAVCSTATSHRSLSPQLLQQMPSKPEGAAKTIGSYVPGPRSRSPSLNRLGGAGEDGKRPQPLWHVGSPFALGANKDSLSAFEYPGPKRKLYSAVPGRLFVAVKPYQPQVDGEIPLHRGDRVKVLSIGEGGFWEGSARGHIGWFPAECVEEVQCKPRDSQAETRADRSKKLFRHYTVGSYDSFDTSSDCIIEEKTVVLQKKDNEGFGFVLRGAKADTPIEEFTPTPAFPALQYLESVDEGGVAWQAGLRTGDFLIEVNNENVVKVGHRQVVNMIRQGGNHLVLKVVTVTRNLDPDDTARKKAPPPPKRAPTTALTLRSKSMTSELEELVDKDKPEEIVPASKPSRAAENMAVEPRVATIKQRPSSRCFPAGSDMNSVYERQGIAVMTPTVPGSPKAPFLGIPRGTMRRQKSIDSRIFLSGITEEERQFLAPPMLKFTRSLSMPDTSEDIPPPPQSVPPSPPPPSPTTYNCPKSPTPRVYGTIKPAFNQNSAAKVSPATRSDTVATMMREKGMYFRRELDRYSLDSEDLYSRNAGPQANFRNKRGQMPENPYSEVGKIASKAVYVPAKPARRKGMLVKQSNVEDSPEKTCSIPIPTIIVKEPSTSSSGKSSQGSSMEIDPQAPEPPSQLRPDESLTVSSPFAAAIAGAVRDREKRLEARRNSPAFLSTDLGDEDVGLGPPAPRTRPSMFPEEGDFADEDSAEQLSSPMPSATPREPENHFVGGAEASAPGEAGRPLNSTSKAQGPESSPAVPSASSGTAGPGNYVHPLTGRLLDPSSPLALALSARDRAMKESQQGPKGEAPKADLNKPLYIDTKMRPSLDAGFPTVTRQNTRGPLRRQETENKYETDLGRDRKGDDKKNMLIDIMDTSQQKSAGLLMVHTVDATKLDNALQEEDEKAEVEMKPDSSPSEVPEGVSETEGALQISAAPEPTTVPGRTIVAVGSMEEAVILPFRIPPPPLASVDLDEDFIFTEPLPPPLEFANSFDIPDDRAASVPALSDLVKQKKSDTPQSPSLNSSQPTNSADSKKPASLSNCLPASFLPPPESFDAVADSGIEEVDSRSSSDHHLETTSTISTVSSISTLSSEGGENVDTCTVYADGQAFMVDKPPVPPKPKMKPIIHKSNALYQDALVEEDVDSFVIPPPAPPPPPGSAQPGMAKVLQPRTSKLWGDVTEIKSPILSGPKANVISELNSILQQMNREKLAKPGEGLDSPMGAKSASLAPRSPEIMSTISGTRSTTVTFTVRPGTSQPITLQSRPPDYESRTSGTRRAPSPVVSPTEMNKETLPAPLSAATASPSPALSDVFSLPSQPPSGDLFGLNPAGRSRSPSPSILQQPISNKPFTTKPVHLWTKPDVADWLESLNLGEHKEAFMDNEIDGSHLPNLQKEDLIDLGVTRVGHRMNIERALKQLLDR

SEQ ID NO: 63348 - protein, 1850 aa, Homo sapiens
MPRSPTSSEDEMAQSFSDYSVGSESDSSKEETIYDTIRATAEKPGGARTEESQGNTLVIRVVIHDLQQTKCIRFNPDATVWVAKQRILCTLTQSLKDVLNYGLFQPASNGRDGKFLDEERLLREYPQPVGEGVPSLEFRYKKRVYKQASLDEKQLAKLHTKTNLKKCMDHIQHRLVEKITKMLDRGLDPNFHDPETGETPLTLAAQLDDSVEVIKALKNGGAHLDFRAKDGMTALHKAARARNQVALKTLLELGASPDYKDSYGLTPLYHTAIVGGDPYCCELLLHEHATVCCKDENGWHEIHQSRCWGHISEPHHTLLSGSARSQQSRSASSALHVCAMYSSFSCVRISLLFHGRITELKQYKKSTPFQVAIIAGNFELAEYIKNHKETDIVPFREAPAYSNRRRRPPNTLAAPRVLLRSNSDNNLNASAPDWAVCSTATSHRSLSPQLLQQMPSKPEGAAKTIGSYVPGPRSRSPSLNRLGGAGEDGKRPQPLWHVGSPFALGANKDSLSAFEYPGPKRKLYSAVPGRLFVAVKPYQPQVDGEIPLHRGDRVKVLSIGEGGFWEGSARGHIGWFPAECVEEVQCKPRDSQAETRADRSKKLFRHYTVGSYDSFDTSSDCIIEEKTVVLQKKDNEGFGFVLRGAKADTPIEEFTPTPAFPALQYLESVDEGGVAWQAGLRTGDFLIEVNNENVVKVGHRQVVNMIRQGGNHLVLKVVTVTRNLDPDDTARKKAPPPPKRAPTTALTLRSKSMTSELEELVDKGVIRKVSDKPEEIVPASKPSRAAENMAVEPRVATIKQRPSSRCFPAGSDMNSVYERQGIAVMTPTVPGSPKAPFLGIPRGTMRRQKSIDSRIFLSGITEEERQFLAPPMLKFTRSLSMPDTSEDIPPPPQSVPPSPPPPSPTTYNCPKSPTPRVYGTIKPAFNQNSAAKVSPATRSDTVATMMREKGMYFRRELDRYSLDSEDLYSRNAGPQANFRNKRGQMPENPYSEVGKIASKAVYVPAKPARRKGMLVKQSNVEDSPEKTCSIPIPTIIVKEPSTSSSGKSSQGSSMEIDPQAPEPPSQLRPDESLTVSSPFAAAIAGAVRDREKRLEARRNSPAFLSTDLGDEDVGLGPPAPRTRPSMFPEEGDFADEDSAEQLSSPMPSATPREPENHFVGGAEASAPGEAGRPLNSTSKAQGPESSPAVPSASSGTAGPGNYVHPLTGRLLDPSSPLALALSARDRAMKESQQGPKGEAPKADLNKPLYIDTKMRPSLDAGFPTVTRQNTRGPLRRQETENKYETDLGRDRKGDDKKNMLIDIMDTSQQKSAGLLMVHTVDATKLDNALQEEDEKAEVEMKPDSSPSEVPEGVSETEGALQISAAPEPTTVPGRTIVAVGSMEEAVILPFRIPPPPLASVDLDEDFIFTEPLPPPLEFANSFDIPDDRAASVPALSDLVKQKKSDTPQSPSLNSSQPTNSADSKKPASLSNCLPASFLPPPESFDAVADSGIEEVDSRSSSDHHLETTSTISTVSSISTLSSEGGENVDTCTVYADGQAFMVDKPPVPPKPKMKPIIHKSNALYQDALVEEDVDSFVIPPPAPPPPPGSAQPGMAKVLQPRTSKLWGDVTEIKSPILSGPKANVISELNSILQQMNREKLAKPGEGLDSPMGAKSASLAPRSPEIMSTISGTRSTTVTFTVRPGTSQPITLQSRPPDYESRTSGTRRAPSPVVSPTEMNKETLPAPLSAATASPSPALSDVFSLPSQPPSGDLFGLNPAGRSRSPSPSILQQPISNKPFTTKPVHLWTKPDVADWLESLNLGEHKEAFMDNEIDGSHLPNLQKEDLIDLGVTRVGHRMNIERALKQLLDR

SEQ ID NO: 63349 - protein, 281 aa, Homo sapiens
MMMNVPGGGAAAVMMTGYNNGRCPRNSLYSDCIIEEKTVVLQKKDNEGFGFVLRGAKADTPIEEFTPTPAFPALQYLESVDEGGVAWQAGLRTGDFLIEVNNENVVKVGHRQVVNMIRQGGNHLVLKVVTVTRNLDPDDTARKKAPPPPKRAPTTALTLRSKSMTSELEELVDKGVIRKGKDKPEEIVPASKPSRAAENMAVEPRVATIKQRPSSRCFPAGSDMNSVYERQGIAVMTPTVPGSPKAPFLGIPRGTMRRQKSIGKKCGTPPQKLPLGFQTQP

SEQ ID NO: 63350 - protein, 1253 aa, Homo sapiens
MMNVPGGGAAAVMMTGYNNGRCPRNSLYSDCIIEEKTVVLQKKDNEGFGFVLRGAKADTPIEEFTPTPAFPALQYLESVDEGGVAWQAGLRTGDFLIEVNNENVVKVGHRQVVNMIRQGGNHLVLKVVTVTRNLDPDDTARKKAPPPPKRAPTTALTLRSKSMTSELEELVDKDKPEEIVPASKPSRAAENMAVEPRVATIKQRPSSRCFPAGSDMNSVYERQGIAVMTPTVPGSPKAPFLGIPRGTMRRQKSIDSRIFLSGITEEERQFLAPPMLKFTRSLSMPDTSEDIPPPPQSVPPSPPPPSPTTYNCPKSPTPRVYGTIKPAFNQNSAAKVSPATRSDTVATMMREKGMYFRRELDRYSLDSEDLYSRNAGPQANFRNKRGQMPENPYSEVGKIASKAVYVPAKPARRKGMLVKQSNVEDSPEKTCSIPIPTIIVKEPSTSSSGKSSQGSSMEIDPQAPEPPSQLRPDESLTVSSPFAAAIAGAVRDREKRLEARRNSPAFLSTDLGDEDVGLGPPAPRTRPSMFPEEGDFADEDSAEQLSSPMPSATPREPENHFVGGAEASAPGEAGRPLNSTSKAQGPESSPAVPSASSGTAGPGNYVHPLTGRLLDPSSPLALALSARDRAMKESQQGPKGEAPKADLNKPLYIDTKMRPSLDAGFPTVTRQNTRGPLRRQETENKYETDLGRDRKGDDKKNMLIDIMDTSQQKSAGLLMVHTVDATKLDNALQEEDEKAEVEMKPDSSPSEVPEGVSETEGALQISAAPEPTTVPGRTIVAVGSMEEAVILPFRIPPPPLASVDLDEDFIFTEPLPPPLEFANSFDIPDDRAASVPALSDLVKQKKSDTPQSPSLNSSQPTNSADSKKPASLSNCLPASFLPPPESFDAVADSGIEEVDSRSSSDHHLETTSTISTVSSISTLSSEGGENVDTCTVYADGQAFMVDKPPVPPKPKMKPIIHKSNALYQDALVEEDVDSFVIPPPAPPPPPGSAQPGMAKVLQPRTSKLWGDVTEIKSPILSGPKANVISELNSILQQMNREKLAKPGEGLDSPMGAKSASLAPRSPEIMSTISGTRSTTVTFTVRPGTSQPITLQSRPPDYESRTSGTRRAPSPVVSPTEMNKETLPAPLSAATASPSPALSDVFSLPSQPPSGDLFGLNPAGRSRSPSPSILQQPISNKPFTTKPVHLWTKPDVADWLESLNLGEHKEAFMDNEIDGSHLPNLQKEDLIDLGVTRVGHRMNIERALKQLLDR

SEQ ID NO: 63351 - protein, 280 aa, Homo sapiens
MMNVPGGGAAAVMMTGYNNGRCPRNSLYSDCIIEEKTVVLQKKDNEGFGFVLRGAKADTPIEEFTPTPAFPALQYLESVDEGGVAWQAGLRTGDFLIEVNNENVVKVGHRQVVNMIRQGGNHLVLKVVTVTRNLDPDDTARKKAPPPPKRAPTTALTLRSKSMTSELEELVDKASVRKKKDKPEEIVPASKPSRAAENMAVEPRVATIKQRPSSRCFPAGSDMNSVYERQGIAVMTPTVPGSPKAPFLGIPRGTMRRQKSIGKKCGTPPQKLPLGFQTQP

SEQ ID NO: 63352 - protein, 1470 aa, Homo sapiens
MKSLLNAFTKKEVPFREAPAYSNRRRRPPNTLAAPRVLLRSNSDNNLNASAPDWAVCSTATSHRSLSPQLLQQMPSKPEGAAKTIGSYVPGPRSRSPSLNRLGGAGEDGKRPQPLWHVGSPFALGANKDSLSAFEYPGPKRKLYSAVPGRLFVAVKPYQPQVDGEIPLHRGDRVKVLSIGEGGFWEGSARGHIGWFPAECVEEVQCKPRDSQAETRADRSKKLFRHYTVGSYDSFDTSSDCIIEEKTVVLQKKDNEGFGFVLRGAKADTPIEEFTPTPAFPALQYLESVDEGGVAWQAGLRTGDFLIEVNNENVVKVGHRQVVNMIRQGGNHLVLKVVTVTRNLDPDDTARKKAPPPPKRAPTTALTLRSKSMTSELEELVDKASVRKKKDKPEEIVPASKPSRAAENMAVEPRVATIKQRPSSRCFPAGSDMNSVYERQGIAVMTPTVPGSPKAPFLGIPRGTMRRQKSIDSRIFLSGITEEERQFLAPPMLKFTRSLSMPDTSEDIPPPPQSVPPSPPPPSPTTYNCPKSPTPRVYGTIKPAFNQNSAAKVSPATRSDTVATMMREKGMYFRRELDRYSLDSEDLYSRNAGPQANFRNKRGQMPENPYSEVGKIASKAVYVPAKPARRKGMLVKQSNVEDSPEKTCSIPIPTIIVKEPSTSSSGKSSQGSSMEIDPQAPEPPSQLRPDESLTVSSPFAAAIAGAVRDREKRLEARRNSPAFLSTDLGDEDVGLGPPAPRTRPSMFPEEGDFADEDSAEQLSSPMPSATPREPENHFVGGAEASAPGEAGRPLNSTSKAQGPESSPAVPSASSGTAGPGNYVHPLTGRLLDPSSPLALALSARDRAMKESQQGPKGEAPKADLNKPLYIDTKMRPSLDAGFPTVTRQNTRGPLRRQETENKYETDLGRDRKGDDKKNMLIDIMDTSQQKSAGLLMVHTVDATKLDNALQEEDEKAEVEMKPDSSPSEVPEGVSETEGALQISAAPEPTTVPGRTIVAVGSMEEAVILPFRIPPPPLASVDLDEDFIFTEPLPPPLEFANSFDIPDDRAASVPALSDLVKQKKSDTPQSPSLNSSQPTNSADSKKPASLSNCLPASFLPPPESFDAVADSGIEEVDSRSSSDHHLETTSTISTVSSISTLSSEGGENVDTCTVYADGQAFMVDKPPVPPKPKMKPIIHKSNALYQDALVEEDVDSFVIPPPAPPPPPGSAQPGMAKVLQPRTSKLWGDVTEIKSPILSGPKANVISELNSILQQMNREKLAKPGEGLDSPMGAKSASLAPRSPEIMSTISGTRSTTVTFTVRPGTSQPITLQSRPPDYESRTSGTRRAPSPVVSPTEMNKETLPAPLSAATASPSPALSDVFSLPSQPPSGDLFGLNPAGRSRSPSPSILQQPISNKPFTTKPVHLWTKPDVADWLESLNLGEHKEAFMDNEIDGSHLPNLQKEDLIDLGVTRVGHRMNIERALKQLLDR

SEQ ID NO: 63353 - protein, 271 aa, Homo sapiens
MMMNVPGGGAAAVMMTGYNNGRCPRNSLYSDCIIEEKTVVLQKKDNEGFGFVLRGAKADTPIEEFTPTPAFPALQYLESVDEGGVAWQAGLRTGDFLIEVNNENVVKVGHRQVVNMIRQGGNHLVLKVVTVTRNLDPDDTARKKAPPPPKRAPTTALTLRSKSMTSELEELDKPEEIVPASKPSRAAENMAVEPRVATIKQRPSSRCFPAGSDMNSVYERQGIAVMTPTVPGSPKAPFLGIPRGTMRRQKSIGKKCGTPPQKLPLGFQTQP

SEQ ID NO: 63354 - protein, 1254 aa, Homo sapiens
MMMNVPGGGAAAVMMTGYNNGRCPRNSLYSDCIIEEKTVVLQKKDNEGFGFVLRGAKADTPIEEFTPTPAFPALQYLESVDEGGVAWQAGLRTGDFLIEVNNENVVKVGHRQVVNMIRQGGNHLVLKVVTVTRNLDPDDTARKKAPPPPKRAPTTALTLRSKSMTSELEELVDKDKPEEIVPASKPSRAAENMAVEPRVATIKQRPSSRCFPAGSDMNSVYERQGIAVMTPTVPGSPKAPFLGIPRGTMRRQKSIDSRIFLSGITEEERQFLAPPMLKFTRSLSMPDTSEDIPPPPQSVPPSPPPPSPTTYNCPKSPTPRVYGTIKPAFNQNSAAKVSPATRSDTVATMMREKGMYFRRELDRYSLDSEDLYSRNAGPQANFRNKRGQMPENPYSEVGKIASKAVYVPAKPARRKGMLVKQSNVEDSPEKTCSIPIPTIIVKEPSTSSSGKSSQGSSMEIDPQAPEPPSQLRPDESLTVSSPFAAAIAGAVRDREKRLEARRNSPAFLSTDLGDEDVGLGPPAPRTRPSMFPEEGDFADEDSAEQLSSPMPSATPREPENHFVGGAEASAPGEAGRPLNSTSKAQGPESSPAVPSASSGTAGPGNYVHPLTGRLLDPSSPLALALSARDRAMKESQQGPKGEAPKADLNKPLYIDTKMRPSLDAGFPTVTRQNTRGPLRRQETENKYETDLGRDRKGDDKKNMLIDIMDTSQQKSAGLLMVHTVDATKLDNALQEEDEKAEVEMKPDSSPSEVPEGVSETEGALQISAAPEPTTVPGRTIVAVGSMEEAVILPFRIPPPPLASVDLDEDFIFTEPLPPPLEFANSFDIPDDRAASVPALSDLVKQKKSDTPQSPSLNSSQPTNSADSKKPASLSNCLPASFLPPPESFDAVADSGIEEVDSRSSSDHHLETTSTISTVSSISTLSSEGGENVDTCTVYADGQAFMVDKPPVPPKPKMKPIIHKSNALYQDALVEEDVDSFVIPPPAPPPPPGSAQPGMAKVLQPRTSKLWGDVTEIKSPILSGPKANVISELNSILQQMNREKLAKPGEGLDSPMGAKSASLAPRSPEIMSTISGTRSTTVTFTVRPGTSQPITLQSRPPDYESRTSGTRRAPSPVVSPTEMNKETLPAPLSAATASPSPALSDVFSLPSQPPSGDLFGLNPAGRSRSPSPSILQQPISNKPFTTKPVHLWTKPDVADWLESLNLGEHKEAFMDNEIDGSHLPNLQKEDLIDLGVTRVGHRMNIERALKQLLDR

SEQ ID NO: 63355 - protein, 304 aa, Homo sapiens
MPRSPTSSEDEMAQSFSDYSVGSESDSSKEETIYDTIRATAEKPGGARTEESQGNTLVIRVVIHDLQQTKCIRFNPDATVWVAKQRILCTLTQSLKDVLNYGLFQPASNGRDGKFLDEERLLREYPQPVGEGVPSLEFRYKKRVYKQASLDEKQLAKLHTKTNLKKCMDHIQHRLVEKITKMLDRGLDPNFHDPETGETPLTLAAQLDDSVEVIKALKNGGAHLDFRAKDGMTALHKAARARNQVALKTLLELGASPDYKDSYGLTPLYHTAIVGGDPYCCELLLHEHATVCCKDENGWHEIHQ

SEQ ID NO: 63356 - protein, 1747 aa, Homo sapiens
MDGPGASAVVVRVGIPDLQQTKCLRLDPAAPVWAAKQRVLCALNHSLQDALNYGLFQPPSRGRAGKFLDEERLLQEYPPNLDTPLPYLEFRYKRRVYAQNLIDDKQFAKLHTKANLKKFMDYVQLHSTDKVARLLDKGLDPNFHDPDSGECPLSLAAQLDNATDLLKVLKNGGAHLDFRTRDGLTAVHCATRQRNAAALTTLLDLGASPDYKDSRGLTPLYHSALGGGDALCCELLLHDHAQLGITDENGWQEIHQACRFGHVQHLEHLLFYGADMGAQNASGNTALHICALYNQESCARVLLFRGANRDVRNYNSQTAFQVAIIAGNFELAEVIKTHKDSDVVPFRETPSYAKRRRLAGPSGLASPRPLQRSASDINLKGEAQPAASPGPSLRSLPHQLLLQRLQEEKDRDRDADQESNISGPLAGRAGQSKISDPGPGPGGVGGAPLPPPGAPRSCIRIRARFPAPPAPPAPPPRGPKRKLYSAVPGRKFIAVKAHSPQGEGEIPLHRGEAVKVLSIGEGGFWEGTVKGRTGWFPADCVEEVQMRQHDTRPETREDRTKRLFRHYTVGSYDSLTSHSDYVIDDKVAVLQKRDHEGFGFVLRGAKAETPIEEFTPTPAFPALQYLESVDVEGVAWRAGLRTGDFLIEVNGVNVVKVGHKQVVALIRQGGNRLVMKVVSVTRKPEEDGARRRAPPPPKRAPSTTLTLRSKSMTAELEELASIRRRKGEKLDEMLAAAAEPTLRPDIADADSRAATVKQRPTSRRITPAEISSLFERQGLPGPEKLPGSLRKGIPRTKSVGEDEKLASLLEGRFPRSTSMQDPVREGRGIPPPPQTAPPPPPAPYYFDSGPPPAFSPPPPPGRAYDTVRSSFKPGLEARLGAGAAGLYEPGAALGPLPYPERQKRARSMIILQDSAPESGDAPRPPPAATPPERPKRRPRPPGPDSPYANLGAFSASLFAPSKPQRRKSPLVKQLQVEDAQERAALAVGSPGPGGGSFAREPSPTHRGPRPGGLDYGAGDGPGLAFGGPGPAKDRRLEERRRSTVFLSVGAIEGSAPGADLPSLQPSRSIDERLLGTGPTAGRDLLLPSPVSALKPLVSGPSLGPSGSTFIHPLTGKPLDPSSPLALALAARERALASQAPSRSPTPVHSPDADRPGPLFVDVQARDPERGSLASPAFSPRSPAWIPVPARREAEKVPREERKSPEDKKSMILSVLDTSLQRPAGLIVVHATSNGQEPSRLGGAEEERPGTPELAPAPMQSAAVAEPLPSPRAQPPGGTPADAGPGQGSSEEEPELVFAVNLPPAQLSSSDEETREELARIGLVPPPEEFANGVLLATPLAGPGPSPTTVPSPASGKPSSEPPPAPESAADSGVEEADTRSSSDPHLETTSTISTVSSMSTLSSESGELTDTHTSFADGHTFLLEKPPVPPKPKLKSPLGKGPVTFRDPLLKQSSDSELMAQQHHAASAGLASAAGPARPRYLFQRRSKLWGDPVESRGLPGPEDDKPTVISELSSRLQQLNKDTRSLGEEPVGGLGSLLDPAKKSPIAAARLFSSLGELSSISAQRSPGGPGGGASYSVRPSGRYPVARRAPSPVKPASLERVEGLGAGAGGAGRPFGLTPPTILKSSSLSIPHEPKEVRFVVRSVSARSRSPSPSPLPSPASGPGPGAPGPRRPFQQKPLQLWSKFDVGDWLESIHLGEHRDRFEDHEIEGAHLPALTKDDFVELGVTRVGHRMNIERALRQLDGS

SEQ ID NO: 63357 - protein, 1742 aa, Homo sapiens
MDGPGASAVVVRVGIPDLQQTKCLRLDPAAPVWAAKQRVLCALNHSLQDALNYGLFQPPSRGRAGKFLDEERLLQEYPPNLDTPLPYLEFRYKRRVYAQNLIDDKQFAKLHTKANLKKFMDYVQLHSTDKVARLLDKGLDPNFHDPDSGECPLSLAAQLDNATDLLKVLKNGGAHLDFRTRDGLTAVHCATRQRNAAALTTLLDLGASPDYKDSRGLTPLYHSALGGGDALCCELLLHDHAQLGITDENGWQEIHQACRFGHVQHLEHLLFYGADMGAQNASGNTALHICALYNQESCARVLLFRGANRDVRNYNSQTAFQVAIIAGNFELAEVIKTHKDSDVVPFRETPSYAKRRRLAGPSGLASPRPLQRSASDINLKGEAQPAASPGPSLRSLPHQLLLQRLQEEKDRDRDADQESNISGPLAGRAGQSKISEPGAPRSCIRIRARFPAPPAPPAPPPRGPKRKLYSAVPGRKFIAVKAHSPQGEGEIPLHRGEAVKVLSIGEGGFWEGTVKGRTGWFPADCVEEVQMRQHDTRPETREDRTKRLFRHYTVGSYDSLTSHSDYVIDDKVAVLQKRDHEGFGFVLRGAKAETPIEEFTPTPAFPALQYLESVDVEGVAWRAGLRTGDFLIEVNGVNVVKVGHKQVVALIRQGGNRLVMKVVSVTRKPEEDGARRRAPPPPKRAPSTTLTLRSKSMTAELEELGEWRGREGSEKLDEMLAAAAEPTLRPDIADADSRAATVKQRPTSRRITPAEISSLFERQGLPGPEKLPGSLRKGIPRTKSVGEDEKLASLLEGRFPRSTSMQDPVREGRGIPPPPQTAPPPPPAPYYFDSGPPPAFSPPPPPGRAYDTVRSSFKPGLEARLGAGAAGLYEPGAALGPLPYPERQKRARSMIILQDSAPESGDAPRPPPAATPPERPKRRPRPPGPDSPYANLGAFSASLFAPSKPQRRKSPLVKQLQVEDAQERAALAVGSPGPGGGSFAREPSPTHRGPRPGGLDYGAGDGPGLAFGGPGPAKDRRLEERRRSTVFLSVGAIEGSAPGADLPSLQPSRSIDERLLGTGPTAGRDLLLPSPVSALKPLVSGPSLGPSGSTFIHPLTGKPLDPSSPLALALAARERALASQAPSRSPTPVHSPDADRPGPLFVDVQARDPERGSLASPAFSPRSPAWIPVPARREAEKVPREERKSPEDKKSMILSVLDTSLQRPAGLIVVHATSNGQEPSRLGGAEEERPGTPELAPAPMQSAAVAEPLPSPRAQPPGGTPADAGPGQGSSEEEPELVFAVNLPPAQLSSSDEETREELARIGLVPPPEEFANGVLLATPLAGPGPSPTTVPSPASGKPSSEPPPAPESAADSGVEEADTRSSSDPHLETTSTISTVSSMSTLSSESGELTDTHTSFADGHTFLLEKPPVPPKPKLKSPLGKGPVTFRDPLLKQSSDSELMAQQHHAASAGLASAAGPARPRYLFQRRSKLWGDPVESRGLPGPEDDKPTVISELSSRLQQLNKDTRSLGEEPVGGLGSLLDPAKKSPIAAARCRSPMVGLRLFSSLGELSSISAQRSPGGPGGGASYSVRPSGRYPVARRAPSPVKPASLERVEGLGAGAGGAGRPFGLTPPTILKSSSLSIPHEPKEVRFVVRSVSARSRSPSPSPLPSPASGPGPGAPGPRRPFQQKPLQLWSKFDVGDWLESIHLGEHRDRFEDHEIEGAHLPALTKDDFVELGVTRVGHRMNIERALRQLDGS

SEQ ID NO: 63358 - protein, 911 aa, Homo sapiens
MPPRRSIVEVKVLDVQKRRVPNKHYVYIIRVTWSSGSTEAIYRRYSKFFDLQMQMLDKFPMEGGQKDPKQRIIPFLPGKILFRRSHIRDVAVKRLIPIDEYCKALIQLPPYISQCDEVLQFFETRPEDLNPPKEEHIGKKKSGGDQTSVDPMVLEQYVVVANYQKQESSEISLSVGQVVDIIEKNESGWWFVSTAEEQGWVPATCLEGQDGVQDEFSLQPEEEEKYTVIYPYTARDQDEMNLERGAVVEVIQKNLEGWWKIRYQGKEGWAPASYLKKNSGEPLPPKPGPGSPSHPGALDLDGVSRQQNAVGREKELLSSQRDGRFEGRPVPDGDAKQRSPKMRQRPPPRRDMTIPRGLNLPKPPIPPQVEEEYYTIAEFQTTIPDGISFQAGLKVEVIEKNLSGWWYIQIEDKEGWAPATFIDKYKKTSNASRPNFLAPLPHEVTQLRLGEAAALENNTGSEATGPSRPLPDAPHGVMDSGLPWSKDWKGSKDVLRKASSDMSASAGYEEISDPDMEEKPSLPPRKESIIKSEGELLERERERQRTEQLRGPTPKPPGVILPMMPAKHIPPARDSRRPEPKPDKSRLFQLKNDMGLECGHKVLAKEVKKPNLRPISKSKTDLPEEKPDATPQNPFLKSRPQVRPKPAPSPKTEPPQGEDQVDICNLRSKLRPAKSQDKSLLDGEGPQAVGGQDVAFSRSFLPGEGPGRAQDRTGKQDGLSPKEISCRAPPRPAKTTDPVSKSVPVPLQEAPQQRPVVPPRRPPPPKKTSSSSRPLPEVRGPQCEGHESRAAPTPGRALLVPPKAKPFLSNSLGGQDDTRGKGSLGPWGTGKIGENREKAAAASVPNADGLKDSLYVAVADFEGDKDTSSFQEGTVFEVREKNSSGWWFCQVLSGAPSWEGWIPSNYLRKKP

SEQ ID NO: 63359 - protein, 934 aa, Homo sapiens
MEEIWKFSTYLNLGYVSMCLEHLLFDHKYWLNCILVEDTEIQVSVDDKHLETIYLGLLIQEGHFFCRALCSVTPPAEKEGECLTLCKNELISVKMAEAGSELEGVSLVTGQRGLVLVSALEPLPLPFHQWFLKNYPGSCGLSRKRDWTGSYQIGRGRCKALTGYEPGEKDELNFYQGESIEIIGFVIPGLQWFIGKSTSSGQVGFVPTRNIDPDSYSPMSRNSAFLSDEERCSLLALGSDKQTECSSFLHTLARTDITSVYRLSGFESIQNPPNDLSASQPEGFKEVRPGRAWEEHQAVGSRQSSSSEDSSLEEELLSATSDSYRLPEPDDLDDPELLMDLSTGQEEEAENFAPILAFLDHEGYADHFKSLYDFSFSFLTSSFYSFSEEDEFVAYLEASRKWAKKSHMTWAHARLCFLLGRLSIRKVKLSQARVYFEEAIHILNGAFEDLSLVATLYINLAAIYLKQRLRHKGSALLEKAGALLACLPDRESSAKHELDVVAYVLRQGIVVGSSPLEARACFLAIRLLLSLGRHEEVLPFAERLQLLSGHPPASEAVASVLSFLYDKKYLPHLAVASVQQHGIQSAQGMSLPIWQVHLVLQNTTKLLGFPSPGWGEVSALACPMLRQALAACEELADRSTQRALCLILSKVYLEHRSPDGAIHYLSQALVLGQLLGEQESFESSLCLAWAYLLASQAKKALDVLEPLLCSLKETESLTQRGVIYNLLGLALQGEGRVNRAAKSYLRALNRAQEVGDVHNQAVAMANLGHLSLKSWAQHPARNYLLQAVRLYCELQASKETDMELVQVFLWLAQVLVSGHQLTHGLLCYEMALLFGLRHRHLKSKYVPCCWEAIEKSVGSSFIHFLSQVISFMSLLCVQVSFRPPNPSAISTALCPQTLRHASPTMSTGWPWLSNSGTGRWKGGCWSPWGSFIGT

SEQ ID NO: 63360 - protein, 150 aa, Homo sapiens
MSEQMMQSVGCRISLSVFQFLGDQRQELVAFHRLATVYYSLHMYEMAEDCYLKTLSLCPPWLQSPKEALYYAKVYYRLGRLTFCQLKDAHDATEYFLLALAAAVLLGDEELQDTIRSRLDNICQSPLWHSRPSGCSSERARWLSGGGLAL

SEQ ID NO: 63361 - protein, 1288 aa, Homo sapiens
MGGCFCIPRERSLTRGPGKETPSKDPTVSSECIASSEYKEKCFLPQNINPDLTLSFCVKSRSRRCVNGPLQEAARRRLWALENEDQEVRMLFKDLSARLVSIQSQRAQFLITFKTMEEIWKFSTYLNLGYVSMCLEHLLFDHKYWLNCILVEDTEIQVSVDDKHLETIYLGLLIQEGHFFCRALCSVTPPAEKEGECLTLCKNELISVKMAEAGSELEGVSLVTGQRGLVLVSALEPLPLPFHQWFLKNYPGSCGLSRKRDWTGSYQIGRGRCKALTGYEPGEKDELNFYQGESIEIIGFVIPGLQWFIGKSTSSGQVGFVPTRNIDPDSYSPMSRNSAFLSDEERCSLLALGSDKQTECSSFLHTLARTDITSVYRLSGFESIQNPPNDLSASQPEGFKEVRPGRAWEEHQAVGSRQSSSSEDSSLEEELLSATSDSYRLPEPDDLDDPELLMDLSTGQEEEAENFAPILAFLDHEGYADHFKSLYDFSFSFLTSSFYSFSEEDEFVAYLEASRKWAKKSHMTWAHARLCFLLGRLSIRKVKLSQARVYFEEAIHILNGAFEDLSLVATLYINLAAIYLKQRLRHKGSALLEKAGALLACLPDRESSAKHELDVVAYVLRQGIVVGSSPLEARACFLAIRLLLSLGRHEEVLPFAERLQLLSGHPPASEAVASVLSFLYDKKYLPHLAVASVQQHGIQSAQGMSLPIWQVHLVLQNTTKLLGFPSPGWGEVSALACPMLRQALAACEELADRSTQRALCLILSKVYLEHRSPDGAIHYLSQALVLGQLLGEQESFESSLCLAWAYLLASQAKKALDVLEPLLCSLKETESLTQRGVIYNLLGLALQGEGRVNRAAKSYLRALNRAQEVGDVHNQAVAMANLGHLSLKSWAQHPARNYLLQAVRLYCELQASKETDMELVQVFLWLAQVLVSGHQLTHGLLCYEMALLFGLRHRHLKSQLQATKSLCHFYSSVSPNPEACITYHEHWLALAQQLRDREMEGRLLESLGQLYRNLNTARSLRRSLTCIKESLRIFIDLGETDKAAEAWLGAGRLHYLMQEDELVELCLQAAIQTALKSEEPLLALKLYEEAGDVFFNGTRHRHHAVEYYRAGAVPLARRLKAVRTELRIFNKLTELQISLEGYEKALEFATLAARLSTVTGDQRQELVAFHRLATVYYSLHMYEMAEDCYLKTLSLCPPWLQSPKEALYYAKVYYRLGRLTFCQLKDAHDATEYFLLALAAAVLLGDEELQDTIRSRLDNICQSPLWHSRPSGCSSERARWLSGGGLAL

SEQ ID NO: 63362 - protein, 726 aa, Homo sapiens
MDLSTGQEEEAENFAPILAFLDHEGYADHFKSLYDFSFSFLTSSFYSFSEEDEFVAYLEASRKWAKKSHMTWAHARLCFLLGRLSIRKVKLSQARVYFEEAIHILNGAFEDLSLVATLYINLAAIYLKQRLRHKGSALLEKAGALLACLPDRESSAKHELDVVAYVLRQGIVVGSSPLEARACFLAIRLLLSLGRHEEVLPFAERLQLLSGHPPASEAVASVLSFLYDKKYLPHLAVASVQQHGIQSAQGMSLPIWQVHLVLQNTTKLLGFPSPGWGEVSALACPMLRQALAACEELADRSTQRALCLILSKVYLEHRSPDGAIHYLSQALVLGQLLGEQESFESSLCLAWAYLLASQAKKALDVLEPLLCSLKETESLTQRGVIYNLLGLALQGEGRVNRAAKSYLRALNRAQEVGDVHNQAVAMANLGHLSLKSWAQHPARNYLLQAVRLYCELQASKETDMELVQVFLWLAQVLVSGHQLTHGLLCYEMALLFGLRHRHLKSQLQATKSLCHFYSSVSPNPEACITYHEHWLALAQQLRDREMEGRLLESLGQLYRNLNTARSLRRSLTCIKESLRIFIDLGETDKAAEAWLGAGRLHYLMQEDELVELCLQAAIQTALKSEEPLLALKLYEEAGDVFFNGTRHRHHAVEYYRAGAVPLARRLKAVRTELRIFNKLTELQISLEGYEKALEFATLAARLSTVTEARAGGLSPPGYSVLLPAHV

SEQ ID NO: 63363 - protein, 239 aa, Homo sapiens
MPLLLLGETEPLKLERDCRSPVDPWAAASPDLALACLCHCQDLSSGAFPDRGVLGGVLFPTVEMVIKVFVATSSGSIAIRKKQQEVVGFLEANKIDFKELDIAGDEDNRRWMRENVPGEKKPQNGIPLPPQIFNEEQYCGDFDSFFSAKEENIIYSFLGLAPPPDSKGSEKAEEGGETEAQKEGSEDVGNLPEAQEKNEEEGETATEETEEIAMEGAEGEAEEEEETAEGEEPGEDEDS

SEQ ID NO: 63364 - protein, 128 aa, Homo sapiens
MRENVPGEKKPQNGIPLPPQIFNEEQYCGDFDSFFSAKEENIIYSFLGLAPPPDSKGSEKAEEGGETEAQKEGSEDVGNLPEAQEKNEEEGETATEETEEIAMEGAEGEAEEEEETAEGEEPGEDEDS

SEQ ID NO: 63365 - protein, 128 aa, Homo sapiens; identical to SEQ ID NO: 63364

SEQ ID NO: 63366 - protein, 128 aa, Homo sapiens; identical to SEQ ID NO: 63364

SEQ ID NO: 63367 - protein, 106 aa, Homo sapiens
MRENVPGEKKPQNGIPLPPQIFNEEQYCGDFDSFFSAKEENIIYSFLGLAPPPDSKGSEKAEEGGETEAQKEGSEDVGNLPEAQEKNEEEGETATEETEEIAMEGA

SEQ ID NO: 63368 - protein, 790 aa, Homo sapiens
MNIMNTEQSQNSIVSRIKVFEGQTNIETSGLPKKPEITPRSLPPKPTVSSGKPSVAPKPAANRASGEWDSGTENRLKVTSKEGLTPYPPLQEAGSIPVTKPELPKKPNPGLIRSVNPEIPGRGPLAESSDSGKKVPTPAPRPLLLKKSVSSENPTYPSAPLKPVTVPPRLAGASQAKAYKSLGEGPPANPPVPVLQSKPLVDIDLISFDDDVLPTPSGNLAEESVGSEMVLDPFQLPAKTEPIKERAVQPAPTRKPTVIRIPAKPGKCLHEDPQSPPPLPAEKPIGNTFSTVSGKLSNVERTRNLESNHPGQTGGFVRVPPRLPPRPVNGKTIPTQQPPTKVPPERPPPPKLSATRRSNKKLPFNRSSSDMDLQKKQSNLATGLSKAKSQVFKNQDPVLPPRPKPGHPLYSKYMLSVPHGIANEDIVSQNPGELSCKRGDVLVMLKQTENNYLECQKGEDTGRVHLSQMKIITPLDEHLRSRPNDPSHAQKPVDSGAPHAVVLHDFPAEQVDDLNLTSGEIVYLLEKIDTDWYRGNCRNQIGIFPANYVKVIIDIPEGGNGKRECVSSHCVKGSRCVARFEYIGEQKDELSFSEGEIIILKEYVNEEWARGEVRGRTGIFPLNFVEPVEDYPTSGANVLSTKVPLKTKKEDSGSNSQVNSLPAEWCEALHSFTAETSDDLSFKRGDRIQILERLDSDWCRGRLQDREGIFPAVFVRPCPAEAKSMLAIVPKGRKAKALYDFRGENEDELSFKAGDIITELESVDDDWMSGELMGKSGIFPKNYIQFLQIS

SEQ ID NO: 63369 - protein, 790 aa, Homo sapiens; identical to SEQ ID NO: 63368

SEQ ID NO: 63370 - protein, 767 aa, Homo sapiens
MNIMNTEQSQNSIVSRIKVFEGQTNIETSGLPKKPEITPRSLPPKPTVSSGKPSVAPKPAANRASGEWDSGTENRLKVTSKEGLTPYPPLQEAGSIPVTKPELPKKPNPGLIRSVNPEIPGRGPLAESSDSGKKVPTPAPRPLLLKKSVSSENPTYPSAPLKPVTVPPRLAGASQAKAYKSLGEGPPANPPVPVLQSKPLVDIDLISFDDDVLPTPSGNLAEESVGSEMVLDPFQLPAKTEPIKERAVQPAPTRKPTVIRIPAKPGKCLHEDPQSPPPLPAEKPIGNTFSTVSGKLSNVERTRNLESNHPGQTGGFVRVPPRLPPRPVNGKTIPTQQPPTKVPPERPPPPKLSATRRSNKKLPFNRSSSDMDLQKKQSNLATGLSKAKSQVFKNQDPVLPPRPKPGHPLYSKYMRGDVLVMLKQTENNYLECQKGEDTGRVHLSQMKIITPLDEHLRSRPNDPSHAQKPVDSGAPHAVVLHDFPAEQVDDLNLTSGEIVYLLEKIDTDWYRGNCRNQIGIFPANYVKVIIDIPEGGNGKRECVSSHCVKGSRCVARFEYIGEQKDELSFSEGEIIILKEYVNEEWARGEVRGRTGIFPLNFVEPVEDYPTSGANVLSTKVPLKTKKEDSGSNSQVNSLPAEWCEALHSFTAETSDDLSFKRGDRIQILERLDSDWCRGRLQDREGIFPAVFVRPCPAEAKSMLAIVPKGRKAKALYDFRGENEDELSFKAGDIITELESVDDDWMSGELMGKSGIFPKNYIQFLQIS

SEQ ID NO: 63371 - protein, 731 aa, Homo sapiens
MNIMNTEQSQNSIVSRIKVFEGQTNIETSGLPKKPEITPRSLPPKPTVSSGKPSVAPKPAANRASGEWDSGTENRLKVTSKEGLTPYPPLQEAGSIPVTKPELPKKPNPGLIRSVNPEIPGRGPLAESSDSGKKVPTPAPRPLLLKKSVSSENPTYPSAPLKPVTVPPRLAGASQAKAYKSLGEGPPANPPVPVLQSKPLVDIDLISFDDDVLPTPSGNLAEESVGSEMVLGLHEDPQSPPPLPAEKPIGNTFSTVSGKLSNVERTRNLESNHPGQTGGFVRVPPRLPPRPVNGKTIPTQQPPTKVPPERPPPPKLSATRRSNKKLPFNRSSSDMDLQKKQSNLATGLSKAKSQVFKNQDPVLPPRPKPGHPLYSKYMRGDVLVMLKQTENNYLECQKGEDTGRVHLSQMKIITPLDEHLRSRPNDPSHAQKPVDSGAPHAVVLHDFPAEQVDDLNLTSGEIVYLLEKIDTDWYRGNCRNQIGIFPANYVKVIIDIPEGGNGKRECVSSHCVKGSRCVARFEYIGEQKDELSFSEGEIIILKEYVNEEWARGEVRGRTGIFPLNFVEPVEDYPTSGANVLSTKVPLKTKKEDSGSNSQVNSLPAEWCEALHSFTAETSDDLSFKRGDRIQILERLDSDWCRGRLQDREGIFPAVFVRPCPAEAKSMLAIVPKGRKAKALYDFRGENEDELSFKAGDIITELESVDDDWMSGELMGKSGIFPKNYIQFLQIS

SEQ ID NO: 63372 - protein, 731 aa, Homo sapiens; identical to SEQ ID NO: 63371

SEQ ID NO: 63373 - protein, 767 aa, Homo sapiens; identical to SEQ ID NO: 63370

SEQ ID NO: 63374 - protein, 767 aa, Homo sapiens; identical to SEQ ID NO: 63370

SEQ ID NO: 63375 - protein, 729 aa, Homo sapiens
MDDLTLLDLLECPVCFEKLDVTAKVLPCQHTFCKPCLQRVFKAHKELRCPECRTPVFSNIEALPANLLLVRLLDGVRSGQSSGRGGSFRRPGTMTLQDGRKSRTNPRRLQASPFRLVPNVRIHMDGVPRAKALCNYRGQNPGDLRFNKGDIILLRRQLDENWYQGEINGISGNFPASSVEVIKQLPQPPPLCRALYNFDLRGKDKSENQDCLTFLKDDIITVISRVDENWAEGKLGDKVGIFPILFVEPNLTARHLLEKNKGRQSSRTKNLSLVSSSSRGNTSTLRRGPGSRRKVPGQFSITTALNTLNRMVHSPSGRHMVEISTPVLISSSNPSVITQPMEKADVPSSCVGQVSTYHPAPVSPGHSTAVVSLPGSQQHLSANMFVALHSYSAHGPDELDLQKGEGVRVLGKCQDGWLRGVSLVTGRVGIFPNNYVIPIFRKTSSFPDSRSPGLYTTWTLSTSSVSSQGSISEGDPRQSRPFKSVFVPTAIVNPVRSTAGPGTLGQGSLRKGRSSMRKNGSLQRPLQSGIPTLVVGSLRRSPTMVLRPQQFQFYQPQGIPSSPSAVVVEMGSKPALTGEPALTCISRGSEAWIHSAASSLIMEDKEIPIKSEPLPKPPASAPPSILVKPENSRNGIEKQVKTVRFQNYSPPPTKHYTSHPTSGKPEQPATLKASQPEAASLGPEMTVLFAHRSGCHSGQQTDLRRKSALGKATTLVSTASGTQTVFPSK

SEQ ID NO: 63376 - protein, 729 aa, Homo sapiens; identical to SEQ ID NO: 63375

SEQ ID NO: 63377 - protein, 128 aa, Homo sapiens
MEDKEIPIKSEPLPKPPASAPPSILVKPENSRNGIEKQVKTVRFQNYSPPPTKHYTSHPTSGKPEQPATLKASQPEAASLGPEMTVLFAHRSGCHSGQQTDLRRKSALGKATTLVSTASGTQTVFPSK

SEQ ID NO: 63378 - protein, 561 aa, Homo sapiens
MAAEEMHWPVPMKAIGAQNLLTMPGGVAKAGYLHKKGGTQLQLLKWPLRFVIIHKRCVYYFKSSTSASPQGAFSLSGYNRVMRAAEETTSNNVFPFKIIHISKKHRTWFFSASSEEERKSWMALLRREIGHFHEKKDLPLDTSDSSSDTDSFYGAVERPVDISLSPYPTDNEDYEHDDEDDSYLEPDSPEPGRLEDALMHPPAYPPPPVPTPRKPAFSDMPRAHSFTSKGPGPLLPPPPPKHGLPDVGLAAEDSKRDPLCPRRAEPCPRVPATPRRMSDPPLSTMPTAPGLRKPPCFRESASPSPEPWTPGHGACSTSSAAIMATATSRNCDKLKSFHLSPRGPPTSEPPPVPANKPKFLKIAEEDPPREAAMPGLFVPPVAPRPPALKLPVPEAMARPAVLPRPEKPQLPHLQRSPPDGQSFRSFSFEKPRQPSQADTGGDDSDEDYEKVPLPNSVFVNTTESCEVERLFKATSPRGEPQDGLYCIRNSSTKSGKVLVVWDETSNKVRNYRIFEKDSKFYLEGEVLFVSVGSMVEHYHTHVLPSHQSLLLRHPYGYTGPR

SEQ ID NO: 63379 - protein, 97 aa, Homo sapiens
MAAEEMHWPVPMKAIGAQNLLTMPGGVAKAGYLHKKGGTQLQLLKWPLRFVIIHKRCVYYFKSSTSASPQGAFSLSGYNRQPRPQPAQALSQTEAGP

SEQ ID NO: 63380 - protein, 561 aa, Homo sapiens; identical to SEQ ID NO: 63378

SEQ ID NO: 63381 - protein, 589 aa, Homo sapiens
MASLGPRTPAPSRSRGRRAMCWVSTISFMAAEEMHWPVPMKAIGAQNLLTMPGGVAKAGYLHKKGGTQLQLLKWPLRFVIIHKRCVYYFKSSTSASPQGAFSLSGYNRVMRAAEETTSNNVFPFKIIHISKKHRTWFFSASSEEERKSWMALLRREIGHFHEKKDLPLDTSDSSSDTDSFYGAVERPVDISLSPYPTDNEDYEHDDEDDSYLEPDSPEPGRLEDALMHPPAYPPPPVPTPRKPAFSDMPRAHSFTSKGPGPLLPPPPPKHGLPDVGLAAEDSKRDPLCPRRAEPCPRVPATPRRMSDPPLSTMPTAPGLRKPPCFRESASPSPEPWTPGHGACSTSSAAIMATATSRNCDKLKSFHLSPRGPPTSEPPPVPANKPKFLKIAEEDPPREAAMPGLFVPPVAPRPPALKLPVPEAMARPAVLPRPEKPQLPHLQRSPPDGQSFRSFSFEKPRQPSQADTGGDDSDEDYEKVPLPNSVFVNTTESCEVERLFKATSPRGEPQDGLYCIRNSSTKSGKVLVVWDETSNKVRNYRIFEKDSKFYLEGEVLFVSVGSMVEHYHTHVLPSHQSLLLRHPYGYTGPR

SEQ ID NO: 63382 - protein, 561 aa, Homo sapiens; identical to SEQ ID NO: 63378

SEQ ID NO: 63383 - protein, 142 aa, Homo sapiens
MAAEEMHWPVPMKAIGAQNLLTMPGGVAKAGYLHKKGGTQLQLLKWPLRFVIIHKRCVYYFKSSTSASPQGAFSLSGYNRVMRAAEETTSNNVFPFKIIHISKKHRTWFFSASSEEERKSWMALLRREIGHFHEKKDLPLDT

SEQ ID NO: 63384 - protein, 142 aa, Homo sapiens; identical to SEQ ID NO: 63383

SEQ ID NO: 63385 - protein, 618 aa, Homo sapiens
MAGSGPRPRSWGRREAGARDEAAAAGGRGPGPCRCSQGRRAWIAPGKPAMPAAWTPFMAAEEMHWPVPMKAIGAQNLLTMPGGVAKAGYLHKKGGTQLQLLKWPLRFVIIHKRCVYYFKSSTSASPQGAFSLSGYNRVMRAAEETTSNNVFPFKIIHISKKHRTWFFSASSEEERKSWMALLRREIGHFHEKKDLPLDTSDSSSDTDSFYGAVERPVDISLSPYPTDNEDYEHDDEDDSYLEPDSPEPGRLEDALMHPPAYPPPPVPTPRKPAFSDMPRAHSFTSKGPGPLLPPPPPKHGLPDVGLAAEDSKRDPLCPRRAEPCPRVPATPRRMSDPPLSTMPTAPGLRKPPCFRESASPSPEPWTPGHGACSTSSAAIMATATSRNCDKLKSFHLSPRGPPTSEPPPVPANKPKFLKIAEEDPPREAAMPGLFVPPVAPRPPALKLPVPEAMARPAVLPRPEKPQLPHLQRSPPDGQSFRSFSFEKPRQPSQADTGGDDSDEDYEKVPLPNSVFVNTTESCEVERLFKATSPRGEPQDGLYCIRNSSTKSGKVLVVWDETSNKVRNYRIFEKDSKFYLEGEVLFVSVGSMVEHYHTHVLPSHQSLLLRHPYGYTGPR

SEQ ID NO: 63386 - protein, 172 aa, Homo sapiens
MAAEEMHWPVPMKAIGAQNLLTMPGGVAKAGYLHKKGGTQLQLLKWPLRFVIIHKRCVYYFKSSTSASPQGAFSLSGYNRVMRAAEETTSNNVFPFKIIHISKKHRTWFFSASSEEERKSWMALLRREIGHFHEKKDLPLDTSDSSSDTDSFYGAVERPVDISLSPYPTDNE

SEQ ID NO: 63387 - protein, 188 aa, Homo sapiens
MAAEEMHWPVPMKAIGAQNLLTMPGGVAKAGYLHKKGGTQLQLLKWPLRFVIIHKRCVYYFKSSTSASPQGAFSLSGYNRVMRAAEETTSNNVFPFKIIHISKKHRTWFFSASSEEERKSWMALLRREIGHFHEKKDLPLDTSDSSSDTDSFYGAVERPVDISLSPYPTDNEDYEHDDEDDSYLEPDS

SEQ ID NO: 63388 - protein, 561 aa, Homo sapiens; identical to SEQ ID NO: 63378

SEQ ID NO: 63389 - protein, 194 aa, Homo sapiens
MAAEEMHWPVPMKAIGAQNLLTMPGGVAKAGYLHKKGGTQLQLLKWPLRFVIIHKRCVYYFKSSTSASPQGAFSLSGYNRVMRAAEETTSNNVFPFKIIHISKKHRTWFFSASSEEERKSWMALLRREIGHFHEKKDLPLDTSDSSSDTDSFYGAVERPVDISLSPYPTDNEDYEHDDEDDSYLEPDSPEPGRL

SEQ ID NO: 63390 - protein, 136 aa, Homo sapiens
MAAEEMHWPVPMKAIGAQNLLTMPGGVAKAGYLHKKGGTQLQLLKWPLRFVIIHKRCVYYFKSSTSASPQGAFSLSGYNRVMRAAEETTSNNVFPFKIIHISKKHRTWFFSASSEEERKSWMALLRREIGHFHEKK

SEQ ID NO: 63391 - protein, 963 aa, Homo sapiens
MAAQRIRAANSNGLPRCKSEGTLIDLSEGFSETSFNDIKVPSPSALLVDNPTPFGNAKEVIAIKDYCPTNFTTLKFSKGDHLYVLDTSGGEWWYAHNTTEMGYIPSSYVQPLNYRNSTLSDSGMIDNLPDSPDEVAKELELLGGWTDDKKVPGRMYSNNPFWNGVQTNPFLNGNVPVMPSLDELNPKSTVDLLLFDAGTSSFTESSSATTNSTGNIFDELPVTNGLHAEPPVRRDNPFFRSKRSYSLSELSVLQAKSDAPTSSSFFTGLKSPAPEQFQSREDFRTAWLNHRKLARSCHDLDLLGQSPGWGQTQAVETNIVCKLDSSGGAVQLPDTSISIHVPEGHVAPGETQQISMKALLDPPLELNSDRSCSISPVLEVKLSNLEVKTSIILEMKVSAEIKNDLFSKSTVGLQCLRSDSKEGPYVSVPLNCSCGDTVQAQLHNLEPCMYVAVVAHGPSILYPSTVWDFINKKVTVGLYGPKHIHPSFKTVVTIFGHDCAPKTLLVSEVTRQAPNPAPVALQLWGKHQFVLSRPQDLKVCMFSNMTNYEVKASEQAKVVRGFQLKLGKVSRLIFPITSQNPNELSDFTLRVQVKDDQEAILTQFCVQTPQPPPKSAIKPSGQRRFLKKNEVGKIILSPFATTTKYPTFQDRPVSSLKFGKLLKTVVRQNKNHYLLEYKKGDGIALLSEERVRLRGQLWTKEWYIGYYQGRVGLVHTKNVLVVGRARPSLCSGPELSTSVLLEQILRPCKFLTYIYASVRTLLMENISSWRSFADALGYVNLPLTFFCRAELDSEPERVASVLEKLKEDCNNTENKERKSFQKELVMALLKMDCQGLVVRLIQDFVLLTTAVEVAQRWRELAEKLAKVSKQQMDAYESPHRDRNGVVDSEAMWKPAYDFLLTWSHQIGDSYRDVIQELHLGLDKMKNPITKRWKHLTGTLILVNSLDVLRAAAFSPADQDDFVI

SEQ ID NO: 63392 - protein, 963 aa, Homo sapiens; identical to SEQ ID NO: 63391

SEQ ID NO: 63393 - protein, 963 aa, Homo sapiens; identical to SEQ ID NO: 63391

SEQ ID NO: 63394 - protein, 122 aa, Homo sapiens
MAAQRIRAANSNGLPRCKSEGTLIDLSEGFSETSFNDIKVPSPSALLVDNPTPFGNAKEVIAIKDYCPTNFTTLKFSKGDHLYVLDTSGGEWWYAHNTTEMGYIPSSYVQPLNYRNSTLSDS

SEQ ID NO: 63395 - protein, 553 aa, Homo sapiens
MAAQRIRAANSNGLPRCKSEGTLIDLSEGFSETSFNDIKVPSPSALLVDNPTPFGNAKEVIAIKDYCPTNFTTLKFSKGDHLYVLDTSGGEWWYAHNTTEMGYIPSSYVQPLNYRNSTLSDSGMIDNLPDSPDEVAKELELLGGWTDDKKVPGRMYSNNPFWNGVQTNPFLNGNVPVMPSLDELNPKSTVDLLLFDAGTSSFTESSSATTNSTGNIFDELPVTNGLHAEPPVRRDNPFFRSKRSYSLSELSVLQAKSDAPTSSSFFTGLKSPAPEQFQSREDFRTAWLNHRKLARSCHDLDLLGQSPGWGQTQAVETNIVCKLDSSGGAVQLPDTSISIHVPEGHVAPGETQQISMKALLDPPLELNSDRSCSISPVLEVKLSNLEVKTSIILEMKVSAEIKNDLFSKSTVGLQCLRSDSKEGPYVSVPLNCSCGDTVQAQLHNLEPCMYVAVVAHGPSILYPSTVWDFINKKVTVGLYGPKHIHPSFKTVVTIFGHDCAPKTLLVSEVTRQAPNPPITKRWKHLTGTLILVNSLDVLRAAAFSPADQDDFVI

SEQ ID NO: 63396 - protein, 56 aa, Homo sapiens
MAAQRIRAANSNGLPRCKSEGTLIDLSEGFSETSFNDIKVPSPSALLVDNPTPFGN

SEQ ID NO: 63397 - protein, 173 aa, Homo sapiens
MAAQRIRAANSNGLPRCKSEGTLIDLSEGFSETSFNDIKVPSPSALLVDNPTPFGNAKEVIAIKDYCPTNFTTLKFSKGDHLYVLDTSGGEWWYAHNTTEMGYIPSSYVQPLNYRNSTLSDSGMIDNLPDSPDEVAKELELLGGWTDDKKVPGRMYSNNPFWNGVQTNPFLNG

SEQ ID NO: 63398 - protein, 57 aa, Homo sapiens
MAAQRIRAANSNGLPRCKSEGTLIDLSEGFSETSFNDIKVPSPSALLVDNPTPFGNA

SEQ ID NO: 63399 - protein, 201 aa, Homo sapiens
MENISSWRSFADALGYVNLPLTFFCRAELDSEPERVASVLEKLKEDCNNTENKERKSFQKELVMALLKMDCQGLVVRLIQDFVLLTTAVEVAQRWRELAEKLAKVSKQQMDAYESPHRDRNGVVDSEAMWKPAYDFLLTWSHQIGDSYRDVIQELHLGLDKMKNPITKRWKHLTGTLILVNSLDVLRAAAFSPADQDDFVI

SEQ ID NO: 63400 - protein, 298 aa, Homo sapiens
MLNHATQRVMEAEQTKTRSELVHKETAARYNAAMGRMRQLEKKLKRAINKSKPYFELKAKYYVQLEQLKKTVDDLQAKLTLAKGEYKMALKNLEMISDEIHERRRSSAMGPRGCGVGAEGSSTSVEDLPGSKPEPDAISVASEAFEDDSCSNFVSEDDSETQSVSSFSSGPTSPSEMPDQFPAVVRPGSLDLPSPVSLSEFGMMFPVLGPRSECSGASSPECEVERGDRAEGAENKTSDKANNNRGLSSSSGSGGSSKSQSSTSPEGQALENRMKQLSLQCSKGRDGIIADIKMVQIG

SEQ ID NO: 63401 - protein, 128 aa, Homo sapiens
MLNHATQRVMEAEQTKTRSELVHKETAARYNAAMGRMRQLEKKLKRAINKSKPYFELKAKYYVQLEQLKKTVDDLQAKLTLAKGEYKMALKNLEMISDEIHERRRSSAMGPRGCGVGAEGSSTSVEDL

SEQ ID NO: 63402 - protein, 455 aa, Homo sapiens
MDAALKRSRSEEPAEILPPARDEEEEEEEGMEQGLEEEEEVDPRIQGELEKLNQSTDDINRRETELEDARQKFRSVLVEATVKLDELVKKIGKAVEDSKPYWEARRVARQAQLEAQKATQDFQRATEVLRAAKETISLAEQRLLEDDKRQFDSAWQEMLNHATQRVMEAEQTKTRSELVHKETAARYNAAMGRMRQLEKKLKRAINKSKPYFELKAKYYVQLEQLKKTVDDLQAKLTLAKGEYKMALKNLEMISDEIHERRRSSAMGPRGCGVGAEGSSTSVEDLPGSKPEPDAISVASEAFEDDSCSNFVSEDDSETQSVSSFSSGPTSPSEMPDQFPAVVRPGSLDLPSPVSLSEFGMMFPVLGPRSECSGASSPECEVERGDRAEGAENKTSDKANNNRGLSSSSGSGGSSKSQSSTSPEGQALENRMKQLSLQCSKGRDGIIADIKMVQIG

SEQ ID NO: 63403 - protein, 298 aa, Homo sapiens; identical to SEQ ID NO: 63400

SEQ ID NO: 63404 - protein, 51 aa, Homo sapiens
MLNHATQRVMEAEQTKTRSELVHKETAARYNAAMGRMRQLEKKLKRAINKS

SEQ ID NO: 63405 - protein, 298 aa, Homo sapiens; identical to SEQ ID NO: 63400

SEQ ID NO: 63406 - protein, 859 aa, Homo sapiens
MMEGLKKRTRKAFGIRKKEKDTDSTGSPDRDGIQGKKKTQKTQLLLTSCFWLRALSLTLSQKKSNGAPNGFYAEIDWERYNSPELDEEGYSIRPEEPGSTKGKHFYSSSESEEEEESHKKFNIKIKPLQSKDILKNAATVDELKASIGNIALSPSPVRKSPRRSPGAIKRNLSSEEVARPRRSTPTPELISKKPPDDTTALAPLFGPPLESAFDEQKTEVLLDQPEIWGSGQPINPSMESPKLTRPFPTGTPPPLPPKNVPATPPRTGSPLTIGPGNDQSATEVKIEKLPSINDLDSIFGPVLSPKSVAVNAEEKWVHFSDTSPEHVTPELTPREKVVSPPATPDNPADSPAPGPLGPPGPTGPPGPPGPPRNVLSPLNLEEVQKKVAEQTFIKDDYLETISSPKDFGLGQRATPPPPPPPTYRTVVSSPGPGSGPGPGTTSDGKTEAQRYQVICPSLQAGGNELDSYSGASSPARPATPLVPCRSTTPPPPPPRPPSRPKLPPGKPGVGDVSRPFSPPIHSSSPPPIAPLARAESTSSISSTNSLSAATTPTVENEQPSLVWFDRGKFYLTFEGSSRGPSPLTMGAQDTLPVAAAFTETVNAYFKGADPSKCIVKITGEMVLSFPAGITRHFANNPSPAALTFRVINFSRLEHVLPNPQLLCCDNTQNDANTKEFWVNMPNLMTHLKKVSEQKPQATYYNVDMLKYQVSAQGIQSTPLNLAVNWRCEPSSTDLRIDYKYNTDAMTTAVALNNVQFLVPIDGGVTKLQAVLPPAVWNAEQQRILWKIPDISQKSENGGVGSLLARFQLSEGPSKPSPLVVQFTSEGSTLSGCDIELVGAGYRFSLIKKRFAAGKYLADN

SEQ ID NO: 63407 - protein, 618 aa, Homo sapiens
MMEGLKKRTRKAFGIRKKEKDTDSTGSPDRDGINSPELDEEGYSIRPEEPGSTKGKHFYSSSESEEEEESHKKFNIKIKPLQSKDILKNAATVDELKASIGNIALSPSPVRKSPRRSPGAIKRNLSSEEVARPRRSTPTPELISKKPPDDTTALAPLFGPPLESAFDEQKTEVLLDQPEIWGSGQPINPSMESPKLTRPFPTGTPPPLPPKNVPATPPRTGSPLTIGPGASSPARPATPLVPCRSTTPPPPPPRPPSRPKLPPGKPGVGDVSRPFSPPIHSSSPPPIAPLARAESTSSISSTNSLSAATTPTVENEQPSLVWFDRGKFYLTFEGSSRGPSPLTMGAQDTLPVAAAFTETVNAYFKGADPSKCIVKITGEMVLSFPAGITRHFANNPSPAALTFRVINFSRLEHVLPNPQLLCCDNTQNDANTKEFWVNMPNLMTHLKKVSEQKPQATYYNVDMLKYQVSAQGIQSTPLNLAVNWRCEPSSTDLRIDYKYNTDAMTTAVALNNVQFLVPIDGGVTKLQAVLPPAVWNAEQQRILWKIPDISQKSENGGVGSLLARFQLSEGPSKPSPLVVQFTSEGSTLSGCDIELVGAGYRFSLIKKRFAAGKYLADN

SEQ ID NO: 63408 - protein, 630 aa, Homo sapiens
MEGLKKRTRKAFGIRKKEKDTDSTGSPDRDGIKKSNGAPNGFYAEIDWERYNSPELDEEGYSIRPEEPGSTKGKHFYSSSESEEEEESHKKFNIKIKPLQSKDILKNAATVDELKASIGNIALSPSPVGAIKRNLSSEEVARPRRSTPTPELISKKPPDDTTALAPLFGPPLESAFDEQKTEVLLDQPEIWGSGQPINPSMESPKLTRPFPTGTPPPLPPKNVPATPPRTGSPLTIGPGASSPARPATPLVPCRSTTPPPPPPRPPSRPKLPPGKPGVGDVSRPFSPPIHSSSPPPIAPLARAESTSSISSTNSLSAATTPTVVSEDDVFYDKLPSFERRCETPAGSSRGPSPLTMGAQDTLPVAAAFTETVNAYFKGADPSKCIVKITGEMVLSFPAGITRHFANNPSPAALTFRVINFSRLEHVLPNPQLLCCDNTQNDANTKEFWVNMPNLMTHLKKVSEQKPQATYYNVDMLKYQVSAQGIQSTPLNLAVNWRCEPSSTDLRIDYKYNTDAMTTAVALNNVQFLVPIDGGVTKLQAVLPPAVWNAEQQRILWKIPDISQKSENGGVGSLLARFQLSEGPSKPSPLVVQFTSEGSTLSGCDIELVGAGYRFSLIKKRFAAGKYLADN

SEQ ID NO: 63409 - protein, 828 aa, Homo sapiens
MMEGLKKRTRKAFGIRKKEKDTDSTGSPDRDGIQPSPHEPPYNSKAECAREGGKKVSKKSNGAPNGFYAEIDWERYNSPELDEEGYSIRPEEPGSTKGKHFYSSSESEEEEESHKKFNIKIKPLQSKDILKNAATVDELKASIGNIALSPSPVRKSPRRSPGAIKRNLSSEEVARPRRSTPTPELISKKPPDDTTALAPLFGPPLESAFDEQKTEVLLDQPEIWGSGQPINPSMESPKLTRPFPTGTPPPLPPKNVPATPPRTGSPLTIGPGNDQSATEVKIEKLPSINDLDSIFGPVLSPKSVAVNAEEKWVHFSDTSPEHVTPELTPREKVVSPPATPDNPADSPAPGPLGPPGPTGPPGPPGPPRNVLSPLNLEEVQKKVAEQTFIKDDYLETISSPKDFGLGQRATPPPPPPPTYRTVVSSPGPGSGPGPGTTSGASSPARPATPLVPCRSTTPPPPPPRPPSRPKLPPGKPGVGDVSRPFSPPIHSSSPPPIAPLARAESTSSISSTNSLSAATTPTVENEQPSLVWFDRGKFYLTFEGSSRGPSPLTMGAQDTLPVAAAFTETVNAYFKGADPSKCIVKITGEMVLSFPAGITRHFANNPSPAALTFRVINFSRLEHVLPNPQLLCCDNTQNDANTKEFWVNMPNLMTHLKKVSEQKPQATYYNVDMLKYQVSAQGIQSTPLNLAVNWRCEPSSTDLRIDYKYNTDAMTTAVALNNVQFLVPIDGGVTKLQAVLPPAVWNAEQQRILWKIPDISQKSENGGVGSLLARFQLSEGPSKPSPLVVQFTSEGSTLSGCDIELVGAGYRFSLIKKRFAAGKYLADN

SEQ ID NO: 63410 - protein, 858 aa, Homo sapiens
MEGLKKRTRKAFGIRKKEKDTDSTGSPDRDGIQGKKKTQKTQLLLTSCFWLRALSLTLSQKKSNGAPNGFYAEIDWERYNSPELDEEGYSIRPEEPGSTKGKHFYSSSESEEEEESHKKFNIKIKPLQSKDILKNAATVDELKASIGNIALSPSPVRKKERREKGAIKRNLSSEEVARPRRSTPTPELISKKPPDDTTALAPLFGPPLESAFDEQKTEVLLDQPEIWGSGQPINPSMESPKLTRPFPTGTPPPLPPKNVPATPPRTGSPLTIGPGNDQSATEVKIEKLPSINDLDSIFGPVLSPKSVAVNAEEKWVHFSDTSPEHVTPELTPREKVVSPPATPDNPADSPAPGPLGPPGPTGPPGPPGPPRNVLSPLNLEEVQKKVAEQTFIKDDYLETISSPKDFGLGQRATPPPPPPPTYRTVVSSPGPGSGPGPGTTSDGKTEAQRYQVICPSLQAGGNELDSYSGASSPARPATPLVPCRSTTPPPPPPRPPSRPKLPPGKPGVGDVSRPFSPPIHSSSPPPIAPLARAESTSSISSTNSLSAATTPTVENEQPSLVWFDRGKFYLTFEGSSRGPSPLTMGAQDTLPVAAAFTETVNAYFKGADPSKCIVKITGEMVLSFPAGITRHFANNPSPAALTFRVINFSRLEHVLPNPQLLCCDNTQNDANTKEFWVNMPNLMTHLKKVSEQKPQATYYNVDMLKYQVSAQGIQSTPLNLAVNWRCEPSSTDLRIDYKYNTDAMTTAVALNNVQFLVPIDGGVTKLQAVLPPAVWNAEQQRILWKIPDISQKSENGGVGSLLARFQLSEGPSKPSPLVVQFTSEGSTLSGCDIELVGAGYRFSLIKKRFAAGKYLADN

SEQ ID NO: 63411 - protein, 631 aa, Homo sapiens
MMEGLKKRTRKAFGIRKKEKDTDSTGSPDRDGIKKSNGAPNGFYAEIDWERYNSPELDEEGYSIRPEEPGSTKGKHFYSSSESEEEEESHKKFNIKIKPLQSKDILKNAATVDELKASIGNIALSPSPVGAIKRNLSSEEVARPRRSTPTPELISKKPPDDTTALAPLFGPPLESAFDEQKTEVLLDQPEIWGSGQPINPSMESPKLTRPFPTGTPPPLPPKNVPATPPRTGSPLTIGPGASSPARPATPLVPCRSTTPPPPPPRPPSRPKLPPGKPGVGDVSRPFSPPIHSSSPPPIAPLARAESTSSISSTNSLSAATTPTVVSEDDVFYDKLPSFERRCETPAGSSRGPSPLTMGAQDTLPVAAAFTETVNAYFKGADPSKCIVKITGEMVLSFPAGITRHFANNPSPAALTFRVINFSRLEHVLPNPQLLCCDNTQNDANTKEFWVNMPNLMTHLKKVSEQKPQATYYNVDMLKYQVSAQGIQSTPLNLAVNWRCEPSSTDLRIDYKYNTDAMTTAVALNNVQFLVPIDGGVTKLQAVLPPAVWNAEQQRILWKIPDISQKSENGGVGSLLARFQLSEGPSKPSPLVVQFTSEGSTLSGCDIELVGAGYRFSLIKKRFAAGKYLADN

SEQ ID NO: 63412 - protein, 831 aa, Homo sapiens
MEGLKKRTRKAFGIRKKEKDTDSTGSPDRDGIQGKKKTQKTQLLLTSCFWLRALSLTLSQKKSNGAPNGFYAEIDWERYNSPELDEEGYSIRPEEPGSTKGKHFYSSSESEEEEESHKKFNIKIKPLQSKDILKNAATVDELKASIGNIALSPSPVRKKERREKGAIKRNLSSEEVARPRRSTPTPELISKKPPDDTTALAPLFGPPLESAFDEQKTEVLLDQPEIWGSGQPINPSMESPKLTRPFPTGTPPPLPPKNVPATPPRTGSPLTIGPGNDQSATEVKIEKLPSINDLDSIFGPVLSPKSVAVNAEEKWVHFSDTSPEHVTPELTPREKVVSPPATPDNPADSPAPGPLGPPGPTGPPGPPGPPRNVLSPLNLEEVQKKVAEQTFIKDDYLETISSPKDFGLGQRATPPPPPPPTYRTVVSSPGPGSGPGPGTTSGASSPARPATPLVPCRSTTPPPPPPRPPSRPKLPPGKPGVGDVSRPFSPPIHSSSPPPIAPLARAESTSSISSTNSLSAATTPTVENEQPSLVWFDRGKFYLTFEGSSRGPSPLTMGAQDTLPVAAAFTETVNAYFKGADPSKCIVKITGEMVLSFPAGITRHFANNPSPAALTFRVINFSRLEHVLPNPQLLCCDNTQNDANTKEFWVNMPNLMTHLKKVSEQKPQATYYNVDMLKYQVSAQGIQSTPLNLAVNWRCEPSSTDLRIDYKYNTDAMTTAVALNNVQFLVPIDGGVTKLQAVLPPAVWNAEQQRILWKIPDISQKSENGGVGSLLARFQLSEGPSKPSPLVVQFTSEGSTLSGCDIELVGAGYRFSLIKKRFAAGKYLADN

SEQ ID NO: 63413 - protein, 260 aa, Homo sapiens
MMEGLKKRTRKAFGIRKKEKDTDSTGSPDRDGIQPSPHEPPYNSKAECAREGGKKVSKKSNGAPNGFYAEIDWERYNSPELDEEGYSIRPEEPGSTKGKHFYSSSESEEEEESHKKFNIKIKPLQSKDILKNAATVDELKASIGNIALSPSPVGAIKRNLSSEEVARPRRSTPTPELISKKPPDDTTALAPLFGPPLESAFDEQKTEVLLDQPEIWGSGQPINPSMESPKLTRPFPTGTPPPLPPKNVPATPPRTGSPLT

SEQ ID NO: 63414 - protein, 333 aa, Homo sapiens
MTCSVTHIVSFSLPFLNPSHPASTPGHTENEQPSLVWFDRGKFYLTFEGSSRGPSPLTMGAQDTLPVAAAFTETVNAYFKGADPSKCIVKITGEMVLSFPAGITRHFANNPSPAALTFRVINFSRLEHVLPNPQLLCCDNTQNDANTKEFWVNMPNLMTHLKKVSEQKPQATYYNVDMLKYQVSAQGIQSTPLNLAVNWRCEPSSTDLRIDYKYNTDAMTTAVALNNVQFLVPIDGGVTKLQAVLPPAVWNAEQQRILWKIPDISQKSENGGVGSLLARFQLSEGPSKPSPLVVQFTSEGSTLSGCDIELVGAGYRFSLIKKRFAAGKYLADN

SEQ ID NO: 63415 - protein, 368 aa, Homo sapiens
MSVAGLKKQFYKASQLVSEKVGGAEGTKLDDDFKEMEKKVDVTSKAVTEVLARTIEYLQPNPASRAKLTMLNTVSKIRGQVKNPGYPQSEGLLGECMIRHGKELGGESNFGDALLDAGESMKRLAEVKDSLDIEVKQNFIDPLQNLCEKDLKEIQHHLKKLEGRRLDFDYKKKRQGKIPDEELRQALEKFEESKEVAETSMHNLLETDIEQVSQLSALVDAQLDYHRQAVQILDELAEKLKRRMREASSRPKREYKPKPREPFDLGEPEQSNGGFPCTTAPKIAASSSFRSSDKPIRTPSRSMPPLDQPSCKALYDFEPENDGELGFHEGDVITLTNQIDENWYEGMLDGQSGFFPLSYVEVLVPLPQ

SEQ ID NO: 63416 - protein, 320 aa, Homo sapiens
MSVAGLKKQFYKASQLVSEKVGGAEGTKLDDDFKEMEKKVDVTSKAVTEVLARTIEYLQPNPGDALLDAGESMKRLAEVKDSLDIEVKQNFIDPLQNLCEKDLKEIQHHLKKLEGRRLDFDYKKKRQGKIPDEELRQALEKFEESKEVAETSMHNLLETDIEQVSQLSALVDAQLDYHRQAVQILDELAEKLKRRMREASSRPKREYKPKPREPFDLGEPEQSNGGFPCTTAPKIAASSSFRSSDKPIRTPSRSMPPLDQPSCKALYDFEPENDGELGFHEGDVITLTNQIDENWYEGMLDGQSGFFPLSYVEVLVPLPQ

SEQ ID NO: 63417 - protein, 304 aa, Homo sapiens
MSVAGLKKQFYKASQLVSEKVGGAEGTKLDDDFKEMEKKVDVTSKAVTEVLARTIEYLQPNPASRAKLTMLNTVSKIRGQNLCEKDLKEIQHHLKKLEGRRLDFDYKKKRQGKIPDEELRQALEKFEESKEVAETSMHNLLETDIEQVSQLSALVDAQLDYHRQAVQILDELAEKLKRRMREASSRPKREYKPKPREPFDLGEPEQSNGGFPCTTAPKIAASSSFRSSDKPIRTPSRSMPPLDQPSCKALYDFEPENDGELGFHEGDVITLTNQIDENWYEGMLDGQSGFFPLSYVEVLVPLPQ

SEQ ID NO: 63418 - protein, 352 aa, Homo sapiens
MSVAGLKKQFHKATQKVSEKVGGAEGTKLDDDFKEMERKVDVTSRAVMEIMTKTIEYLQPNPASRAKLSMINTMSKIRGQEKGPGYPQAEALLAEAMLKFGRELGDDCNFGPALGEVGEAMRELSEVKDSLDIEVKQNFIDPLQNLHDKDLREIQHHLKKLEGRRLDFDYKKKRQGKIPDEELRQALEKFDESKEIAESSMFNLLEMDIEQVSQLSALVQAQLEYHKQAVQILQQVTVRLEERIRQASSQPRREYQPKPRMSLEFPTGDSTQPNGGLSHTGTPKPSGVQMDQPCCRALYDFEPENEGELGFKEGDIITLTNQIDENWYEGMLHGHSGFFPINYVEILVALPH

SEQ ID NO: 63419 - protein, 225 aa, Homo sapiens
MSVAGLKKQFHKATQKVSEKVGGAEGTKLDDDFKEMERKVDVTSRAVMEIMTKTIEYLQPNPGSLEAEALLAEAMLKFGRELGDDCNFGPALGEVGEAMRELSEVKDSLDIEVKQNFIDPLQNLHDKDLREIQHHLKKLEGRRLDFDYKKKRQGKIPDEELRQALEKFDESKEIAESSMFNLLEMDIEQVSQLSALVQAQLEYHKQAVQILQQVTVRLEERIRQA

SEQ ID NO: 63420 - protein, 305 aa, Homo sapiens [sequence omitted]

SEQ ID NO: 63421 - protein, 181 aa, Homo sapiens
MSVAGLKKQFHKATQKVSEKVGGAEGTKLDDDFKEMEIEQVSQLSALVQAQLEYHKQAVQILQQVTVRLEERIRQASSQPRREYQPKPRMSLEFPTGDSTQPNGGLSHTGTPKPSGVQMDQPCCRALYDFEPENEGELGFKEGDIITLTNQIDENWYEGMLHGHSGFFPINYVEILVALPH

SEQ ID NO: 63422 - protein, 355 aa, Homo sapiens
MDGIFAGIICNQANRCLTWTSQQLFSEKISGAEGTKLDDEFLDMERKIDVTNKVVAEILSKTTEYLQPNPAYRAKLGMLNTVSKIRGQVKTTGYPQTEGLLGDCMLKYGKELGEDSTFGNALIEVGESMKLMAEVKDSLDINVKQTFIDPLQLLQDKDLKEIGHHLKKLEGRRLDYDYKKKRVGKIPDEEVRQAVEKFEESKELAERSMFNFLENDVEQVSQLAVFIEAALDYHRQSTEILQELQSKLQMRISAASSVPRREYKPRPVKRSSSELNGVSTTSVVKTTGSNIPMDQPCCRGLYDFEPENQGELGFKEGDIITLTNQIDENWYEGMIHGESGFFPINYVEVIVPLPQ

SEQ ID NO: 63423 - protein, 347 aa, Homo sapiens
MSVAGLKKQFHKASQLFSEKISGAEGTKLDDEFLDMERKIDVTNKVVAEILSKTTEYLQPNPAYRAKLGMLNTVSKIRGQVKTTGYPQTEGLLGDCMLKYGKELGEDSTFGNALIEVGESMKLMAEVKDSLDINVKQTFIDPLQLLQDKDLKEIGHHLKKLEGRRLDYDYKKKRVGKIPDEEVRQAVEKFEESKELAERSMFNFLENDVEQVSQLAVFIEAALDYHRQSTEILQELQSKLQMRISAASSVPRREYKPRPVKRSSSELNGVSTTSVVKTTGSNIPMDQPCCRGLYDFEPENQGELGFKEGDIITLTNQIDENWYEGMIHGESGFFPINYVEVIVPLPQ

SEQ ID NO: 63424 - protein, 355 aa, Homo sapiens; identical to SEQ ID NO: 63422

SEQ ID NO: 63425 - protein, 288 aa, Homo sapiens
MSVAGLKKQFHKASQLFSEKISGAEGTKLDDEFLDMERKIDVTNKVVAEILSKTTEYLQPNPAYRAKLGMLNTVSKIRGQVKTTGYPQTEGLLGDCMLKYGKELGEDSTFGNALIEVGESMKLMAEVKDSLDINVKQTFIDPLQLLQDKDLKEIGHHLKKLEGRRLDYDYKKKRVGKIPDEEVRQAVEKFEESKELAERSMFNFLENDVEQVSQLAVFIEAALDYHRQSTEILQELQSKLQMRISAASSVPRREYKPRPVKRSSSELNGVSTTSVVKTTAYSRLEPAD

SEQ ID NO: 63426 - protein, 553 aa, Homo sapiens
MVEAIVEFDYQAQHDDELTISVGEIITNIRKEDGGWWEGQINGRRGLFPDNFVREIKKEMKKDPLTNKAPEKPLHEVPSGNSLLSSETILRTNKRGERRRRRCQVAFSYLPQNDDELELKVGDIIEVVGEVEEGWWEGVLNGKTGMFPSNFIKELSGESDELGISQDEQLSKSRPEGLPPASLLPFPAHGAKGKTTFEGTILYRAAPGKTEGHRRYYSLRETTGSESDGGDSSSTKSEGANGTVATAAIQPKKVKGVGFGDIFKDKPIKLRPRSIEVENDFLPVEKTIGKKLPATTATPDSSKTEMDSRTKSKDYCKVIFPYEAQNDDELTIKEGDIVTLINKDCIDVGWWEGELNGRRGVFPDNFVKLLPPDFEKEGNRPKKPPPPSAPVIKQGAGTTERKHEIKKIPPERPEMLPNRTEEKERPEREPKLDLQKPSVPAIPPKKPRPPKTNSLSRPGALPPRRPERPVGPLTHTRYCCALTSGAGVGWLWKEHRRGTDCHRPWEEGRGEGGAQASLLHPPAKLSEDTGHFCPCSCTQAGVSVRLRGAVWVS

SEQ ID NO: 63427 - protein, 628 aa, Homo sapiens
MEVSAAKAPSAADLSEIEIKKEMKKDPLTNKAPEKPLHEVPSGNSLLSSETILRTNKRGERRRRRCQVAFSYLPQNDDELELKVGDIIEVVGEVEEGWWEGVLNGKTGMFPSNFIKELSGESDELGISQDEQLSKSSLRETTGSESDGGDSSSTKSEGANGTVATAAIQPKKVKGVGFGDIFKDKPIKLRPRSIEVENDFLPVEKTIGKKLPATTATPDSSKTEMDSRTKSKDYCKVIFPYEAQNDDELTIKEGDIVTLINKDCIDVGWWEGELNGRRGVFPDNFVKLLPPDFEKEGNRPKKPPPPSAPVIKQGAGTTERKHEIKKIPPERPEMLPNRTEEKERPEREPKLDLQKPSVPAIPPKKPRPPKTNSLSRPGALPPRRPERPVGPLTHTRGDSPKIDLAGSSLSGILDKDLSDRSNDIDLEGFDSVVSSTEKLSHPTTSRPKATGRRPPSQSLTSSSLSSPDIFDSPSPEEDKEEHISLAHRGVDASKKTSKTVTISQVSDNKASLPPKPGTMAAGGGGPAPLSSAAPSPLSSSLGTAGHRANSPSLFGTEGKPKMEPAASSQAAVEELRTQVRELRSIIETMKDQQKREIKQLLSELDEEKKIRLRLQMEVNDIKKALQSK

SEQ ID NO: 63428 - protein, 650 aa, Homo sapiens
MKKDPLTNKAPEKPLHEVPSGNSLLSSETILRTNKRGERRRRRCQVAFSYLPQNDDELELKVGDIIEVVGEVEEGWWEGVLNGKTGMFPSNFIKELSGESDELGISQDEQLSKSRPEGLPPASLLPFPAHGAKGKTTFEGTILYRAAPGKTEGHRRYYSLRETTGSESDGGDSSSTKSEGANGTVATAAIQPKKVKGVGFGDIFKDKPIKLRPRSIEVENDFLPVEKTIGKKLPATTATPDSSKTEMDSRTKSKDYCKVIFPYEAQNDDELTIKEGDIVTLINKDCIDVGWWEGELNGRRGVFPDNFVKLLPPDFEKEGNRPKKPPPPSAPVIKQGAGTTERKHEIKKIPPERPEMLPNRTEEKERPEREPKLDLQKPSVPAIPPKKPRPPKTNSLSRPGALPPRRPERPVGPLTHTRGDSPKIDLAGSSLSGILDKDLSDRSNDIDLEGFDSVVSSTEKLSHPTTSRPKATGRRPPSQSLTSSSLSSPDIFDSPSPEEDKEEHISLAHRGVDASKKTSKTVTISQVSDNKASLPPKPGTMAAGGGGPAPLSSAAPSPLSSSLGTAGHRANSPSLFGTEGKPKMEPAASSQAAVEELRTQVRELRSIIETMKDQQKREIKQLLSELDEEKKIRLRLQMEVNDIKKALQSK

SEQ ID NO: 63429 - protein, 427 aa, Homo sapiens
MGEETIGKKLPATTATPDSSKTEMDSRTKSKDYCKVIFPYEAQNDDELTIKEGDIVTLINKDCIDVGWWEGELNGRRGVFPDNFVKLLPPDFEKEGNRPKKPPPPSAPVIKQGAGTTERKHEIKKIPPERPEMLPNRTEEKERPEREPKLDLQKPSVPAIPPKKPRPPKTNSLSRPGALPPRRPERPVGPLTHTRGDSPKIDLAGSSLSGILDKDLSDRSNDIDLEGFDSVVSSTEKLSHPTTSRPKATGRRPPSQSLTSSSLSSPDIFDSPSPEEDKEEHISLAHRGVDASKKTSKTVTISQVSDNKASLPPKPGTMAAGGGGPAPLSSAAPSPLSSSLGTAGHRANSPSLFGTEGKPKMEPAASSQAAVEELRTQVRELRSIIETMKDQQKREIKQLLSELDEEKKIRLRLQMEVNDIKKALQSK

SEQ ID NO: 63430 - protein, 645 aa, Homo sapiens
LTNKAPEKPLHEVPSGNSLLSSETILRTNKRGERRRRRCQVAFSYLPQNDDELELKVGDIIEVVGEVEEGWWEGVLNGKTGMFPSNFIKELSGESDELGISQDEQLSKSRPEGLPPASLLPFPAHGAKGKTTFEGTILYRAAPGKTEGHRRYYSLRETTGSESDGGDSSSTKSEGANGTVATAAIQPKKVKGVGFGDIFKDKPIKLRPRSIEVENDFLPVEKTIGKKLPATTATPDSSKTEMDSRTKSKDYCKVIFPYEAQNDDELTIKEGDIVTLINKDCIDVGWWEGELNGRRGVFPDNFVKLLPPDFEKEGNRPKKPPPPSAPVIKQGAGTTERKHEIKKIPPERPEMLPNRTEEKERPEREPKLDLQKPSVPAIPPKKPRPPKTNSLSRPGALPPRRPERPVGPLTHTRGDSPKIDLAGSSLSGILDKDLSDRSNDIDLEGFDSVVSSTEKLSHPTTSRPKATGRRPPSQSLTSSSLSSPDIFDSPSPEEDKEEHISLAHRGVDASKKTSKTVTISQVSDNKASLPPKPGTMAAGGGGPAPLSSAAPSPLSSSLGTAGHRANSPSLFGTEGKPKMEPAASSQAAVEELRTQVRELRSIIETMKDQQKREIKQLLSELDEEKKIRLRLQMEVNDIKKALQSK

SEQ ID NO: 63431 - protein, 149 aa, Homo sapiens
FETSERRRRRCQVAFSYLPQNDDELELKVGDIIEVVGEVEEGWWEGVLNGKTGMFPSNFIKELSGESDELGISQDEQLSKSSLRETTGSESDGGDSSSTKSEGANGTVATAAIQPKKVKGVGFGDIFKDKPIKLRPRSIEVENDFLPVE

SEQ ID NO: 63432 - protein, 665 aa, Homo sapiens
MVEAIVEFDYQAQHDDELTISVGEIITNIRKEDGGWWEGQINGRRGLFPDNFVREIKKEMKKDPLTNKAPEKPLHEVPSGNSLLSSETILRTNKRGERRRRRCQVAFSYLPQNDDELELKVGDIIEVVGEVEEGWWEGVLNGKTGMFPSNFIKELSGESDELGISQDEQLSKSSLRETTGSESDGGDSSSTKSEGANGTVATAAIQPKKVKGVGFGDIFKDKPIKLRPRSIEVENDFLPVEKTIGKKLPATTATPDSSKTEMDSRTKSKDYCKVIFPYEAQNDDELTIKEGDIVTLINKDCIDVGWWEGELNGRRGVFPDNFVKLLPPDFEKEGNRPKKPPPPSAPVIKQGAGTTERKHEIKKIPPERPEMLPNRTEEKERPEREPKLDLQKPSVPAIPPKKPRPPKTNSLSRPGALPPRRPERPVGPLTHTRGDSPKIDLAGSSLSGILDKDLSDRSNDIDLEGFDSVVSSTEKLSHPTTSRPKATGRRPPSQSLTSSSLSSPDIFDSPSPEEDKEEHISLAHRGVDASKKTSKTVTISQVSDNKASLPPKPGTMAAGGGGPAPLSSAAPSPLSSSLGTAGHRANSPSLFGTEGKPKMEPAASSQAAVEELRTQVRELRSIIETMKDQQKREIKQLLSELDEEKKIRLRLQMEVNDIKKALQSK

SEQ ID NO: 63433 - protein, 149 aa, Homo sapiens
MERSERRRRRCQVAFSYLPQNDDELELKVGDIIEVVGEVEEGWWEGVLNGKTGMFPSNFIKELSGESDELGISQDEQLSKSSLRETTGSESDGGDSSSTKSEGANGTVATAAIQPKKVKGVGFGDIFKDKPIKLRPRSIEVENDFLPVE

SEQ ID NO: 63434 - protein, 208 aa, Homo sapiens
MEIKKEMKKDPLTNKAPEKPLHEVPSGNSLLSSETILRTNKRGERRRRRCQVAFSYLPQNDDELELKVGDIIEVVGEVEEGWWEGVLNGKTGMFPSNFIKELSGESDELGISQDEQLSKSSLRETTGSESDGGDSSSTKSEGANGTVATAAIQPKKVKGVGFGDIFKDKPIKLRPRSIEVENDFLPVEKTIGKKLPATTATPDSSKTE

SEQ ID NO: 63435 - protein, 404 aa, Homo sapiens
MDSRTKSKDYCKVIFPYEAQNDDELTIKEGDIVTLINKDCIDVGWWEGELNGRRGVFPDNFVKLLPPDFEKEGNRPKKPPPPSAPVIKQGAGTTERKHEIKKIPPERPEMLPNRTEEKERPEREPKLDLQKPSVPAIPPKKPRPPKTNSLSRPGALPPRRPERPVGPLTHTRGDSPKIDLAGSSLSGILDKDLSDRSNDIDLEGFDSVVSSTEKLSHPTTSRPKATGRRPPSQSLTSSSLSSPDIFDSPSPEEDKEEHISLAHRGVDASKKTSKTVTISQVSDNKASLPPKPGTMAAGGGGPAPLSSAAPSPLSSSLGTAGHRANSPSLFGTEGKPKMEPAASSQAAVEELRTQVRELRSIIETMKDQQKREIKQLLSELDEEKKIRLRLQMEVNDIKKALQSK

SEQ ID NO: 63436 - protein, 151 aa, Homo sapiens
MNWAPATCWALLLAAAFLCDSGAAKGGRGGARGSARGGVRGGARGASRVRVRPAQRYGAPGSSLRVAAAGAAAGAAAGAAAGLAAGSGWRRAAGPGERGLEDEEDGVPGGNGTGPGIYSYRAWTSGAGPTRGPRLCLVLGGALGALGLLRP

SEQ ID NO: 63437 - protein, 151 aa, Homo sapiens; identical to SEQ ID NO: 63436

SEQ ID NO: 63438 - protein, 326 aa, Homo sapiens
MAPPAGGAAAAASDLGSAAVLLAVHAAVRPLGAGPDAEAQLRRLQLSADPERPGRFRLELLGAGPGAVNLEWPLESVSYTIRGPTQHELQPPPGGPGTLSLHFLNPQEAQRWAVLVRGATVEGQNGSKSNSPPALGPEACPVSLPSPPEASTLKGPPPEADLPRSPGNLTEREELAGSLARAIAGGDEKGAAQVAAVLAQHRVALSVQLQEACFPPGPIRLQVTLEDAASAASAASSAHVALQVHPHCTVAALQEQVFSELGFPPAVQRWVIGRCLCVPERSLASYGVRQDGDPAFLYLLSAPREAPAQLVLSFLHLHQCPRPPWL

SEQ ID NO: 63439 - protein, 387 aa, Homo sapiens
MAPPAGGAAAAASDLGSAAVLLAVHAAVRPLGAGPDAEAQLRRLQLSADPERPGRFRLELLGAGPGAVNLEWPLESVSYTIRGPTQHELQPPPGGPGTLSLHFLNPQEAQRWAVLVRGATVEGQNGSKSNSPPALGPEACPVSLPSPPEASTLKGPPPEADLPRSPGNLTEREELAGSLARAIAGGDEKGAAQVAAVLAQHRVALSVQLQEACFPPGPIRLQVTLEDAASAASAASSAHVALQVHPHCTVAALQEQVFSELGFPPAVQRWVIGRCLCVPERSLASYGVRQDGDPAFLYLLSAPREAPATGPSPQHPQKMDGELGRLFPPSLGLPPGPQPAASSLPSPLQPSWSCPSCTFINAPDRPGCEMCSTQRPCTWDPLAAAST

SEQ ID NO: 63440 - protein, 672 aa, Homo sapiens
MADGSLTGGGLEAAAMAPERMGWAVEQELASLEKGLFQDEDSCSDCSYRDKPGSSLQSFMPEGKTFFPEIFQTNQLLFYERFRAYQDYILADCKASEVQEFTAEFLEKVLEPSGWRAVWHTNVFKVLVEITDVDFAALKAVVRLAEPYLCDSQVSTFTMECMKELLDLKEHRLPLQELWVVFDDSGVFDQTALAIEHVRFFYQNIWRSWDEEEEDEYDYFVRCVEPRLRLHYDILEDRVPSGLIVDYHNLLSQCEESYRKFLNLRSSLSNCNSDSEQENISMVEGLKLYSEMEQLKQKLKLIENPLLRYVFGYQKNSNIQAKGVRSSGQKITHVVSSTMMAGLLRSLLTDRLCQEPGEEEREIQFHSDPLSAINACFEGDTVIVCPGHYVVHGTFSIADSIELEGYGLPDDIVIEKRGKGDTFVDCTGADIKISGIKFVQHDAVEGILIVHRGKTTLENCVLQCETTGVTVRTSAEFLMKNSDLYGAKGAGIEIYPGSQCTLSDNGIHHCKEGILIKDFLDEHYDIPKISMVNNIIHNNEGYGVVLVKPTIFSDLQENAEDGTEENKALKIQTSGEPDVAERVDLEELIECATGKMELCARTDPSEQVEGNCEIVNELIAASTQKGQIKKKRLSELGITQADDNLMSQEMFVGIVGNQFKWNGKGSFGTFLF

SEQ ID NO: 63441 - protein, 240 aa, Homo sapiens
MTAPVPAPRILLPLLLLLLLTPPPGARGEVCMASRGLSLFPESCPDFCCGTCDDQYCCSDVLKKFVWSEERCAVPEASVPASVEPVEQLGSALRFRPGYNDPMSGFGATLAVGLTIFVLSVVTIIICFTCSCCCLYKTCRRPRPVVTTTTSTTVVHAPYPQPPSVPPSYPGPSYQGYHTMPPQPGMPAAPYPMQYPPPYPAQPMGPPAYHETLAGGAAAPYPASQPPYNPAYMDAPKAAL

SEQ ID NO: 63442 - protein, 112 aa, Homo sapiens
MASRGLSLFPESCPDFCCGTCDDQYCCSDVLKKFVWSEERCAVPEASVPASVEPVEQLGSALRFRPGYNDPMSGFGATLAVGLTIFVLSVVTIIICFTCSCCCLYKTCRRPR

SEQ ID NO: 63443 - protein, 137 aa, Homo sapiens
MGFGATLAVGLTIFVLSVVTIIICFTCSCCCLYKTCRRPRPVVTTTTSTTVVHAPYPQPPSVPPSYPGPSYQGYHTMPPQPGMPAAPYPMQYPPPYPAQPMGPPAYHETLAGGAAAPYPASQPPYNPAYMDAPKAAL

SEQ ID NO: 63444 - protein, 209 aa, Homo sapiens
MASRGLSLFPESCPDFCCGTCDDQYCCSDVLKKFVWSEERCAVPEASVPASVEPVEQLGSALRFRPGYNDPMSGFGATLAVGLTIFVLSVVTIIICFTCSCCCLYKTCRRPRPVVTTTTSTTVVHAPYPQPPSVPPSYPGPSYQGYHTMPPQPGMPAAPYPMQYPPPYPAQPMGPPAYHETLAGGAAAPYPASQPPYNPAYMDAPKAAL

SEQ ID NO: 63445 - protein, 209 aa, Homo sapiens; identical to SEQ ID NO: 63444

SEQ ID NO: 63446 - protein, 170 aa, Homo sapiens [sequence omitted]

SEQ ID NO: 63447 - protein, 221 aa, Homo sapiens
MRRVLRLLLGCFLTELCARVCRAQERAGHGQLAQLGGVLLLAGGNRSGAASGEASEGAEASDAPPTRAPTPDFCRGYFDVMGQWDPPFNCSSGDFIFCCGTCGFRFCCTFKKRRLNQSTCTNYDTPLWLNTGKPPARKDDPLHDPTKDKTNLIVYIICGVVAVMVLVGIFTKLGLEKAHRPQREHMSRLYDNLLFMEAQISFQEDEPAPGEWSVGLQTWTV

SEQ ID NO: 63448 - protein, 424 aa, Homo sapiens
MRRVLRLLLGCFLTELCARVCRAQERAGHGQLAQLGGVLLLAGGNRSGAASGEASEGAEASDAPPTRAPTPDFCRGYFDVMGQWDPPFNCSSGDFIFCCGTCGFRFCCTFKKRRLNQSTCTNYDTPLWLNTGKPPARKDDPLHDPTKDKTNLIVYIICGVVAVMVLVGIFTKLGLEKAHRPQREHMSRALADVMRPQGHCNTDHMERDLNIVVHVQHYENMDTRTPINNLHATQMNNAVPTSPLLQQMGHPHSYPNLGQISNPYEQQPPGKELNKYASLKAVGSSDGDWAVSTLKSPKADKVNDDFYTKRRHLAELAAKGNLPLHPVRVEDEPRAFSPEHGPAKQNGQKSRTNKMPPHPLAYTSTTNFKGWDPNEQSLRRQAYSNKGKLGTAETGSSDPLGTRPQHYPPPQPYFITNSKTEVTV

SEQ ID NO: 63449 - protein, 262 aa, Homo sapiens
MCGPRRLAAPGSSLGSFGRASRGGRRGSSGGRAAEPGLGDTMRRVLRLLLGCFLTELCARVCRAQERAGHGQLAQLGGVLLLAGGNRSGAASGEASEGAEASDAPPTRAPTPDFCRGYFDVMGQWDPPFNCSSGDFIFCCGTCGFRFCCTFKKRRLNQSTCTNYDTPLWLNTGKPPARKDDPLHDPTKDKTNLIVYIICGVVAVMVLVGIFTKLGLEKAHRPQREHMSRLYDNLLFMEAQISFQEDEPAPGEWSVGLQTWTV

SEQ ID NO: 63450 - protein, 465 aa, Homo sapiens
MCGPRRLAAPGSSLGSFGRASRGGRRGSSGGRAAEPGLGDTMRRVLRLLLGCFLTELCARVCRAQERAGHGQLAQLGGVLLLAGGNRSGAASGEASEGAEASDAPPTRAPTPDFCRGYFDVMGQWDPPFNCSSGDFIFCCGTCGFRFCCTFKKRRLNQSTCTNYDTPLWLNTGKPPARKDDPLHDPTKDKTNLIVYIICGVVAVMVLVGIFTKLGLEKAHRPQREHMSRALADVMRPQGHCNTDHMERDLNIVVHVQHYENMDTRTPINNLHATQMNNAVPTSPLLQQMGHPHSYPNLGQISNPYEQQPPGKELNKYASLKAVGSSDGDWAVSTLKSPKADKVNDDFYTKRRHLAELAAKGNLPLHPVRVEDEPRAFSPEHGPAKQNGQKSRTNKMPPHPLAYTSTTNFKGWDPNEQSLRRQAYSNKGKLGTAETGSSDPLGTRPQHYPPPQPYFITNSKTEVTV

SEQ ID NO: 63451 - protein, 225 aa, Homo sapiens
MEELTAFVSKSFDQKSKDGNGGGGGGGGKKDSITYREVLESGLARSRELGTSDSSLQDITEGGGHCPVHLFKDHVDNDKEKLKEFGTARVAEGIYECKEKREDVKSEDEDGQTKLKQRRSRTNFTLEQLNELERLFDETHYPDAFMREELSQRLGLSEARVQVWFQNRRAKCRKQENQMHKGVILGTANHLDACRVAPYVNMGALRMPFQQMEFCSCRPGWSIMA

SEQ ID NO: 63452 - protein, 225 aa, Homo sapiens; identical to SEQ ID NO: 63451

SEQ ID NO: 63453 - protein, 292 aa, Homo sapiens
MEELTAFVSKSFDQKSKDGNGGGGGGGGKKDSITYREVLESGLARSRELGTSDSSLQDITEGGGHCPVHLFKDHVDNDKEKLKEFGTARVAEGIYECKEKREDVKSEDEDGQTKLKQRRSRTNFTLEQLNELERLFDETHYPDAFMREELSQRLGLSEARVQVWFQNRRAKCRKQENQMHKGVILGTANHLDACRVAPYVNMGALRMPFQQVQAQLQLEGVAHAHPHLHPHLAAHAPYLMFPPPPFGLPIASLAESASAAAVVAAAAKSNSKNSSIADLRLKARKHAEALGL

SEQ ID NO: 63454 - protein, 292 aa, Homo sapiens; identical to SEQ ID NO: 63453

SEQ ID NO: 63455 - protein, 190 aa, Homo sapiens
MEDEGQTKIKQRRSRTNFTLEQLNELERLFDETHYPDAFMREELSQRLGLSEARVQVWFQNRRAKCRKQENQLHKGVLIGAASQFEACRVAPYVNVGALRMPFQQVQAQLQLDSAVAHAHHHLHPHLAAHAPYMMFPAPPFGLPLATLAADSASAASVVAAAAAAKTTSKNSSIADLRLKAKKHAAALGL

SEQ ID NO: 63456 - protein, 331 aa, Homo sapiens
MEELTAFVSKSFDQKVKEKKEAITYREVLESGPLRGAKEPTGCTEAGRDDRSSPAVRAAGGGGGGGGGGGGGGGGGGVGGGGAGGGAGGGRSPVRELDMGAAERSREPGSPRLTEVSPELKDRKEDAKGMEDEGQTKIKQRRSRTNFTLEQLNELERLFDETHYPDAFMREELSQRLGLSEARVQVWFQNRRAKCRKQENQLHKGVLIGAASQFEACRVAPYVNVGALRMPFQQDSHCNVTPLSFQVQAQLQLDSAVAHAHHHLHPHLAAHAPYMMFPAPPFGLPLATLAADSASAASVVAAAAAAKTTSKNSSIADLRLKAKKHAAALGL

SEQ ID NO: 63457 - protein, 355 aa, Homo sapiens
MEELTAFVSKSFDQKVKEKKEAITYREVLESGPLRGAKEPTGCTEAGRDDRSSPAVRAAGGGGGGGGGGGGGGGGGGVGGGGAGGGAGGGRSPVRELDMGAAERSREPGSPRLTEGRRKPTKAEVQATLLLPGEAFRFLVSPELKDRKEDAKGMEDEGQTKIKQRRSRTNFTLEQLNELERLFDETHYPDAFMREELSQRLGLSEARVQVWFQNRRAKCRKQENQLHKGVLIGAASQFEACRVAPYVNVGALRMPFQQDSHCNVTPLSFQVQAQLQLDSAVAHAHHHLHPHLAAHAPYMMFPAPPFGLPLATLAADSASAASVVAAAAAAKTTSKNSSIADLRLKAKKHAAALGL

SEQ ID NO: 63458 - protein, 190 aa, Homo sapiens; identical to SEQ ID NO: 63455

SEQ ID NO: 63459 - protein, 190 aa, Homo sapiens; identical to SEQ ID NO: 63455

SEQ ID NO: 63460 - protein, 577 aa, Homo sapiens
MLTPAFDLSQDPDFLTIAIRVPYARVSEFDVYFEGSDFKFYAKPYFLRLTLPGRIVENGSEQGSYDADKGIFTIRLPKETPGQHFEGLNMLTALLAPRKSRTAKPLVEEIGASEIPEEVVDDEEFDWEIEQTPCEEVSESALNPQCHYGFGNLRSGVLQRLQDELSDVIDIKDPDFTPAAERRQKRLAAELAKFDPDHYLADFFEDEAIEQILKYNPWWTDKYSKMMAFLEKSQEQENHATLVSFSEEEKYQLRKFVNKSYLLDKRACRQVCYSLIDILLAYCYETRVTEGEKNVESAWNIRKLSPTLCWFETWTNVHDIMVSFGRRVLCYPLYRHFKLVMKAYRDTIKILQLGKSAVLKCLLDIHKIFQENDPAYILNDLYISDYCVWIQKVKSKKLAALAEALKEVSLTKAQLGLELEELEAAALLVQEEETALKAAHSVSGQQTLCSSSEASDSEDSDSSVSSGNEDSGSDSEQDELKDSPSETVSSLQGPFLEESSAFLIVDGGVRRNTAIQESDASQGKPLASSWPLGVSGPLIEELGEQLKTTVQVSEPKGTTAVNRSNIQERDGCQTPNN

SEQ ID NO: 63461 - protein, 1616 aa, Homo sapiens
MEGAEPRARPERLAEAETRAADGGRLVEVQLSGGAPWGFTLKGGREHGEPLVITKIEEGSKAAAVDKLLAGDEIVGINDIGLSGFRQEAICLVKGSHKTLKLVVKRRSELGWRPHSWHATKFSDSHPELAASPFTSTSGCPSWSGRHHASSSSHDLSSSWEQTNLQRTLDHFSSLGSVDSLDHPSSRLSVAKSNSSIDHLGSHSKRDSAYGSFSTSSSTPDHTLSKADTSSAENILYTVGLWEAPRQGGRQAQAAGDPQGSEEKLSCFPPRVPGDSGKGPRPEYNAEPKLAAPGRSNFGPVWYVPDKKKAPSSPPPPPPPLRSDSFAATKSHEKAQGPVFSEAAAAQHFTALAQAQPRGDRRPELTDRPWRSAHPGSLGKGSGGPGCPQEAHADGSWPPSKDGASSRLQASLSSSDVRFPQSPHSGRHPPLYSDHSPLCADSLGQEPGAASFQNDSPPQVRGLSSCDQKLGSGWQGPRPCVQGDLQAAQLWAGCWPSDTALGALESLPPPTVGQSPRHHLPQPEGPPDARETGRCYPLDKGAEGCSAGAQEPPRASRAEKASQRLAASITWADGESSRICPQETPLLHSLTQEGKRRPESSPEDSATRPPPFDAHVGKPTRRSDRFATTLRNEIQMHRAKLQKSRSTVALTAAGEAEDGTGRWRAGLGGGTQEGPLAGTYKDHLKEAQARVLRATSFKRRDLDPNPGDLYPESLEHRMGDPDTVPHFWEAGLAQPPSSTSGGPHPPRIGGRRRFTAEQKLKSYSEPEKMNEVGLTRGYSPHQHPRTSEDTVGTFADRWKFFEETSKPVPQRPAQKQALHGIPRDKPERPRTAGRTCEGTEPWSRTTSLGDSLNAHSAAEKAGTSDLPRRLGTFAEYQASWKEQRKPLEARSSGRCHSADDILDVSLDPQERPQHVHGRSRSSPSTDHYKQEASVELRRQAGDPGEPREELPSAVRAEEGQSTPRQADAQCREGSPGSQQHPPSQKAPNPPTFSELSHCRGAPELPREGRGRAGTLPRDYRYSEESTPADLGPRAQSPGSPLHARGQDSWPVSSALLSKRPAPQRPPPPKREPRRYRATDGAPADAPVGVLGRPFPTPSPASLDVYVARLSLSHSPSVFSSAQPQDTPKATVCERGSQHVSGDASRPLPEALLPPKQQHLRLQTATMETSRSPSPQFAPQKLTDKPPLLIQDEDSTRIERVMDNNTTVKMVPIKIVHSESQPEKESRQSLACPAEPPALPHGLEKDQIKTLSTSEQFYSRFCLYTRQGAEPEAPHRAQPAEPQPLGTQVPPEKDRCTSPPGLSYMKAKEKTVEDLKSEELAREIVGKDKSLADILDPSVKIKTTMDLMEGIFPKDEHLLEEAQQRRKLLPKIPSPRSTEERKEEPSVPAAVSLATNSTYYSTSAPKAELLIKMKDLQEQQEHEEDSGSDLDHDLSVKKQELIESISRKLQVLREARESLLEDVQANTVLGAEVEAIVKGVCKPSEFDKFRMFIGDLDKVVNLLLSLSGRLARVENALNNLDDGASPGDRQSLLEKQRVLIQQHEDAKELKENLDRRERIVFDILANYLSEESLADYEHFVKMKSALIIEQRELEDKIHLGEEQLKCLLDSLQPERGK

SEQ ID NO: 63462 - protein, 451 aa, Homo sapiens
METSRSPSPQFAPQKLTDKPPLLIQDEDSTRIERVMDNNTTVKMVPIKIVHSESQPEKESRQSLACPAEPPALPHGLEKDQIKTLSTSEQFYSRFCLYTRQGAEPEAPHRAQPAEPQPLGTQVPPEKDRCTSPPGLSYMKAKEKTVEDLKSEELAREIVGKDKSLADILDPSVKIKTTMDLMEGIFPKDEHLLEEAQQRRKLLPKIPSPRSTEERKEEPSVPAAVSLATNSTYYSTSAPKAELLIKMKDLQEQQEHEEDSGSDLDHDLSVKKQELIESISRKLQVLREARESLLEDVQANTVLGAEVEAIVKGVCKPSEFDKFRMFIGDLDKVVNLLLSLSGRLARVENALNNLDDGASPGDRQSLLEKQRVLIQQHEDAKELKENLDRRERIVFDILANYLSEESLADYEHFVKMKSALIIEQRELEDKIHLGEEQLKCLLDSLQPERGK

SEQ ID NO: 63463 - protein, 375 aa, Homo sapiens
METSRSPSPQFAPQKLTDKPPLLIQDEDSTRIERVMDNNTTVKMVPIKIVHSESQPEKESRQSLACPAEPPALPHGLEKDQIKTLSTSEQFYSRFCLYTRQGAEPEAPHRAQPAEPQPLGTQVPPEKDRCTSPPGLSYMKAKEKTVEDLKSEELAREIVGKDKSLADILDPSVKIKTTMDLMEGIFPKDEHLLEEAQQRRKLLPKIPSPRSTEERKEEPSVPAAVSLATNSTYYSTSAPKAELLIKMKDLQEQQEHEEDSGSDLDHDLSVKKQELIESISRKLQVLREARESLLEDVQANTVLGAEVEAIVKGVCKPSEFDKFRMFIGDLDKVVNLLLSLSGRLARVENALNNLDDGASPGDRQSLLEKQRVLIQ

SEQ ID NO: 63464 - protein, 400 aa, Homo sapiens
METSRSPSPQFAPQKLTDKPPLLIQDEDSTRIERVMDNNTTVKMVPIKIVHSESQPEKESRQSLACPAEPPALPHGLEKDQIKTLSTSEQFYSRFCLYTRQGAEPEAPHRAQPAEPQPLGTQVPPEKDRCTSPPGLSYMKAKEKTVEDLKSEELAREIVGKDKSLADILDPSVKIKTTMDLMEGIFPKDEHLLEEAQQRRKLLPKIPSPRSTEERKEEPSVPAAVSLATNSTYYSTSAPKAELLIKMKDLQEQQEHEEDSGSDLDHDLSVKKQELIESISRKLQVLREARESLLEDVQANTVLGAEVEAIVKGVCKPSEFDKFRMFIGDLDKVVNLLLSLSGRLARVENALNNLDDGASPGDRQSLLEKQRVLIQQMCVDFMLDTYHSPINRSSCLTVTK

SEQ ID NO: 63465 - protein, 258 aa, Homo sapiens [sequence omitted]

SEQ ID NO: 63466 - protein, 1996 aa, Homo sapiens
MMRTTEDFHKPSATLNSNTATKGRYIYLEAFLEGGAPWGFTLKGGLEHGEPLIISKVEEGGKADTLSSKLQAGDEVVHINEVTLSSSRKEAVSLVKGSYKTLRLVVRRDVCTDPGHADTGASNFVSPEHLTSGPQHRKAAWSGGVKLRLKHRRSEPAGRPHSWHTTKSGEKQPDASMMQISQGMIGPPWHQSYHSSSSTSDLSNYDHAYLRRSPDQCSSQGSMESLEPSGAYPPCHLSPAKSTGSIDQLSHFHNKRDSAYSSFSTSSSILEYPHPGISGRERSGSMDNTSARGGLLEGMRQADIRYVKTVYDTRRGVSAEYEVNSSALLLQGREARASANGQGYDKWSNIPRGKGVPPPSWSQQCPSSLETATDNLPPKVGAPLPPARSDSYAAFRHRERPSSWSSLDQKRLCRPQANSLGSLKSPFIEEQLHTVLEKSPENSPPVKPKHNYTQKAQPGQPLLPTSIYPVPSLEPHFAQVPQPSVSSNGMLYPALAKESGYIAPQGACNKMATIDENGNQNGSGRPGFAFCQPLEHDLLSPVEKKPEATAKYVPSKVHFCSVPENEEDASLKRHLTPPQGNSPHSNERKSTHSNKPSSHPHSLKCPQAQAWQAGEDKRSSRLSEPWEGDFQEDHNANLWRRLEREGLGQSLSGNFGKTKSAFSSLQNIPESLRRHSSLELGRGTQEGYPGGRPTCAVNTKAEDPGRKAAPDLGSHLDRQVSYPRPEGRTGASASFNSTDPSPEEPPAPSHPHTSSLGRRGPGPGSASALQGFQYGKPHCSVLEKVSKFEQREQGSQRPSVGGSGFGHNYRPHRTVSTSSTSGNDFEETKAHIRFSESAEPLGNGEQHFKNGELKLEEASRQPCGQQLSGGASDSGRGPQRPDARLLRSQSTFQLSSEPEREPEWRDRPGSPESPLLDAPFSRAYRNSIKDAQSRVLGATSFRRRDLELGAPVASRSWRPRPSSAHVGLRSPEASASASPHTPRERHSVTPAEGDLARPVPPAARRGARRRLTPEQKKRSYSEPEKMNEVGIVEEAEPAPLGPQRNGMRFPESSVADRRRLFERDGKACSTLSLSGPELKQFQQSALADYIQRKTGKRPTSAAGCSLQEPGPLRERAQSAYLQPGPAALEGSGLASASSLSSLREPSLQPRREATLLPATVAETQQAPRDRSSSFAGGRRLGERRRGDLLSGANGGTRGTQRGDETPREPSSWGARAGKSMSAEDLLERSDVLAGPVHVRSRSSPATADKRQDVLLGQDSGFGLVKDPCYLAGPGSRSLSCSERGQEEMLPLFHHLTPRWGGSGCKAIGDSSVPSECPGTLDHQRQASRTPCPRPPLAGTQGLVTDTRAAPLTPIGTPLPSAIPSGYCSQDGQTGRQPLPPYTPAMMHRSNGHTLTQPPGPRGCEGDGPEHGVEEGTRKRVSLPQWPPPSRAKWAHAAREDSLPEESSAPDFANLKHYQKQQSLPSLCSTSDPDTPLGAPSTPGRISLRISESVLRDSPPPHEDYEDEVFVRDPHPKATSSPTFEPLPPPPPPPPSQETPVYSMDDFPPPPPHTVCEAQLDSEDPEGPRPSFNKLSKVTIARERHMPGAAHVVGSQTLASRLQTSIKGSEAESTPPSFMSVHAQLAGSLGGQPAPIQTQSLSHDPVSGTQGLEKKVSPDPQKSSEDIRTEALAKEIVHQDKSLADILDPDSRLKTTMDLMEGLFPRDVNLLKENSVKRKAIQRTVSSSGCEGKRNEDKEAVSMLVNCPAYYSVSAPKAELLNKIKEMPAEVNEEEEQADVNEKKAELIGSLTHKLETLQEAKGSLLTDIKLNNALGEEVEALISELCKPNEFDKYRMFIGDLDKVVNLLLSLSGRLARVENVLSGLGEDASNEERSSLYEKRKILAGQHEDARELKENLDRRERVVLGILANYLSEEQLQDYQHFVKMKSTLLIEQRKLDDKIKLGQEQVKCLLESLPSDFIPKAGALALPPNLTSEPIPAGGCTFSGIFPTLTSPL

SEQ ID NO: 63467 - protein, 186 aa, Homo sapiens
MAFYSTTEYDIQLARGLLSGMFLFATRRSEPAGRPHSWHTTKSGEKQPDASMMQISQGMIGPPWHQSYHSSSSTSDLSNYDHAYLRRSPDQCSSQGSMESLEPSGAYPPCHLSPAKSTGSIDQLSHFHNKRDSAYSSFSTSSSILEYPHPGKRVKTRDLPGSQSPGRAISRKTTMPTSGGGWREKA

SEQ ID NO: 63468 - protein, 1493 aa, Homo sapiens
MENRPGSFQYVPVQLQGGAPWGFTLKGGLEHCEPLTVSKIEDGGKAALSQKMRTGDELVNINGTPLYGSRQEALILIKGSFRILKLIVRRRNAPVSRPHSWHVAKLLEGCPEAATTMHFPSEAFSLSWHSGCNTSDVCVQWCPLSRHCSTEKSSSIGSMESLEQPGQATYESHLLPIDQNMYPNQRDSAYSSFSASSNASDCALSLRPEEPASTDCIMQGPGPTKAPSGRPNVAETSGGSRRTNGGHLTPSSQMSSRPQEGYQSGPAKAVRGPPQPPVRRDSLQASRAQLLNGEQRRASEPVVPLPQKEKLSLEPVLPARNPNRFCCLSGHDQVTSEGHQNCEFSQPPESSQQGSEHLLMQASTKAVGSPKACDRASSVDSNPLNEASAELAKASFGRPPHLIGPTGHRHSAPEQLLASHLQHVHLDTRGSKGMELPPVQDGHQWTLSPLHSSHKGKKSPCPPTGGTHDQSSKERKTRQVDDRSLVLGHQSQSSPPHGEADGHPSEKGFLDPNRTSRAASELANQQPSASGSLVQQATDCSSTTKAASGTEAGEEGDSEPKECSRMGGRRSGGTRGRSIQNRRKSERFATNLRNEIQRRKAQLQKSKGPLSQLCDTKEPVEETQEPPESPPLTASNTSLLSSCKKPPSPRDKLFNKSMMLRARSSECLSQAPESHESRTGLEGRISPGQRPGQSSLGLNTWWKAPDPSSSDPEKAHAHCGVRGGHWRWSPEHNSQPLVAAAMEGPSNPGDNKELKASTAQAGEDAILLPFADRRKFFEESSKSLSTSHLPGLTTHSNKTFTQRPKPIDQNFQPMSSSCRELRRHPMDQSYHSADQPYHATDQSYHSMSPLQSETPTYSECFASKGLENSMCCKPLHCGDFDYHRTCSYSCSVQGALVHDPCIYCSGEICPALLKRNMMPNCYNCRCHHHQCIRCSVCYHNPQHSALEDSSLAPGNTWKPRKLTVQEFPGDKWNPITGNRKTSQSGREMAHSKTSFSWATPFHPCLENPALDLSSYRAISSLDLLGDFKHALKKSEETSVYEEGSSLASMPHPLRSRAFSESHISLAPQSTRAWGQHRRELFSKGDETQSDLLGARKKAFPPPRPPPPNWEKYRLFRAAQQQKQQQQQQKQQEEEEEEEEEEEEEEEEEEEEAEEEEEELPPQYFSSETSGSCALNPEEVLEQPQPLSFGHLEGSRQGSQSVPAEQESFALHSSDFLPPIRGHLGSQPEQAQPPCYYGIGGLWRTSGQEATESAKQEFQHFSPPSGAPGIPTSYSAYYNISVAKAELLNKLKDQPEMAEIGLGEEEVDHELAQKKIQLIESISRKLSVLREAQRGLLEDINANSALGEEVEANLKAVCKSNEFEKYHLFVGDLDKVVNLLLSLSGRLARVENALNSIDSEANQEKLVLIEKKQQLTGQLADAKELKEHVDRREKLVFGMVSRYLPQDQLQDYQHFVKMKSALIIEQRELEEKIKLGEEQLKCLRESLLLGPSNF

SEQ ID NO: 63469 - protein, 1493 aa, Homo sapiens; identical to SEQ ID NO: 63468

SEQ ID NO: 63470 - protein, 1377 aa, Homo sapiens
MHFPSEAFSLSWHSGCNTSDVCVQWCPLSRHCSTEKSSSIGSMESLEQPGQATYESHLLPIDQNMYPNQRDSAYSSFSASSNASDCALSLRPEEPASTDCIMQGPGPTKAPSGRPNVAETSGGSRRTNGGHLTPSSQMSSRPQEGYQSGPAKAVRGPPQPPVRRDSLQASRAQLLNGEQRRASEPVVPLPQKEKLSLEPVLPARNPNRFCCLSGHDQVTSEGHQNCEFSQPPESSQQGSEHLLMQASTKAVGSPKACDRASSVDSNPLNEASAELAKASFGRPPHLIGPTGHRHSAPEQLLASHLQHVHLDTRGSKGMELPPVQDGHQWTLSPLHSSHKGKKSPCPPTGGTHDQSSKERKTRQVDDRSLVLGHQSQSSPPHGEADGHPSEKGFLDPNRTSRAASELANQQPSASGSLVQQATDCSSTTKAASGTEAGEEGDSEPKECSRMGGRRSGGTRGRSIQNRRKSERFATNLRNEIQRRKAQLQKSKGPLSQLCDTKEPVEETQEPPESPPLTASNTSLLSSCKKPPSPRDKLFNKSMMLRARSSECLSQAPESHESRTGLEGRISPGQRPGQSSLGLNTWWKAPDPSSSDPEKAHAHCGVRGGHWRWSPEHNSQPLVAAAMEGPSNPGDNKELKASTAQAGEDAILLPFADRRKFFEESSKSLSTSHLPGLTTHSNKTFTQRPKPIDQNFQPMSSSCRELRRHPMDQSYHSADQPYHATDQSYHSMSPLQSETPTYSECFASKGLENSMCCKPLHCGDFDYHRTCSYSCSVQGALVHDPCIYCSGEICPALLKRNMMPNCYNCRCHHHQCIRCSVCYHNPQHSALEDSSLAPGNTWKPRKLTVQEFPGDKWNPITGNRKTSQSGREMAHSKTSFSWATPFHPCLENPALDLSSYRAISSLDLLGDFKHALKKSEETSVYEEGSSLASMPHPLRSRAFSESHISLAPQSTRAWGQHRRELFSKGDETQSDLLGARKKAFPPPRPPPPNWEKYRLFRAAQQQKQQQQQQKQQEEEEEEEEEEEEEEEEEEEEAEEEEEELPPQYFSSETSGSCALNPEEVLEQPQPLSFGHLEGSRQGSQSVPAEQESFALHSSDFLPPIRGHLGSQPEQAQPPCYYGIGGLWRTSGQEATESAKQEFQHFSPPSGAPGIPTSYSAYYNISVAKAELLNKLKDQPEMAEIGLGEEEVDHELAQKKIQLIESISRKLSVLREAQRGLLEDINANSALGEEVEANLKAVCKSNEFEKYHLFVGDLDKVVNLLLSLSGRLARVENALNSIDSEANQEKLVLIEKKQQLTGQLADAKELKEHVDRREKLVFGMVSRYLPQDQLQDYQHFVKMKSALIIEQRELEEKIKLGEEQLKCLRESLLLGPSNF

SEQ ID NO: 63471 - protein, 561 aa, Homo sapiens
MAKERCLKKSFQDSLEDIKKRMKEKRNKNLAEIGKRRSFIAAPCQIITNTSTLLKNYQDNNKMLVLALENEKSKVKEAQDIILQLRKECYYLTCQLYALKGKLTSQQTVEPAQNQEICSSGMDPNSDDSSRNLFVKDLPQIPLEETELPGQGESFQIEDQIPTIPQDTLGVDFDSGEAKSTDNVLPRTVSVRSSLKKHCNSICQFDSLDDFETSHLAGKSFEFERVGFLDPLVNMHIPENVQHNACQWSKDQVNLSPKLIQPGTFTKTKEDILESKSEQTKSKQRDTQERKREEKRKANRRKSKRMSKYKENKSENKKTVPQKKMHKSVSSNDAYNFNLEEGVHLTPFRQKVSNDSNREENNESEVSLCESSGSGDDSDDLYLPTCKYIQNPTSNSDRPVTRPLAKRALKYTDEKETEGSKPTKTPTTTPPETQQSPHLSLKDITNVSLYPVVKIRRLSLSPKKNKASPAVALPKRRCTASVNYKEPTLASKLRRGDPFTDLCFLNSPIFKQKKDLRRSKKRALEVSPAKEAIFILYYVREFVSRFPDCRKCKLETHICLR

SEQ ID NO: 63472 - protein, 292 aa, Homo sapiens
MAKERCLKKSFQDSLEDIKKRMKEKRNKNLAEIGKRRSFIAAPCQIITNTSTLLKNYQDNNKMLVLALENEKSKVKEAQDIILQLRKECYYLTCQLYALKGKLTSQQTVEPAQNQEICSSGMDPNSDDSSRNLFVKDLPQIPLEETELPGQGESFQIEATPPETQQSPHLSLKDITNVSLYPVVKIRRLSLSPKKNKASPAVALPKRRCTASVNYKEPTLASKLRRGDPFTDLCFLNSPIFKQKKDLRRSKKRALEVSPAKEAIFILYYVREFVSRFPDCRKCKLETHICLR

SEQ ID NO: 63473 - protein, 215 aa, Homo sapiens
MAKERCLKKSFQDSLEDIKKRMKEKRNKNLAEIGKRRSFIAAPCQIITNTSTLLKNYQDNNKMLVLALENEKSKVKEAQDIILQLRKECYYLTCQLYALKGKLTSQQTVEPAQNQEICSSGMDPNSDDSSRNLFVKDLPQIPLEETELPGQGESFQIEDQIPTIPQDTLGVDFDSGALEVSPAKEAIFILYYVREFVSRFPDCRKCKLETHICLR

SEQ ID NO: 63474 - protein, 527 aa, Homo sapiens
MAKERCLKKSFQDSLEDIKKRMKEKRNKNLAEIGKRRSFIAAPCQIITNTSTLLKNYQDNNKMLVLALENEKSKVKEAQDIILQLRKECYYLTCQLYALKGKLTSQQTVEPAQNQEICSSGMDPNSDDSSRNLFVKDLPQIPLEETELPGQGESFQIEDQIPTIPQDTLGVDFDSGEAKSTDNVLPRTVSVRSSLKKHCNSICQFDSLDDFETSHLAGKSFEFERVGFLDPLVNMHIPENVQHNACQWSKDQVNLSPKLIQPGTFTKTKEDILESKSEQTKSKQRDTQERKREEKRKANRRKSKRMSKYKENKSENKKTVPQKKMHKSVSSNDAYNFNLEEGVHLTPFRQKVSNDSNREENNESEVSLCESSGSGDDSDDLYLPTCKYIQNPTSNSDRPVTRPLAKRALKYTDEKETEGSKPTKTPTTTPPETQQSPHLSLKDITNVSLYPVVKIRRLSLSPKKNKASPAVALPKRRCTASVNYKEPTLASKLRRGDPFTDLCFLNSPIFKQKKDLRRSKKSMKQIQ

SEQ ID NO: 63475 - protein, 527 aa, Homo sapiens; identical to SEQ ID NO: 63474

SEQ ID NO: 63476 - protein, 275 aa, Homo sapiens
MAKERCLKKSFQDSLEDIKKRMKEKRNKNLAEIGKRRSFIAAPCQIITNTSTLLKNYQDNNKMLVLALENEKSKVKEAQDIILQLRKECYYLTCQLYALKGKLTSQQTVEPAQNQEICSSGMDPNSDDSSRNLFVKDLPQIPLEETELPGQGESFQIEDQIPTIPQDTLGVDFDSATPPETQQSPHLSLKDITNVSLYPVVKIRRLSLSPKKNKASPAVALPKRRCTASVNYKEPTLASKLRRGDPFTDLCFLNSPIFKQKKDLRRSKKSMKQIQ

SEQ ID NO: 63477 - protein, 309 aa, Homo sapiens
MAKERCLKKSFQDSLEDIKKRMKEKRNKNLAEIGKRRSFIAAPCQIITNTSTLLKNYQDNNKMLVLALENEKSKVKEAQDIILQLRKECYYLTCQLYALKGKLTSQQTVEPAQNQEICSSGMDPNSDDSSRNLFVKDLPQIPLEETELPGQGESFQIEDQIPTIPQDTLGVDFDSATPPETQQSPHLSLKDITNVSLYPVVKIRRLSLSPKKNKASPAVALPKRRCTASVNYKEPTLASKLRRGDPFTDLCFLNSPIFKQKKDLRRSKKRALEVSPAKEAIFILYYVREFVSRFPDCRKCKLETHICLR

SEQ ID NO: 63478 - protein, 561 aa, Homo sapiens; identical to SEQ ID NO: 63471

SEQ ID NO: 63479 - protein, 309 aa, Homo sapiens; identical to SEQ ID NO: 63477

SEQ ID NO: 63480 - protein, 258 aa, Homo sapiens
MAKERCLKKSFQDSLEDIKKRMKEKRNKNLAEIGKRRSFIAAPCQIITNTSTLLKNYQDNNKMLVLALENEKSKVKEAQDIILQLRKECYYLTCQLYALKGKLTSQQTVEPAQNQEICSSGMDPNSDDSSRNLFVKDLPQIPLEETELPGQGESFQIEATPPETQQSPHLSLKDITNVSLYPVVKIRRLSLSPKKNKASPAVALPKRRCTASVNYKEPTLASKLRRGDPFTDLCFLNSPIFKQKKDLRRSKKSMKQIQ

SEQ ID NO: 63481 - protein, 275 aa, Homo sapiens; identical to SEQ ID NO: 63476

SEQ ID NO: 63482 - protein, 258 aa, Homo sapiens; identical to SEQ ID NO: 63480

SEQ ID NO: 63483 - protein, 292 aa, Homo sapiens; identical to SEQ ID NO: 63472

SEQ ID NO: 63484 - protein, 1265 aa, Homo sapiens
MECPVMETGSLFTSGIKRHLKDKRISKTTKLNVSLASKIKTKILNNSSIFKISLKHNNRALAQALSREKENSRRITTEKMLLQKEVEKLNFENTFLRLKLNNLNKKLIDIEALMNNNLITAIEMSSLSEFHQSSFLLSASKKKRISKQCKLMRLPFARVPLTSNDDEDEDKEKMQCDNNIKSKTLPDIPSSGSTTQPLSTQDNSEVLFLKENNQNVYGLDDSEHISSIVDVPPRESHSHSDQSSKTSLMSEMRNAQSIGRRWEKPSPSNVTERKKRGSSWESNNLSADTPCATVLDKQHISSPELNCNNEINGHTNETNTEMQRNKQDLPGLSSESAREPNAECMNQIEDNDDFQLQKTVYDADMDLTASEVSKIVTVSTGIKKKSNKKTNEHGMKTFRKVKDSSSEKKRERSKRQFKNSSDVDIGEKIENRTERSDVLDGKRGAEDPGFIFNNEQLAQMNEQLAQVNELKKMTLQTGFEQGDRENVLCNKKEKRITNEQEETYSLSQSSGKFHQESKFDKGQNSLTCNKSKASRQTFVIHKLEKDNLLPNQKDKVTIYENLDVTNEFHTANLSTKDNGNLCDYGTHNILDLKKYVTDIQPSEQNESNINKLRKKVNRKTEIISGMNHMYEDNDKDVVHGLKKGNFFFKTQEDKEPISENIEVSKELQIPALSTRDNENQCDYRTQNVLGLQKQITNMYPVQQNESKVNKKLRQKVNRKTEIISEVNHLDNDKSIEYTVKSHSLFLTQKDKEIIPGNLEDPSEFETPALSTKDSGNLYDSEIQNVLGVKHGHDMQPACQNDSKIGKKPRLNVCQKSEIIPETNQIYENDNKGVHDLEKDNFFSLTPKDKETISENLQVTNEFQTVDLLIKDNGNLCDYDTQNILELKKYVTDRKSAEQNESKINKLRNKVNWKTEIISEMNQIYEDNDKDAHVQESYTKDLDFKVNKSKQKLECQDIINKHYMEVNSNEKESCDQILDSYKVVKKRKKESSCKAKNILTKAKNKLASQLTESSQTSISLESDLKHITSEADSDPGNPVELCKTQKQSTTTLNKKDLPFVEEIKEGECQVKKVNKMTSKSKKRKTSIDPSPESHEVMERILDSVQGKSTVSEQADKENNLENEKMVKNKPDFYTKAFRSLSEIHSPNIQDSSFDSVREGLVPLSVSSGKNVIIKENFALECSPAFQVSDDEHEKMNKMKFKVNRRTQKSGIGDRPLQDLSNTSFVSNNTAESENKSEDLSSERTSRRRRCTPFYFKEPSLRDKMRR

SEQ ID NO: 63485 - protein, 247 aa, Homo sapiens
MECPVMETGSLFTSGIKRHLKDKRISKTTKLNVSLASKIKTKILNNSSIFKISLKHNNRALAQALSREKENSRRITTEKMLLQKEVEKLNFENTFLRLKLNNLNKKLIDIEALMNNNLITAIEMSSLSEFHQSSFLLSASKKKRISKQCKLMRLPFARVPLTSNDDEDEDKEKMQCDNNIKSKTLPDIPSSGSTTQPLSTQDNSEVLFLKENNQNVYGLDDSEHISSIVDVPPRGEIVLKIHFEYLY

SEQ ID NO: 63486 - protein, 87 aa, Homo sapiens
MECPVMETGSLFTSGIKRHLKDKRISKTTKLNVSLASKIKTKILNNSSIFKISLKHNNRALAQALSREKENSRRITTEKMLLQKEVE

SEQ ID NO: 63487 - protein, 250 aa, Homo sapiens
MSIFTPTNQIRLTNVAVVRMKRAGKRFEIACYKNKVVGWRSGVEKDLDEVLQTHSVFVNVSKGQVAKKEDLISAFGTDDQTEICKQILTKGEVQVSDKERHTQLEQMFRDIATIVADKCVNPETKRPYTVILIERAMKDIHYSVKTNKSTKQQALEVIKQLKEKMKIERAHMRLRFILPVNEGKKLKEKLKPLIKVIESEDYGQQLEIVCLIDPGCFREIDELIKKETKGKGSLEVLNLKDVEEGDEKFE

SEQ ID NO: 63488 - protein, 523 aa, Homo sapiens
MVAPGLVLGLVLPLILWADRSAGIGFRFASYINNDMVLQKEPAGAVIWGFGTPGATVTVTLRQGQETIMKKVTSVKAHSDTWMVVLDPMKPGGPFEVMAQQTLEKINFTLRVHDVLFGDVWLCSGQSNMQMTVLQIFNATRELSNTAAYQSVRILSVSPIQAEQELEDLVAVDLQWSKPTSENLGHGYFKYMSAVCWLFGRHLYDTLQYPIGLIASSWGGTPIEAWSSGRSLKACGVPKQGSIPYDSVTGPSKHSVLWNAMIHPLCNMTLKGVVWYQGESNINYNTDLYNCTFPALIEDWRETFHRGSQGQTERFFPFGLVQLSSDLSKKSSDDGFPQIRWHQTADFGYVPNPKMPNTFMAVAMDLCDRDSPFGSIHPRDKQTVAYRLHLGARALAYGEKNLTFEGPLPEKIELLAHKGLLNLTYYQQIQVQKKDNKIFEISCCSDHRCKWLPASMNTVSTQSLTLAIDSCHGTVVALRYAWTTWPCEYKQCPLYHPSSALPAPPFIAFITDQGPGHQSNVAK

SEQ ID NO: 63489 - protein, 488 aa, Homo sapiens
MVLQKEPAGAVIWGFGTPGATVTVTLRQGQETIMKKVTSVKAHSDTWMVVLDPMKPGGPFEVMAQQTLEKINFTLRVHDVLFGDVWLCSGQSNMQMTVLQIFNATRELSNTAAYQSVRILSVSPIQAEQELEDLVAVDLQWSKPTSENLGHGYFKYMSAVCWLFGRHLYDTLQYPIGLIASSWGGTPIEAWSSGRSLKACGVPKQGSIPYDSVTGPSKHSVLWNAMIHPLCNMTLKGVVWYQGESNINYNTDLYNCTFPALIEDWRETFHRGSQGQTERFFPFGLVQLSSDLSKKSSDDGFPQIRWHQTADFGYVPNPKMPNTFMAVAMDLCDRDSPFGSIHPRDKQTVAYRLHLGARALAYGEKNLTFEGPLPEKIELLAHKGLLNLTYYQQIQVQKKDNKIFEISCCSDHRCKWLPASMNTVSTQSLTLAIDSCHGTVVALRYAWTTWPCEYKQCPLYHPSSALPAPPFIAFITDQGPGHQSNVAK

SEQ ID NO: 63490 - protein, 697 aa, Homo sapiens
MLLPLLLSSLLGGSQAMDGRFWIRVQESVMVPEGLCISVPCSFSYPRQDWTGSTPAYGYWFKAVTETTKGAPVATNHQSREVEMSTRGRFQLTGDPAKGNCSLVIRDAQMQDESQYFFRVERGSYVRYNFMNDGFFLKVTALTQKPDVYIPETLEPGQPVTVICVFNWAFEECPPPSFSWTGAALSSQGTKPTTSHFSVLSFTPRPQDHNTDLTCHVDFSRKGVSAQRTVRLRVAYAPRDLVISISRDNTPALEPQPQGNVPYLEAQKGQFLRLLCAADSQPPATLSWVLQNRVLSSSHPWGPRPLGLELPGVKAGDSGRYTCRAENRLGSQQRALDLSVQYPPENLRVMVSQANRTVLENLGNGTSLPVLEGQSLCLVCVTHSSPPARLSWTQRGQVLSPSQPSDPGVLELPRVQVEHEGEFTCHARHPLGSQHVSLSLSVHYSPKLLGPSCSWEAEGLHCSCSSQASPAPSLRWWLGEELLEGNSSQDSFEVTPSSAGPWANSSLSLHGGLSSGLRLRCEAWNVHGAQSGSILQLPDKKGLISTAFSNGAFLGIGITALLFLCLALIIMKILPKRRTQTETPRPRFSRHSTILDYINVVPTAGPLAQKRNQKATPNSPRTPLPPGAPSPESKKNQKKQYQLPSFPEPKSSTQAPESQESQEELHYATLNFPGVRPRPEARMPKGTQADYAEVKFQ

SEQ ID NO: 63491 - protein, 602 aa, Homo sapiens
MLLPLLLSSLLGGSQAMDGRFWIRVQESVMVPEGLCISVPCSFSYPRQDWTGSTPAYGYWFKAVTETTKGAPVATNHQSREVEMSTRGRFQLTGDPAKGNCSLVIRDAQMQDESQYFFRVERGSYVRYNFMNDGFFLKVTALTQKPDVYIPETLEPGQPVTVICVFNWAFEECPPPSFSWTGAALSSQGTKPTTSHFSVLSFTPRPQDHNTDLTCHVDFSRKGVSAQRTVRLRVAYAPRDLVISISRDNTPALEPQPQGNVPYLEAQKGQFLRLLCAADSQPPATLSWVLQNRVLSSSHPWGPRPLGLELPGVKAGDSGRYTCRAENRLGSQQRALDLSVQYPPENLRVMVSQANRTVLENLGNGTSLPVLEGQSLCLVCVTHSSPPARLSWTQRGQVLSPSQPSDPGVLELPRVQVEHEGEFTCHARHPLGSQHVSLSLSVHYKKGLISTAFSNGAFLGIGITALLFLCLALIIMKILPKRRTQTETPRPRFSRHSTILDYINVVPTAGPLAQKRNQKATPNSPRTPLPPGAPSPESKKNQKKQYQLPSFPEPKSSTQAPESQESQEELHYATLNFPGVRPRPEARMPKGTQADYAEVKFQ

SEQ ID NO: 63492 - protein, 697 aa, Homo sapiens; identical to SEQ ID NO: 63490

SEQ ID NO: 63493 - protein, 519 aa, Homo sapiens
MLLPLLLSSLLGGSQAMDGRFWIRVQESVMVPEGLCISVPCSFSYPRQDWTGSTPAYGYWFKAVTETTKGAPVATNHQSREVEMSTRGRFQLTGDPAKGNCSLVIRDAQMQDESQYFFRVERGSYVRYNFMNDGFFLKVTALTQKTVRLRVAYAPRDLVISISRDNTPALEPQPQGNVPYLEAQKGQFLRLLCAADSQPPATLSWVLQNRVLSSSHPWGPRPLGLELPGVKAGDSGRYTCRAENRLGSQQRALDLSVQYPPENLRVMVSQANRTVLENLGNGTSLPVLEGQSLCLVCVTHSSPPARLSWTQRGQVLSPSQPSDPGVLELPRVQVEHEGEFTCHARHPLGSQHVSLSLSVHYKKGLISTAFSNGAFLGIGITALLFLCLALIIMKILPKRRTQTETPRPRFSRHSTILDYINVVPTAGPLAQKRNQKATPNSPRTPLPPGAPSPESKKNQKKQYQLPSFPEPKSSTQAPESQESQEELHYATLNFPGVRPRPEARMPKGTQADYAEVKFQ

SEQ ID NO: 63494 - protein, 639 aa, Homo sapiens
MLLPLLLSSLLGGSQAMDGRFWIRVQESVMVPEGLCISVPCSFSYPRQDWTGSTPAYGYWFKAVTETTKGAPVATNHQSREVEMSTRGRFQLTGDPAKGNCSLVIRDAQMQDESQYFFRVERGSYVRYNFMNDGFFLKVTVLSFTPRPQDHNTDLTCHVDFSRKGVSAQRTVRLRVAYAPRDLVISISRDNTPALEPQPQGNVPYLEAQKGQFLRLLCAADSQPPATLSWVLQNRVLSSSHPWGPRPLGLELPGVKAGDSGRYTCRAENRLGSQQRALDLSVQYPPENLRVMVSQANRTVLENLGNGTSLPVLEGQSLCLVCVTHSSPPARLSWTQRGQVLSPSQPSDPGVLELPRVQVEHEGEFTCHARHPLGSQHVSLSLSVHYSPKLLGPSCSWEAEGLHCSCSSQASPAPSLRWWLGEELLEGNSSQDSFEVTPSSAGPWANSSLSLHGGLSSGLRLRCEAWNVHGAQSGSILQLPDKKGLISTAFSNGAFLGIGITALLFLCLALIIMKILPKRRTQTETPRPRFSRHSTILDYINVVPTAGPLAQKRNQKATPNSPRTPLPPGAPSPESKKNQKKQYQLPSFPEPKSSTQAPESQESQEELHYATLNFPGVRPRPEARMPKGTQADYAEVKFQ

SEQ ID NO: 63495 - protein, 544 aa, Homo sapiens
MLLPLLLSSLLGGSQAMDGRFWIRVQESVMVPEGLCISVPCSFSYPRQDWTGSTPAYGYWFKAVTETTKGAPVATNHQSREVEMSTRGRFQLTGDPAKGNCSLVIRDAQMQDESQYFFRVERGSYVRYNFMNDGFFLKVTVLSFTPRPQDHNTDLTCHVDFSRKGVSAQRTVRLRVAYAPRDLVISISRDNTPALEPQPQGNVPYLEAQKGQFLRLLCAADSQPPATLSWVLQNRVLSSSHPWGPRPLGLELPGVKAGDSGRYTCRAENRLGSQQRALDLSVQYPPENLRVMVSQANRTVLENLGNGTSLPVLEGQSLCLVCVTHSSPPARLSWTQRGQVLSPSQPSDPGVLELPRVQVEHEGEFTCHARHPLGSQHVSLSLSVHYKKGLISTAFSNGAFLGIGITALLFLCLALIIMKILPKRRTQTETPRPRFSRHSTILDYINVVPTAGPLAQKRNQKATPNSPRTPLPPGAPSPESKKNQKKQYQLPSFPEPKSSTQAPESQESQEELHYATLNFPGVRPRPEARMPKGTQADYAEVKFQ

SEQ ID NO: 63496 - protein, 454 aa, Homo sapiens
MLLPLLLSSLLGGSQAMDGRFWIRVQESVMVPEGLCISVPCSFSYPRQDWTGSTPAYGYWFKAVTETTKGAPVATNHQSREVEMSTRGRFQLTGDPAKGNCSLVIRDAQMQDESQYFFRVERGSYVRYNFMNDGFFLKVTVLSFTPRPQDHNTDLTCHVDFSRKGVSAQRTVRLRVAYAPRDLVISISRDNTPDPPENLRVMVSQANRTVLENLGNGTSLPVLEGQSLCLVCVTHSSPPARLSWTQRGQVLSPSQPSDPGVLELPRVQVEHEGEFTCHARHPLGSQHVSLSLSVHYKKGLISTAFSNGAFLGIGITALLFLCLALIIMKILPKRRTQTETPRPRFSRHSTILDYINVVPTAGPLAQKRNQKATPNSPRTPLPPGAPSPESKKNQKKQYQLPSFPEPKSSTQAPESQESQEELHYATLNFPGVRPRPEARMPKGTQADYAEVKFQ

SEQ ID NO: 63497 - protein, 554 aa, Homo sapiens
MLLPLLLSSLLGGSQAMDGRFWIRVQESVMVPEGLCISVPCSFSYPRQDWTGSTPAYGYWFKAVTETTKGAPVATNHQSREVEMSTRGRFQLTGDPAKGNCSLVIRDAQMQDESQYFFRVERGSYVRYNFMNDGFFLKVTGTKPTTSHFSVLSFTPRPQDHNTDLTCHVDFSRKGVSAQRTVRLRVAYAPRDLVISISRDNTPALEPQPQGNVPYLEAQKGQFLRLLCAADSQPPATLSWVLQNRVLSSSHPWGPRPLGLELPGVKAGDSGRYTCRAENRLGSQQRALDLSVQYPPENLRVMVSQANRTVLENLGNGTSLPVLEGQSLCLVCVTHSSPPARLSWTQRGQVLSPSQPSDPGVLELPRVQVEHEGEFTCHARHPLGSQHVSLSLSVHYKKGLISTAFSNGAFLGIGITALLFLCLALIIMKILPKRRTQTETPRPRFSRHSTILDYINVVPTAGPLAQKRNQKATPNSPRTPLPPGAPSPESKKNQKKQYQLPSFPEPKSSTQAPESQESQEELHYATLNFPGVRPRPEARMPKGTQADYAEVKFQ

SEQ ID NO: 63498 - protein, 698 aa, Homo sapiens
MVPGQAQPQSPEMLLLPLLLPVLGAGSLNKDPSYSLQVQRQVPVPEGLCVIVSCNLSYPRDGWDESTAAYGYWFKGRTSPKTGAPVATNNQSREVEMSTRDRFQLTGDPGKGSCSLVIRDAQREDEAWYFFRVERGSRVRHSFLSNAFFLKVTALTKKPDVYIPETLEPGQPVTVICVFNWAFKKCPAPSFSWTGAALSPRRTRPSTSHFSVLSFTPSPQDHDTDLTCHVDFSRKGVSAQRTVRLRVAYAPKDLIISISHDNTSALELQGNVIYLEVQKGQFLRLLCAADSQPPATLSWVLQDRVLSSSHPWGPRTLGLELRGVRAGDSGRYTCRAENRLGSQQQALDLSVQYPPENLRVMVSQANRTVLENLGNGTSLPVLEGQSLRLVCVTHSSPPARLSWTRWGQTVGPSQPSDPGVLELPPIQMEHEGEFTCHAQHPLGSQHVSLSLSVHYPPQLLGPSCSWEAEGLHCSCSSQASPAPSLRWWLGEELLEGNSSQGSFEVTPSSAGPWANSSLSLHGGLSSGLRLRCKAWNVHGAQSGSVFQLLPGKLEHGGGLGLGAALGAGVAALLAFCSCLVVFRVKICRKEARKRAAAEQDVPSTLGPISQGHQHECSAGSSQDHPPPGAATYTPGKGEEQELHYASLSFQGLRLWEPADQEAPSTTEYSEIKIHTGQPLRGPGFGLQLEREMSGMVPK

SEQ ID NO: 63499 - protein, 602 aa, Homo sapiens
MVPGQAQPQSPEMLLLPLLLPVLGAGSLNKDPSYSLQVQRQVPVPEGLCVIVSCNLSYPRDGWDESTAAYGYWFKGRTSPKTGAPVATNNQSREVEMSTRDRFQLTGDPGKGSCSLVIRDAQREDEAWYFFRVERGSRVRHSFLSNAFFLKVTALTKKPDVYIPETLEPGQPVTVICVFNWAFKKCPAPSFSWTGAALSPRRTRPSTSHFSVLSFTPSPQDHDTDLTCHVDFSRKGVSAQRTVRLRVAYAPKDLIISISHDNTSALELQGNVIYLEVQKGQFLRLLCAADSQPPATLSWVLQDRVLSSSHPWGPRTLGLELRGVRAGDSGRYTCRAENRLGSQQQALDLSVQYPPENLRVMVSQANRTVLENLGNGTSLPVLEGQSLRLVCVTHSSPPARLSWTRWGQTVGPSQPSDPGVLELPPIQMEHEGEFTCHAQHPLGSQHVSLSLSVHWKLEHGGGLGLGAALGAGVAALLAFCSCLVVFRVKICRKEARKRAAAEQDVPSTLGPISQGHQHECSAGSSQDHPPPGAATYTPGKGEEQELHYASLSFQGLRLWEPADQEAPSTTEYSEIKIHTGQPLRGPGFGLQLEREMSGMVPK

SEQ ID NO: 63500 - protein, 602 aa, Homo sapiens; identical to SEQ ID NO: 63499

SEQ ID NO: 63501 - protein, 595 aa, Homo sapiens
MLLLLLLLPPLLCGRVGAKEQKDYLLTMQKSVTVQEGLCVSVLCSFSYPQNGWTASDPVHGYWFRAGDHVSRNIPVATNNPARAVQEETRDRFHLLGDPQNKDCTLSIRDTRESDAGTYVFCVERGNMKWNYKYDQLSVNVTASQDLLSRYRLEVPESVTVQEGLCVSVPCSVLYPHYNWTASSPVYGSWFKEGADIPWDIPVATNTPSGKVQEDTHGRFLLLGDPQTNNCSLSIRDARKGDSGKYYFQVERGSRKWNYIYDKLSVHVTALTHMPTFSIPGTLESGHPRNLTCSVPWACEQGTPPTITWMGASVSSLDPTITRSSMLSLIPQPQDHGTSLTCQVTLPGAGVTMTRAVRLNISYPPQNLTMTVFQGDGTASTTLRNGSALSVLEGQSLHLVCAVDSNPPARLSWTWGSLTLSPSQSSNLGVLELPRVHVKDEGEFTCRAQNPLGSQHISLSLSLQNEYTGKMRPISGVTLGAFGGAGATALVFLYFCIIFVVVRSCRKKSARPAVGVGDTGMEDANAVRGSASQGPLIESPADDSPPHHAPPALATPSPEEGEIQYASLSFHKARPQYPQEQEAIGYEYSEINIPK

SEQ ID NO: 63502 - protein, 551 aa, Homo sapiens
MLPLLLLPLLWGGSLQEKPVYELQVQKSVTVQEGLCVLVPCSFSYPWRSWYSSPPLYVYWFRDGEIPYYAEVVATNNPDRRVKPETQGRFRLLGDVQKKNCSLSIGDARMEDTGSYFFRVERGRDVKYSYQQNKLNLEVTALIEKPDIHFLEPLESGRPTRLSCSLPGSCEAGPPLTFSWTGNALSPLDPETTRSSELTLTPRPEDHGTNLTCQMKRQGAQVTTERTVQLNVSYAPQTITIFRNGIALEILQNTSYLPVLEGQALRLLCDAPSNPPAHLSWFQGSPALNATPISNTGILELRRVRSAEEGGFTCRAQHPLGFLQIFLNLSVYSLPQLLGPSCSWEAEGLHCRCSFRARPAPSLCWRLEEKPLEGNSSQGSFKVNSSSAGPWANSSLILHGGLSSDLKVSCKAWNIYGSQSGSVLLLQGRSNLGTGVVPAALGGAGVMALLCICLCLIFFLIVKARRKQAAGRPEKMDDEDPIMGTITSGSRKKPWPDSPGDQASPPGDAPPLEEQKELHYASLSFSEMKSREPKDQEAPSTTEYSEIKTSK

SEQ ID NO: 63503 - protein, 551 aa, Homo sapiens; identical to SEQ ID NO: 63502

SEQ ID NO: 63504 - protein, 353 aa, Homo sapiens
MQGAQEASASEMLPLLLPLLWAGALAQERRFQLEGPESLTVQEGLCVLVPCRLPTTLPASYYGYGYWFLEGADVPVATNDPDEEVQEETRGRFHLLWDPRRKNCSLSIRDARRRDNAAYFFRLKSKWMKYGYTSSKLSVRVMALTHRPNISIPGTLESGHPSNLTCSVPWVCEQGTPPIFSWMSAAPTSLGPRTTQSSVLTITPRPQDHSTNLTCQVTFPGAGVTMERTIQLNVSYAPQKVAISIFQGNSAAFKILQNTSSLPVLEGQALRLLCDADGNPPAHLSWFQGFPALNATPISNTGVLELPQVGSAEEGDFTCRAQHPLGSLQISLSLFVHWSSAPVPDRHSFRPPC

SEQ ID NO: 63505 - protein, 426 aa, Homo sapiens
MLPLLLPLLWAGALAQERRFQLEGPESLTVQEGLCVLVPCRLPTTLPASYYGYGYWFLEGADVPVATNDPDEEVQEETRGRFHLLWDPRRKNCSLSIRDARRRDNAAYFFRLKSKWMKYGYTSSKLSVRVMALTHRPNISIPGTLESGHPSNLTCSVPWVCEQGTPPIFSWMSAAPTSLGPRTTQSSVLTITPRPQDHSTNLTCQVTFPGAGVTMERTIQLNVSSFKILQNTSSLPVLEGQALRLLCDADGNPPAHLSWFQGFPALNATPISNTGVLELPQVGSAEEGDFTCRAQHPLGSLQISLSLFVHWKPEGRAGGVLGAVWGASITTLVFLCVCFIFRVKTRRKKAAQPVQNTDDVNPVMVSGSRGHQHQFQTGIVSDHPAEAGPISEDEQELHYAVLHFHKVQPQEPKVTDTEYSEIKIHK

SEQ ID NO: 63506 - protein, 437 aa, Homo sapiens
MQGAQEASASEMLPLLLPLLWAGALAQERRFQLEGPESLTVQEGLCVLVPCRLPTTLPASYYGYGYWFLEGADVPVATNDPDEEVQEETRGRFHLLWDPRRKNCSLSIRDARRRDNAAYFFRLKSKWMKYGYTSSKLSVRVMALTHRPNISIPGTLESGHPSNLTCSVPWVCEQGTPPIFSWMSAAPTSLGPRTTQSSVLTITPRPQDHSTNLTCQVTFPGAGVTMERTIQLNVSSFKILQNTSSLPVLEGQALRLLCDADGNPPAHLSWFQGFPALNATPISNTGVLELPQVGSAEEGDFTCRAQHPLGSLQISLSLFVHWKPEGRAGGVLGAVWGASITTLVFLCVCFIFRVKTRRKKAAQPVQNTDDVNPVMVSGSRGHQHQFQTGIVSDHPAEAGPISEDEQELHYAVLHFHKVQPQEPKVTDTEYSEIKIHK

SEQ ID NO: 63507 - protein, 453 aa, Homo sapiens
MQGAQEASASEMLPLLLPLLWAGALAQERRFQLEGPESLTVQEGLCVLVPCRLPTTLPASYYGYGYWFLEGADVPVATNDPDEEVQEETRGRFHLLWDPRRKNCSLSIRDARRRDNAAYFFRLKSKWMKYGYTSSKLSVRVMALTHRPNISIPGTLESGHPSNLTCSVPWVCEQGTPPIFSWMSAAPTSLGPRTTQSSVLTITPRPQDHSTNLTCQVTFPGAGVTMERTIQLNVSYAPQKVAISIFQGNSAAFKILQNTSSLPVLEGQALRLLCDADGNPPAHLSWFQGFPALNATPISNTGVLELPQVGSAEEGDFTCRAQHPLGSLQISLSLFVHWKPEGRAGGVLGAVWGASITTLVFLCVCFIFRVKTRRKKAAQPVQNTDDVNPVMVSGSRGHQHQFQTGIVSDHPAEAGPISEDEQELHYAVLHFHKVQPQEPKVTDTEYSEIKIHK

SEQ ID NO: 63508 - protein, 389 aa, Homo sapiens
MQGAQEASASEMLPLLLPLLWAGALAQERRFQLEGPESLTVQEGLCVLVPCRLPTTLPASYYGYGYWFLEGADVPVATNDPDEEVQEETRGRFHLLWDPRRKNCSLSIRDARRRDNAAYFFRLKSKWMKYGYTSSKLSVRVMALTHRPNISIPGTLESGHPSNLTCSVPWVCEQGTPPIFSWMSAAPTSLGPRTTQSSVLTITPRPQDHSTNLTCQVTFPGAGVTMERTIQLNVSWMLRRPPLSTPDAPQKVAISIFQGNSAAFKILQNTSSLPVLEGQALRLLCDADGNPPAHLSWFQGFPALNATPISNTGVLELPQVGSAEEGDFTCRAQHPLGSLQISLSLFVHWKPEGRAGGVLGAVWGASITTLVFLCVCFIFRVISTSSRQA

SEQ ID NO: 63509 - protein, 401 aa, Homo sapiens
MQGAQEASASEMLPLLLPLLWAASYYGYGYWFLEGADVPVATNDPDEEVQEETRGRFHLLWDPRRKNCSLSIRDARRRDNAAYFFRLKSKWMKYGYTSSKLSVRVMALTHRPNISIPGTLESGHPSNLTCSVPWVCEQGTPPIFSWMSAAPTSLGPRTTQSSVLTITPRPQDHSTNLTCQVTFPGAGVTMERTIQLNVSSFKILQNTSSLPVLEGQALRLLCDADGNPPAHLSWFQGFPALNATPISNTGVLELPQVGSAEEGDFTCRAQHPLGSLQISLSLFVHWKPEGRAGGVLGAVWGASITTLVFLCVCFIFRVKTRRKKAAQPVQNTDDVNPVMVSGSRGHQHQFQTGIVSDHPAEAGPISEDEQELHYAVLHFHKVQPQEPKVTDTEYSEIKIHK

SEQ ID NO: 63510 - protein, 374 aa, Homo sapiens
MLLLLLLPLLWGRERVEGQKSNRKDYSLTMQSSVTVQEGMCVHVRCSFSYPVDSQTDSDPVHGYWFRAGNDISWKAPVATNNPAWAVQEETRDRFHLLGDPQTKNCTLSIRDARMSDAGRYFFRMEKGNIKWNYKYDQLSVNVTDPPQNLTVTVFQGEGTASTALGNSSSLSVLEGQSLRLVCAVDSNPPARLSWTWRSLTLYPSQPSNPLVLELQVHLGDEGEFTCRAQNSLGSQHVSLNLSLQQEYTGKMRPVSGVLLGAVGGAGATALVFLSFCVIFIVVRSCRKKSARPAADVGDIGMKDANTIRGSASQGNLTESWADDNPRHHGLAAHSSGEEREIQYAPLSFHKGEPQDLSGQEATNNEYSEIKIPK

SEQ ID NO: 63511 - protein, 467 aa, Homo sapiens
MLLLLLLPLLWGRERVEGQKSNRKDYSLTMQSSVTVQEGMCVHVRCSFSYPVDSQTDSDPVHGYWFRAGNDISWKAPVATNNPAWAVQEETRDRFHLLGDPQTKNCTLSIRDARMSDAGRYFFRMEKGNIKWNYKYDQLSVNVTALTHRPNILIPGTLESGCFQNLTCSVPWACEQGTPPMISWMGTSVSPLHPSTTRSSVLTLIPQPQHHGTSLTCQVTLPGAGVTTNRTIQLNVSYPPQNLTVTVFQGEGTASTALGNSSSLSVLEGQSLRLVCAVDSNPPARLSWTWRSLTLYPSQPSNPLVLELQVHLGDEGEFTCRAQNSLGSQHVSLNLSLQQEYTGKMRPVSGVLLGAVGGAGATALVFLSFCVIFIVVRSCRKKSARPAADVGDIGMKDANTIRGSASQGNLTESWADDNPRHHGLAAHSSGEEREIQYAPLSFHKGEPQDLSGQEATNNEYSEIKIPK

SEQ ID NO: 63512 - protein, 145 aa, Homo sapiens
MLLLLLLPLLWGRERVEGQKSNRKDYSLTMQSSVTVQEGMCVHVRCSFSYPVDSQTDSDPVHGYWFRAGNDISWKAPVATNNPAWAVQEETRDRFHLLGDPQTKNCTLSIRDARMSDAGRYFFRMEKGNIKWNYKYDQLSVNVTE

SEQ ID NO: 63513 - protein, 499 aa, Homo sapiens
MLLLLLLLPLLWGTKGMEGDRQYGDGYLLQVQELVTVQEGLCVHVPCSFSYPQDGWTDSDPVHGYWFRAGDRPYQDAPVATNNPDREVQAETQGRFQLLGDIWSNDCSLSIRDARKRDKGSYFFRLERGSMKWSYKSQLNYKTKQLSVFVTALTHRPDILILGTLESGHSRNLTCSVPWACKQGTPPMISWIGASVSSPGPTTARSSVLTLTPKPQDHGTSLTCQVTLPGTGVTTTSTVRLDVSYPPWNLTMTVFQGDATASTALGNGSSLSVLEGQSLRLVCAVNSNPPARLSWTRGSLTLCPSRSSNPGLLELPRVHVRDEGEFTCRAQNAQGSQHISLSLSLQNEGTGTSRPVSQVTLAAVGGAGATALAFLSFCIIFIIVRSCRKKSARPAAGVGDTGMEDAKAIRGSASQGPLTESWKDGNPLKKPPPAVAPSSGEEGELHYATLSFHKVKPQDPQGQEATDSEYSEIKIHKRETAETQACLRNHNPSSKEVRG

SEQ ID NO: 63514 - protein, 406 aa, Homo sapiens
MLLLLLLLPLLWGTKGMEGDRQYGDGYLLQVQELVTVQEGLCVHVPCSFSYPQDGWTDSDPVHGYWFRAGDRPYQDAPVATNNPDREVQAETQGRFQLLGDIWSNDCSLSIRDARKRDKGSYFFRLERGSMKWSYKSQLNYKTKQLSVFVTDPPWNLTMTVFQGDATASTALGNGSSLSVLEGQSLRLVCAVNSNPPARLSWTRGSLTLCPSRSSNPGLLELPRVHVRDEGEFTCRAQNAQGSQHISLSLSLQNEGTGTSRPVSQVTLAAVGGAGATALAFLSFCIIFIIVRSCRKKSARPAAGVGDTGMEDAKAIRGSASQGPLTESWKDGNPLKKPPPAVAPSSGEEGELHYATLSFHKVKPQDPQGQEATDSEYSEIKIHKRETAETQACLRNHNPSSKEVRG

SEQ ID NO: 63515 - protein, 390 aa, Homo sapiens
MLLLLLLLPLLWGTKGMEGDRQYGDGYLLQVQELVTVQEGLCVHVPCSFSYPQDGWTDSDPVHGYWFRAGDRPYQDAPVATNNPDREVQAETQGRFQLLGDIWSNDCSLSIRDARKRDKGSYFFRLERGSMKWSYKSQLNYKTKQLSVFVTASTALGNGSSLSVLEGQSLRLVCAVNSNPPARLSWTRGSLTLCPSRSSNPGLLELPRVHVRDEGEFTCRAQNAQGSQHISLSLSLQNEGTGTSRPVSQVTLAAVGGAGATALAFLSFCIIFIIVRSCRKKSARPAAGVGDTGMEDAKAIRGSASQGPLTESWKDGNPLKKPPPAVAPSSGEEGELHYATLSFHKVKPQDPQGQEATDSEYSEIKIHKRETAETQACLRNHNPSSKEVRG

SEQ ID NO: 63516 - protein, 463 aa, Homo sapiens
MLLLLLPLLWGRERAEGQTSKLLTMQSSVTVQEGLCVHVPCSFSYPSHGWIYPGPVVHGYWFREGANTDQDAPVATNNPARAVWEETRDRFHLLGDPHTKNCTLSIRDARRSDAGRYFFRMEKGSIKWNYKHHRLSVNVTALTHRPNILIPGTLESGCPQNLTCSVPWACEQGTPPMISWIGTSVSPLDPSTTRSSVLTLIPQPQDHGTSLTCQVTFPGASVTTNKTVHLNVSYPPQNLTMTVFQGDGTVSTVLGNGSSLSLPEGQSLRLVCAVDAVDSNPPARLSLSWRGLTLCPSQPSNPGVLELPWVHLRDAAEFTCRAQNPLGSQQVYLNVSLQSKATSGVTQGVVGGAGATALVFLSFCVIFVVVRSCRKKSARPAAGVGDTGIEDANAVRGSASQGPLTEPWAEDSPPDQPPPASARSSVGEGELQYASLSFQMVKPWDSRGQEATDTEYSEIKIHR

SEQ ID NO: 63517 - protein, 479 aa, Homo sapiens
MLLLLLPLLWGRERAEGQTSKLLTMQSSVTVQEGLCVHVPCSFSYPSHGWIYPGPVVHGYWFREGANTDQDAPVATNNPARAVWEETRDRFHLLGDPHTKNCTLSIRDARRSDAGRYFFRMEKGSIKWNYKHHRLSVNVTALTHRPNILIPGTLESGCPQNLTCSVPWACEQGTPPMISWIGTSVSPLDPSTTRSSVLTLIPQPQDHGTSLTCQVTFPGASVTTNKTVHLNVSYPPQNLTMTVFQGDGTVSTVLGNGSSLSLPEGQSLRLVCAVDAVDSNPPARLSLSWRGLTLCPSQPSNPGVLELPWVHLRDAAEFTCRAQNPLGSQQVYLNVSLQSKATSGVTQGVVGGAGATALVFLSFCVIFVVVRSCRKKSARPAAGVGDTGIEDANAVRGSASQILNHFIGFPTFLGLGFEFLLNLRDLCCHPDSEFYVYHFSHFRLIKNIAGEIVWSLEGKILWLLDVSDFFHWFFLICVG

SEQ ID NO: 63518 - protein, 415 aa, Homo sapiens
MTGERPSTALPDRRWGPRILGFWGGCRVWVFAAIFLLLSLAASWSKAENDFGLVQPLVTMEQLLWVSGRQIGSVDTFRIPLITATPRGTLLAFAEARKMSSSDEGAKFIALRRSMDQGSTWSPTAFIVNDGDVPDGLNLGAVVSDVETGVVFLFYSLCAHKAGCQVASTMLVWSKDDGVSWSTPRNLSLDIGTEVFAPGPGSGIQKQREPRKGRLIVCGHGTLERDGVFCLLSDDHGASWRYGSGVSGIPYGQPKQENDFNPDECQPYELPDGSVVINARNQNNYHCHCRIVLRSYDACDTLRPRDVTFDPELVDPVVAAGAVVTSSGIVFFSNPAHPEFRVNLTLRWSFSNGTSWRKETVQLWPGPSGYSSLATLEGSMDGEEQAPQLYVLYEKGRNHYTESISVAKISVYGTL

SEQ ID NO: 63519 - protein, 415 aa, Homo sapiens; identical to SEQ ID NO: 63518

SEQ ID NO: 63520 - protein, 415 aa, Homo sapiens; identical to SEQ ID NO: 63518

SEQ ID NO: 63521 - protein, 415 aa, Homo sapiens; identical to SEQ ID NO: 63518

SEQ ID NO: 63522 - protein, 415 aa, Homo sapiens; identical to SEQ ID NO: 63518

SEQ ID NO: 63523 - protein, 415 aa, Homo sapiens; identical to SEQ ID NO: 63518

SEQ ID NO: 63524 - protein, 415 aa, Homo sapiens; identical to SEQ ID NO: 63518

SEQ ID NO: 63525 - protein, 415 aa, Homo sapiens; identical to SEQ ID NO: 63518

SEQ ID NO: 63526 - protein, 380 aa, Homo sapiens
MASLPVLQKESVFQSGAHAYRIPALLYLPGQQSLLAFAEQRASKKDEHAELIVLRRGDYDAPTHQVQWQAQEVVAQARLDGHRSMNPCPLYDAQTGTLFLFFIAIPGQVTEQQQLQTRANVTRLCQVTSTDHGRTWSSPRDLTDAAIGPAYREWSTFAVGPGHCLQLHDRARSLVVPAYAYRKLHPIQRPIPSAFCFLSHDHGRTWARGHFVAQDTLECQVAEVETGEQRVVTLNARSHLRARVQAQSTNDGLDFQESQLVKKLVEPPPQGCQGSVISFPSPRSGPGSPAQWLLYTHPTHSWQRADLGAYLNPRPPAPEAWSEPVLLAKGSCAYSDLQSMGTGPDGSPLFGCLYEANDYEEIVFLMFTLKQAFPAEYLPQ

SEQ ID NO: 63527 - protein, 461 aa, Homo sapiens
MRPADLPPRPMEESPASSSAPTETEEPGSSAEVMEEVTTCSFNSPLFRQEDDRGITYRIPALLYIPPTHTFLAFAEKRSTRRDEDALHLVLRRGLRIGQLVQWGPLKPLMEATLPGHRTMNPCPVWEQKSGCVFLFFICVRGHVTERQQIVSGRNAARLCFIYSQDAGCSWSEVRDLTEEVIGSELKHWATFAVGPGHGIQLQSGRLVIPAYTYYIPSWFFCFQLPCKTRPHSLMIYSDDLGVTWHHGRLIRPMVTVECEVAEVTGRAGHPVLYCSARTPNRCRAEALSTDHGEGFQRLALSRQLCEPPHGCQGSVVSFRPLEIPHRCQDSSSKDAPTIQQSSPGSSLRLEEEAGTPSESWLLYSHPTSRKQRVDLGIYLNQTPLEAACWSRPWILHCGPCGYSDLAALEEEGLFGCLFECGTKQECEQIAFRLFTHREILSHLQGDCTSPGRNPSQFKSN

SEQ ID NO: 63528 - protein, 461 aa, Homo sapiens; identical to SEQ ID NO: 63527

SEQ ID NO: 63529 - protein, 428 aa, Homo sapiens
MEEVTTCSFNSPLFRQEDDRGITYRIPALLYIPPTHTFLAFAEKRSTRRDEDALHLVLRRGLRIGQLVQWGPLKPLMEATLPGHRTMNPCPVWEQKSGCVFLFFICVRGHVTERQQIVSGRNAARLCFIYSQDAGCSWSEVRDLTEEVIGSELKHWATFAVGPGHGIQLQSGRLVIPAYTYYIPSWFFCFQLPCKTRPHSLMIYSDDLGVTWHHGRLIRPMVTVECEVAEVTGRAGHPVLYCSARTPNRCRAEALSTDHGEGFQRLALSRQLCEPPHGCQGSVVSFRPLEIPHRCQDSSSKDAPTIQQSSPGSSLRLEEEAGTPSESWLLYSHPTSRKQRVDLGIYLNQTPLEAACWSRPWILHCGPCGYSDLAALEEEGLFGCLFECGTKQECEQIAFRLFTHREILSHLQGDCTSPGRNPSQFKSN

SEQ ID NO: 63530 - protein, 352 aa, Homo sapiens
MEATLPGHRTMNPCPVWEQKSGCVFLFFICVRGHVTERQQIVSGRNAARLCFIYSQDAGCSWSEVRDLTEEVIGSELKHWATFAVGPGHGIQLQSGRLVIPAYTYYIPSWFFCFQLPCKTRPHSLMIYSDDLGVTWHHGRLIRPMVTVECEVAEVTGRAGHPVLYCSARTPNRCRAEALSTDHGEGFQRLALSRQLCEPPHGCQGSVVSFRPLEIPHRCQDSSSKDAPTIQQSSPGSSLRLEEEAGTPSESWLLYSHPTSRKQRVDLGIYLNQTPLEAACWSRPWILHCGPCGYSDLAALEEEGLFGCLFECGTKQECEQIAFRLFTHREILSHLQGDCTSPGRNPSQFKSN

SEQ ID NO: 63531 - protein, 400 aa, Homo sapiens
MATLLLLLGVLVVSPDALGSTTAVQTPTSGEPLVSTSEPLSSKMYTTSITSDPKADSTGDQTSALPPSTSINEGSPLWTSIGASTGSPLPEPTTYQEVSIKMSSVPQETPHATSHPAVPITANSLGSHTVTGGTITTNSPETSSRTSGAPVTTAASSLETSRGTSGPPLTMATVSLETSKGTSGPPVTMATDSLETSTGTTGPPVTMTTGSLEPSSGASGPQVSSVKLSTMMSPTTSTNASTVPFRNPDENSRGMLPVAVLVALLAVIVLVALLLLWRRRQKRRTGALVLSRGGKRNGVVDAWAGPAQVPEEGAVTVTVGGSGGDKGSGFPDGEGSSRRPTLTTFFGRRKSRQGSLAMEELKSGSGPSLKGEEEPLVASEDGAVDAPAPDEPEGGDGAAP

SEQ ID NO: 63532 - protein, 400 aa, Homo sapiens; identical to SEQ ID NO: 63531

SEQ ID NO: 63533 - protein, 355 aa, Homo sapiens
MATLLLLLGVLVVSPDALGSTTAVQTPTSGEPLVSTSEPLSSKMYTTSITSDPKADSTGDQTSALPPSTSINEGSPLWTSIGASTGSPLPEPTTYQEVSIKMSSVPQETPHATSHPAVPITANSLGSHTVTGGTITTNSPETSSRTSGAPVTTAASSLETSRGTSGPPLTMATVSLETSKGTSGPPVTMATDSLETSTGTTGPPVTMTTGSLEPSSGASGPQVSSVKLSTMMSPTTSTNASTVPFRNPDENSRGMLPVAVLVALLAVIVLVALLLLWRRRQKRRTGALVLSRGGKRNGVVDAWAGPAQVPEEGAVTVTVGGSGGDKGSGFPDGEGSSRRPTLTTFFGRRKSRQGS

SEQ ID NO: 63534 - protein, 223 aa, Homo sapiens
MQWAVGRRWAWAALLLAVAAVLTQVVWLWLGTQSFVFQREEIAQLARQYAGLDHELAFSRLIVELRRLHPGHVLPDEELQWVFVNAGGWMGAMCLLHASLSEYVLLFGTALGSRGHSGRYWAEISDTIISGTFHQWREGTTKSEVFYPGETVVHGPGEATAVEWGPNTWMVEYGRGVIPSTLAFALADTVFSTQDFLTLFYTLRSYARGLRLELTTYLFGQDP

SEQ ID NO: 63535 - protein, 189 aa, Homo sapiens
MQWAVGRRWAWAALLLAVAAVLTQVVWLWLGLDHELAFSRLIEELQWVFVNAGGWMGAMCLLHASLSEYVLLFGTALGSRGHSGRYWAEISDTIISGTFHQWREGTTKSEVFYPGETVVHGPGEATAVEWGPNTWMVEYGRGVIPSTLAFALADTVFSTQDFLTLFYTLRSYARGLRLELTTYLFGQDP

SEQ ID NO: 63536 - protein, 134 aa, Homo sapiens
MGAMCLLHASLSEYVLLFGTALGSRGHSGRYWAEISDTIISGTFHQWREGTTKSEVFYPGETVVHGPGEATAVEWGPNTWMVEYGRGVIPSTLAFALADTVFSTQDFLTLFYTLRSYARGLRLELTTYLFGQDP

SEQ ID NO: 63537 - protein, 192 aa, Homo sapiens
MQWAVGRRWAWAALLLAVAAVLTQVVWLWLGTQSFVFQREEIAQLARQYAGLDHELAFSRLIVELRRLHPGHVLPDEELQWVFVNAGGWMGAMCLLHASLSEYVLLFGTALGSRGHSGETVVHGPGEATAVEWGPNTWMVEYGRGVIPSTLAFALADTVFSTQDFLTLFYTLRSYARGLRLELTTYLFGQDP

SEQ ID NO: 63538 - protein, 971 aa, Homo sapiens
MGVAGRNRPGAAWAVLLLLLLLPPLLLLAGAVPPGRGRAAGPQEDVDECAQGLDDCHADALCQNTPTSYKCSCKPGYQGEGRQCEDIDECGNELNGGCVHDCLNIPGNYRCTCFDGFMLAHDGHNCLDVDECLENNGGCQHTCVNVMGSYECCCKEGFFLSDNQHTCIHRSEEGLSCMNKDHGCSHICKEAPRGSVACECRPGFELAKNQRDCILTCNHGNGGCQHSCDDTADGPECSCHPQYKMHTDGRSCLEREDTVLEVTESNTTSVVDGDKRVKRRLLMETCAVNNGGCDRTCKDTSTGVHCSCPVGFTLQLDGKTCKDIDECQTRNGGCDHFCKNIVGSFDCGCKKGFKLLTDEKSCQDVDECSLDRTCDHSCINHPGTFACACNRGYTLYGFTHCGDTNECSINNGGCQQVCVNTVGSYECQCHPGYKLHWNKKDCVEVKGLLPTSVSPRVSLHCGKSGGGDGCFLRCHSGIHLSSGLQGAYSVTCGSSSPLRNKQQKSNDSAFGDVTTIRTSVTFKLNEGKCSLKNAELFPEGLRPALPEKHSSVKESFRYVNLTCSSGKQVPGAPGRPSTPKEMFITVEFELETNQKEVTASCDLSCIVKRTEKRLRKAIRTLRKAVHREQFHLQLSGMNLDVAKKPPRTSERQAESCGVGQGHAENQCGLCQPGEYSADGFAPCHLCALGTFQPEAGRTSCFPCGGGLATKHQGATSFQDCETRVQCSPGHFYNTTTHRCIRCPVGTYQPEFGKNNCVSCPGNTTTDFDGSTNITQCKNRRCGGELGDFTGYIESPNYPGNYPANTECTWTINPPPKRRILIVVPEIFLPIEDDCGDYLVMRKTSSSNSVTTYETCQTYERPIAFTSRSKKLWIQFKSNEGNSARGFQVPYVTYDEDYQELIEDIVRDGRLYASENHQEILKDKKLIKALFDVLAHPQNYFKYTAQESREMFPRSFIRLLRSKVSRFLRPYK

SEQ ID NO: 63539 - protein, 347 aa, Homo sapiens
MGAAAVRWHLCVLLALGTRGRLAGGSGLPGSVDVDECSEGTDDCHIDAICQNTPKSYKCLCKPGYKGEGKQCEDIDECENDYYNGGCVHECINIPGNYRCTCFDGFMLAHDGHNCLDVDECQDNNGGCQQICVNAMGSYECQCHSGFFLSDNQHTCIHRSNEGMNCMNKDHGCAHICRETPKGGVACDCRPGFDLAQNQKDCTLTCNYGNGGCQHSCEDTDTGPTCGCHQKYALHSDGRTCIEKDEAAIERSQFNATSVADVDKRVKRRLLMETCAVNNGGCDRTCKDTATGVRCSCPVGFTLQPDGKTCKGQHVELCGCPCLYWPGQEPPCACIAGPRAGLNGGHV

SEQ ID NO: 63540 - protein, 988 aa, Homo sapiens
MGAAAVRWHLCVLLALGTRGRLAGGSGLPGSVDVDECSEGTDDCHIDAICQNTPKSYKCLCKPGYKGEGKQCEDIDECENDYYNGGCVHECINIPGNYRCTCFDGFMLAHDGHNCLDVDECQDNNGGCQQICVNAMGSYECQCHSGFFLSDNQHTCIHRSNEGMNCMNKDHGCAHICRETPKGGVACDCRPGFDLAQNQKDCTLTCNYGNGGCQHSCEDTDTGPTCGCHQKYALHSDGRTCIETCAVNNGGCDRTCKDTATGVRCSCPVGFTLQPDGKTCKDINECLVNNGGCDHFCRNTVGSFECGCRKGYKLLTDERTCQDIDECSFERTCDHICINSPGSFQCLCHRGYILYGTTHCGDVDECSMSNGSCDQGCVNTKGSYECVCPPGRRLHWNGKDCVETGKCLSRAKTSPRAQLSCSKAGGVESCFLSCPAHTLFVPDSENSYVLSCGVPGPQGKALQKRNGTSSGLGPSCSDAPTTPIKQKARFKIRDAKCHLRPHSQARAKETARQPLLDHCHVTFVTLKCDSSKKRRRGRKSPSKEVSHITAEFEIETKMEEASDTCEADCLRKRAEQSLQAAIKTLRKSIGRQQFYVQVSGTEYEVAQRPAKALEGQGACGAGQVLQDSKCVACGPGTHFGGELGQCVSCMPGTYQDMEGQLSCTPCPSSDGLGLPGARNVSECGGQCSPGFFSADGFKPCQACPVGTYQPEPGRTGCFPCGGGLLTKHEGTTSFQDCEAKVHCSPGHHYNTTTHRCIRCPVGTYQPEFGQNHCITCPGNTSTDFDGSTNVTHCKNQHCGGELGDYTGYIESPNYPGDYPANAECVWHIAPPPKRRILIVVPEIFLPIEDECGDVLVMRKSASPTSITTYETCQTYERPIAFTSRSRKLWIQFKSNEGNSGKGFQVPYVTYDEDYQQLIEDIVRDGRLYASENHQEILKDKKLIKALFDVLAHPQNYFKYTAQESKEMFPRSFIKLLRSKVSRFLRPYK

SEQ ID NO: 63541 - protein, 618 aa, Homo sapiens
METEAASTAVRTQTQAPRVVATRSTPSTQTVARASRRAQSITEAATGHARTQPLACDAAAPLDSHCSRTGRHAKTSTSAWSTTEAATTSAATPWAASSAAAGRATSCSPTSAPARTSTSAPSSGPVTTSASTPQARAKETARQPLLDHCHVTFVTLKCDSSKKRRRGRKSPSKEVSHITAEFEIETKMEEASDTCEADCLRKRAEQSLQAAIKTLRKSIGRQQFYVQVSGTEYEVAQRPAKALEGQGACGAGQVLQDSKCVACGPGTHFGGELGQCVSCMPGTYQDMEGQLSCTPCPSSDGLGLPGARNVSECGGQCSPGFFSADGFKPCQACPVGTYQPEPGRTGCFPCGGGLLTKHEGTTSFQDCEAKVHCSPGHHYNTTTHRCIRCPVGTYQPEFGQNHCITCPGNTSTDFDGSTNVTHCKNQHCGGELGDYTGYIESPNYPGDYPANAECVWHIAPPPKRRILIVVPEIFLPIEDECGDVLVMRKSASPTSITTYETCQTYERPIAFTSRSRKLWIQFKSNEGNSGKGFQVPYVTYDEDYQQLIEDIVRDGRLYASENHQEILKDKKLIKALFDVLAHPQNYFKYTAQESKEMFPRSFIKLLRSKVSRFLRPYK

SEQ ID NO: 63542 - protein, 363 aa, Homo sapiens [sequence omitted]

SEQ ID NO: 63543 - protein, 175 aa, Homo sapiens
  VARIANT 1: note = MOD_RES - Any amino acid
XRETPKGGVACDCRPGFDLAQNQKDCTLTCNYGNGGCQHSCEDTDTGPTCGCHQKYALHSDGRTCIEKDEAAIERSQFNATSVADVDKRVKRRLLMETCAVNNGGCDRTCKDTATGVRCSCPVGFTLQPDGKTCKDINECLVNNGGCDHFCRNTVGSFECGCRKGYKLLTDERTC

SEQ ID NO: 63544 - protein, 999 aa, Homo sapiens
MGVAGRNRPGAAWAVLLLLLLLPPLLLLAGAVPPGRGRAAGPQEDVDECAQGLDDCHADALCQNTPTSYKCSCKPGYQGEGRQCEDIDECGNELNGGCVHDCLNIPGNYRCTCFDGFMLAHDGHNCLDVDECLENNGGCQHTCVNVMGSYECCCKEGFFLSDNQHTCIHRSEEGLSCMNKDHGCSHICKEAPRGSVACECRPGFELAKNQRDCILTCNHGNGGCQHSCDDTADGPECSCHPQYKMHTDGRSCLEREDTVLEVTESNTTSVVDGDKRVKRRLLMETCAVNNGGCDRTCKDTSTGVHCSCPVGFTLQLDGKTCKDIDECQTRNGGCDHFCKNIVGSFDCGCKKGFKLLTDEKSCQDVDECSLDRTCDHSCINHPGTFACACNRGYTLYGFTHCGDTNECSINNGGCQQVCVNTVGSYECQCHPGYKLHWNKKDCVEVKGLLPTSVSPRVSLHCGKSGGGDGCFLRCHSGIHLSSDVTTIRTSVTFKLNEGKCSLKNAELFPEGLRPALPEKHSSVKESFRYVNLTCSSGKQVPGAPGRPSTPKEMFITVEFELETNQKEVTASCDLSCIVKRTEKRLRKAIRTLRKAVHREQFHLQLSGMNLDVAKKPPRTSERQAESCGVGQGHAENQCVSCRAGTYYDGARERCILCPNGTFQNEEGQMTCEPCPRPGNSGALKTPEAWNMSECGGLCQPGEYSADGFAPCHLCALGTFQPEAGRTSCFPCGGGLATKHQGATSFQDCETRVQCSPGHFYNTTTHRCIRCPVGTYQPEFGKNNCVSCPGNTTTDFDGSTNITQCKNRRCGGELGDFTGYIESPNYPGNYPANTECTWTINPPPKRRILIVVPEIFLPIEDDCGDYLVMRKTSSSNSVTTYETCQTYERPIAFTSRSKKLWIQFKSNEGNSARGFQVPYVTYDEDYQELIEDIVRDGRLYASENHQEILKDKKLIKALFDVLAHPQNYFKYTAQESREMFPRSFIRLLRSKVSRFLRPYK

SEQ ID NO: 63545 - protein, 807 aa, Homo sapiens
MGVAGRNRPGAAWAVLLLLLLLPPLLLLAGAVPPGRGRAAGPQEDVDECAQGLDDCHADALCQNTPTSYKCSCKPGYQGEGRQCEDIDECGNELNGGCVHDCLNIPGNYRCTCFDGFMLAHDGHNCLDVDECLENNGGCQHTCVNVMGSYECCCKEGFFLSDNQHTCIHRSEEGLSCMNKDHGCSHICKEAPRGSVACECRPGFELAKNQRDCILTCNHGNGGCQHSCDDTADGPECSCHPQYKMHTDGRSCLEREDTVLEVTESNTTSVVDGDKRVKRRLLMETCAVNNGGCDRTCKDTSTGVHCSCPVGFTLQLDGKTCKDIDECQTRNGGCDHFCKNIVGSFDCGCKKGFKLLTDEKSCQDVDECSLDRTCDHSCINHPGTFACACNRGYTLYGFTHCGDTNECSINNGGCQQVCVNTVGSYECQCHPGYKLHWNKKDCVASCDLSCIVKRTEKRLRKAIRTLRKAVHREQFHLQLSGMNLDVAKKPPRTSERQAESCGVGQGHAENQCVSCRAGTYYDGARERCILCPNGTFQNEEGQMTCEPCPRPGNSGALKTPEAWNMSECGGLCQPGEYSADGFAPCHLCALGTFQPEAGRTSCFPCGGGLATKHQGATSFQDCETRVQCSPGHFYNTTTHRCIRCPVGTYQPEFGKNNCVSCPGNTTTDFDGSTNITQCKTSSNSVTTYETCQTYERPIAFTSRSKKLWIQFKSNEGNSARGFQVPYVTYDEDYQELIEDIVRDGRLYASENHQEILKDKKLIKALFDVLAHPQNYFKYTAQESREMFPRSFIRLLRSKVSRFLRPYK

SEQ ID NO: 63546 - protein, 1028 aa, Homo sapiens
MGVAGRNRPGAAWAVLLLLLLLPPLLLLAGAVPPGRGRAAGPQEDVDECAQGLDDCHADALCQNTPTSYKCSCKPGYQGEGRQCEDIDECGNELNGGCVHDCLNIPGNYRCTCFDGFMLAHDGHNCLDVDECLENNGGCQHTCVNVMGSYECCCKEGFFLSDNQHTCIHRSEEGLSCMNKDHGCSHICKEAPRGSVACECRPGFELAKNQRDCILTCNHGNGGCQHSCDDTADGPECSCHPQYKMHTDGRSCLEREDTVLEVTESNTTSVVDGDKRVKRRLLMETCAVNNGGCDRTCKDTSTGVHCSCPVGFTLQLDGKTCKDIDECQTRNGGCDHFCKNIVGSFDCGCKKGFKLLTDEKSCQDVDECSLDRTCDHSCINHPGTFACACNRGYTLYGFTHCGDTNECSINNGGCQQVCVNTVGSYECQCHPGYKLHWNKKDCVEVKGLLPTSVSPRVSLHCGKSGGGDGCFLRCHSGIHLSSGLQGAYSVTCGSSSPLRNKQQKSNDSAFGDVTTIRTSVTFKLNEGKCSLKNAELFPEGLRPALPEKHSSVKESFRYVNLTCSSGKQVPGAPGRPSTPKEMFITVEFELETNQKEVTASCDLSCIVKRTEKRLRKAIRTLRKAVHREQFHLQLSGMNLDVAKKPPRTSERQAESCGVGQGHAENQCVSCRAGTYYDGARERCILCPNGTFQNEEGQMTCEPCPRPGNSGALKTPEAWNMSECGGLCQPGEYSADGFAPCHLCALGTFQPEAGRTSCFPCGGGLATKHQGATSFQDCETRVQCSPGHFYNTTTHRCIRCPVGTYQPEFGKNNCVSCPGNTTTDFDGSTNITQCKNRRCGGELGDFTGYIESPNYPGNYPANTECTWTINPPPKRRILIVVPEIFLPIEDDCGDYLVMRKTSSSNSVTTYETCQTYERPIAFTSRSKKLWIQFKSNEGNSARGFQVPYVTYDEDYQELIEDIVRDGRLYASENHQEILKDKKLIKALFDVLAHPQNYFKYTAQESREMFPRSFIRLLRSKVSRFLRPYK

SEQ ID NO: 63547 - protein, 136 aa, Homo sapiens
MVLLESEQFLTELTRLFQKCRTSGSVYITLKKYDGRTKPIPKKGTVEGFEPADNKCLLRATDGKKKISTVVSSKEVNKFQMAYSNLLRANMDGLKKRDKKNKTKKTKAAAAAAAAAPAAAATAPTTAATTAATAAQ

SEQ ID NO: 63548 - protein, 110 aa, Homo sapiens
MACAAARSPADQDRFICIYPAYLNNKKTIAEGRRIPISKAVENPTATEIQDVCSAVGLNVFLEKNKMYSREWNRDVQYRGRVRVQLKQEDGSLCLVQFPSHYTLSLTSGS

SEQ ID NO: 63549 - protein, 144 aa, Homo sapiens
MACAAARSPADQDRFICIYPAYLNNKKTIAEGRRIPISKAVENPTATEIQDVCSAVGLNVFLEKNKMYSREWNRDVQYRGRVRVQLKQEDGSLCLVQFPSRKSVMLYAAEMIPKLKTRTQKTGGADQSLQQGEGSKKGKGKKKK

SEQ ID NO: 63550 - protein, 78 aa, Homo sapiens
MACAAARSPADQDRLLKILQLQRFKMYVQQLDLTYFLRKIKCTLENGIVMSNTEAESGSSSNRKMGASALYSSHHVSQ

SEQ ID NO: 63551 - protein, 504 aa, Homo sapiens
MVLADLGRKITSALRSLSNATIINEEVLNAMLKEVCTALLEADVNIKLVKQLRENVKSAIDLEEMASGLNKRKMIQHAVFKELVKLVDPGVKAWTPTKGKQNVIMFVGLQGSGKTTTCSKLAYYYQRKGWKTCLICADTFRAGAFDQLKQNATKARIPFYGSYTEMDPVIIASEGVEKFKNENFEIIIVDTSGRHKQEDSLFEEMLQVANAIQPDNIVYVMDASIGQACEAQAKAFKDKVDVASVIVTKLDGHAKGGGALSAVAATKSPIIFIGTGEHIDDFEPFKTQPFISKLLGMGDIEGLIDKVNELKLDDNEALIEKLKHGQFTLRDMYEQFQNIMKMGPFSQILGMIPGFGTDFMSKGNEQESMARLKKLMTIMDSMNDQELDSTDGAKVFSKQPGRIQRVARGSGVSTRDVQELLTQYTKFAQMVKKMGGIKGLFKGGDMSKNVSQSQMAKLNQQMAKMMDPRVLHHMGGMAGLQSMMRQFQQGAAGNMKGMMGFNNM

SEQ ID NO: 63552 - protein, 455 aa, Homo sapiens
MPPLSMKRSAIDLEEMASGLNKRKMIQHAVFKELVKLVDPGVKAWTPTKGKQNVIMFVGLQGSGKTTTCSKLAYYYQRKGWKTCLICADTFRAGAFDQLKQNATKARIPFYGSYTEMDPVIIASEGVEKFKNENFEIIIVDTSGRHKQEDSLFEEMLQVANAIQPDNIVYVMDASIGQACEAQAKAFKDKVDVASVIVTKLDGHAKGGGALSAVAATKSPIIFIGTGEHIDDFEPFKTQPFISKLLGMGDIEGLIDKVNELKLDDNEALIEKLKHGQFTLRDMYEQFQNIMKMGPFSQILGMIPGFGTDFMSKGNEQESMARLKKLMTIMDSMNDQELDSTDGAKVFSKQPGRIQRVARGSGVSTRDVQELLTQYTKFAQMVKKMGGIKGLFKGGDMSKNVSQSQMAKLNQQMAKMMDPRVLHHMGGMAGLQSMMRQFQQGAAGNMKGMMGFNNM

SEQ ID NO: 63553 - protein, 44 aa, Homo sapiens
MVLADLGRKITSALRSLSNATIINEEVLNAMLKEVCTALLEADV

SEQ ID NO: 63554 - protein, 74 aa, Homo sapiens
MVLADLGRKITSALRSLSNATIINEEVLNAMLKEVCTALLEADVNIKLVKQLRENVKSAIDLEEMASGLNKRKM

SEQ ID NO: 63555 - protein, 504 aa, Homo sapiens; identical to SEQ ID NO: 63551

SEQ ID NO: 63556 - protein, 596 aa, Homo sapiens
MAAEKQVPGGGGGGGSGGGGGSGGGGSGGGRGAGGEENKENERPSAGSKANKEFGDSLSLEILQIIKESQQQHGLRHGDFQRYRGYCSRRQRRLRKTLNFKMGNRHKFTGKKVTEELLTDNRYLLLVLMDAERAWSYAMQLKQEANTEPRKRFHLLSRLRKAVKHAEELERLCESNRVDAKTKLEAQAYTAYLSGMLRFEHQEWKAAIEAFNKCKTIYEKLASAFTEEQAVLYNQRVEEISPNIRYCAYNIGETRAKQAATMSEVEWRGRTVPVKIDKVRIFLLGLADNEAAIVQAESEETKERLFESMLSECRDAIQVVREELKPDQKQRDYILEGEPGKVSNLQYLHSYLTYIKLSTAIKRNENMAKGLQRALLQQQPEDDSKRSPRPQDLIRLYDIILQNLVELLQLPGLEEDKAFQKEIGLKTLVFKAYRCFFIAQSYVLVKKWSEALVLYDRVLKYANEVNSDAGAFKNSLKDLPDVQELITQVRSEKCSLQAAAILDANDAHQTETSSSQVKDNKPLVERFETFCLDPSLVTKQANLVHFPPGFQPIPCKPLFFDLALNHVAFPPLEDKLEQKTKSGLTGYIKGIFGFRS

SEQ ID NO: 63557 - protein, 627 aa, Homo sapiens
MAAEKQVPGGGGGGGSGGGGGSGGGGSGGGRGAGGEENKENERPSAGSKANKEFGDSLSLEILQIIKESQQQHGLRHGDFQRYRGYCSRRQRRLRKTLNFKMGNRHKFTGKKVTEELLTDNRYLLLVLMDAERAWSYAMQLKQEANTEPRKRFHLLSRLRKAVKHAEELERLCESNRVDAKTKLEAQAYTAYLSGMLRFEHQEWKAAIEAFNKCKTIYEKLASAFTEEQAVLYNQRVEEISPNIRYCAYNIGDQSAINELMQMRLRSGGTEGLLAEKLEALITQTRAKQAATMSEVEWRGRTVPVKIDKVRIFLLGLADNEAAIVQAESEETKERLFESMLSECRDAIQVVREELKPDQKQRDYILEGEPGKVSNLQYLHSYLTYIKLSTAIKRNENMAKGLQRALLQQQPEDDSKRSPRPQDLIRLYDIILQNLVELLQLPGLEEDKAFQKEIGLKTLVFKAYRCFFIAQSYVLVKKWSEALVLYDRVLKYANEVNSDAGAFKNSLKDLPDVQELITQVRSEKCSLQAAAILDANDAHQTETSSSQVKDNKPLVERFETFCLDPSLVTKQANLVHFPPGFQPIPCKPLFFDLALNHVAFPPLEDKLEQKTKSGLTGYIKGIFGFRS

SEQ ID NO: 63558 - protein, 526 aa, Homo sapiens [sequence omitted]

SEQ ID NO: 63559 - protein, 327 aa, Homo sapiens
MQMRLRSGGTEGLLAEKLEALITQTRAKQAATMSEVEWRGRTVPVKIDKVRIFLLGLADNEAAIVQAESEETKERLFESMLSECRDAIQVVREELKPDQKQRDYILEGEPGKVSNLQYLHSYLTYIKLSTAIKRNENMAKGLQRALLQQQPEDDSKRSPRPQDLIRLYDIILQNLVELLQLPGLEEDKAFQKEIGLKTLVFKAYRCFFIAQSYVLVKKWSEALVLYDRVLKYANEVNSDAGAFKNSLKDLPDVQELITQVRSEKCSLQAAAILDANDAHQTETSSSQVKDNKPLVERFESTPGTDGALKRFVMLLQYHGFEMNSSLL

SEQ ID NO: 63560 - protein, 589 aa, Homo sapiens
MAAEKQVPGGGGGGGSGGGGGSGGGGSGGGRGAGGEENKENERPSAGSKANKEFGDSLSLEILQIIKESQQQHGLRHGDFQRYRYLLLVLMDAERAWSYAMQLKQEANTEPRKRFHLLSRLRKAVKHAEELERLCESNRVDAKTKLEAQAYTAYLSGMLRFEHQEWKAAIEAFNKCKTIYEKLASAFTEEQAVLYNQRVEEISPNIRYCAYNIGDQSAINELMQMRLRSGGTEGLLAEKLEALITQTRAKQAATMSEVEWRGRTVPVKIDKVRIFLLGLADNEAAIVQAESEETKERLFESMLSECRDAIQVVREELKPDQKQRDYILEGEPGKVSNLQYLHSYLTYIKLSTAIKRNENMAKGLQRALLQQQPEDDSKRSPRPQDLIRLYDIILQNLVELLQLPGLEEDKAFQKEIGLKTLVFKAYRCFFIAQSYVLVKKWSEALVLYDRVLKYANEVNSDAGAFKNSLKDLPDVQELITQVRSEKCSLQAAAILDANDAHQTETSSSQVKDNKPLVERFETFCLDPSLVTKQANLVHFPPGFQPIPCKPLFFDLALNHVAFPPLEDKLEQKTKSGLTGYIKGIFGFRS

SEQ ID NO: 63561 - protein, 369 aa, Homo sapiens
MAAEKQVPGGGGGGGSGGGGGSGGGGSGGGRGAGGEENKENERPSAGSKANKEFGDSLSLEILQIIKESQQQHGLRHGDFQRYRGYCSRRQRRLRKTLNFKMGNRHKFTGKKVTEELLTDNRYLLLVLMDAERAWSYAMQLKQEANTEPRKRFHLLSRLRKAVKHAEELERLCESNRVDAKTKLEAQAYTAYLSGMLRFEHQEWKAAIEAFNKCKTIYEKLASAFTEEQAVLYNQRVEEISPNIRYCAYNIGDQSAINELMQMRLRSGGTEGLLAEKLEALITQTRAKQAATMSEVEWRGRTVPVKIDKVRIFLLGLADNEAAIVQAESEETKERLFESMLSECRDAIQVVREELKPDQRDLLLPSQGQ

SEQ ID NO: 63562 - protein, 288 aa, Homo sapiens
MLSECRDAIQVVREELKPDQKQRDYILEGEPGKVSNLQYLHSYLTYIKLSTAIKRNENMAKGLQRALLQQQPEDDSKRSPRPQDLIRLYDIILQNLVELLQLPGLEEDKAFQKEIGLKTLVFKAYRCFFIAQSYVLVKKWSEALVLYDRVLKYANEVNSDAGAFKNSLKDLPDVQELITQVRSEKCSLQAAAILDANDAHQTETSSSQVKDNKPLVERFETFCLDPSLVTKQANLVHFPPGFQPIPCKPLFFDLALNHVAFPPLEDKLEQKTKSGLTGYIKGIFGFRS

SEQ ID NO: 63563 - protein, 671 aa, Homo sapiens
MASGGSGGVSVPALWSEVNRYGQNGDFTRALKTVNKILQINKDDVTALHCKVVCLIQNGSFKEALNVINTHTKVLANNSLSFEKAYCEYRLNRIENALKTIESANQQTDKLKELYGQVLYRLERYDECLAVYRDLVRNSQDDYDEERKTNLSAVVAAQSNWEKVVPENLGLQEGTHELCYNTACALIGQGQLNQAMKILQKAEDLCRRSLSEDTDGTEEDPQAELAIIHGQMAYILQLQGRTEEALQLYNQIIKLKPTDVGLLAVIANNIITINKDQNVFDSKKKVKLTNAEGVEFKLSKKQLQAIEFNKALLAMYTNQAEQCRKISASLQSQSPEHLLPVLIQAAQLCREKQHTKAIELLQEFSDQHPENAAEIKLTMAQLKISQGNISKACLILRSIEELKHKPGMVSALVTMYSHEEDIDSAIEVFTQAIQWYQNHQPKSPAHLSLIREAANFKLKYGRKKEAISDLQQLWKQNPKDIHTLAQLISAYSLVDPEKAKALSKHLPSSDSMSLKVDVEALENSAGATYIRKKGGKVTGDSQPKEQGQGDLKKKKKKKKGKLPKNYDPKVTPDPERWLPMRERSYYRGRKKGKKKDQIGKGTQGATAGASSELDASKTVSSPPTSPRPGSAATVSASTSNIIPPRHQKPAGAPATKKKQQQKKKKGGKGGW

SEQ ID NO: 63564 - protein, 625 aa, Homo sapiens
PLVSSKMASGGSGGVSVPALWSEVNRYGQNGDFTRALKTVNKILQINKDDVTALHCKVVCLIQNGSFKEALNVINTHTKVLANNSLSFEKAYCEYRLNRIENALKTIESANQQTDKLKELYGQVLYRLERYDECLAVYRDLVRNSQDDYDEERKTNLSAVVAAQSNWEKVVPENLGLQEGTHELCYNTACALIGQGQLNQAMKILQKAEDLCRRSLSEDTDQNVFDSKKKVKLTNAEGVEFKLSKKQLQAIEFNKALLAMYTNQAEQCRKISASLQSQSPEHLLPVLIQAAQLCREKQHTKAIELLQEFSDQHPENAAEIKLTMAQLKISQGNISKACLILRSIEELKHKPGMVSALVTMYSHEEDIDSAIEVFTQAIQWYQNHQPKSPAHLSLIREAANFKLKYGRKKEAISDLQQLWKQNPKDIHTLAQLISAYSLVDPEKAKALSKHLPSSDSMSLKVDVEALENSAGATYIRKKGGKVTGDSQPKEQGQGDLKKKKKKKKGKLPKNYDPKVTPDPERWLPMRERSYYRGRKKGKKKDQIGKGTQGATAGASSELDASKTVSSPPTQDLAVLQQYLPLQVTSYPQDTRNLQGLQQQKRNSNRKRRKVEKVAGDENILVAGCF

SEQ ID NO: 63565 - protein, 610 aa, Homo sapiens
MASGGSGGVSVPALWSEVNRYGQNGDFTRALKTVNKILQINKDDVTALHCKVVCLIQNGSFKEALNVINTHTKVLANNSLSFEKAYCEYRLNRIENALKTIESANQQTDKLKELYGQVLYRLERYDECLAVYRDLVRNSQDDYDEERKTNLSAVVAAQSNWEKVVPENLGLQEGTHELCYNTACALIGQGQLNQAMKILQKAEDLCRRSLSEDTDQNVFDSKKKVKLTNAEGVEFKLSKKQLQAIEFNKALLAMYTNQAEQCRKISASLQSQSPEHLLPVLIQAAQLCREKQHTKAIELLQEFSDQHPENAAEIKLTMAQLKISQGNISKACLILRSIEELKHKPGMVSALVTMYSHEEDIDSAIEVFTQAIQWYQNHQPKSPAHLSLIREAANFKLKYGRKKEAISDLQQLWKQNPKDIHTLAQLISAYSLVDPEKAKALSKHLPSSDSMSLKVDVEALENSAGATYIRKKGGKVTGDSQPKEQGQGDLKKKKKKKKGKLPKNYDPKVTPDPERWLPMRERSYYRGRKKGKKKDQIGKGTQGATAGASSELDASKTVSSPPTSPRPGSAATVSASTSNIIPPRHQKPAGAPATKKKQQQKKKKGGKGGW

SEQ ID NO: 63566 - protein, 638 aa, Homo sapiens
MLDFFTIFSKGGLVLWCFQGVSDSCTGPVNALIRSVLLQERGGNNSFTHEALTLKYKLDNQFELVFVVGFQKILTLTYVDKLIDDVHRLFRDKYRTEIQQQSALSLLNGTFDFQNDFLRLLREAEESSKIRAPTTMKKFEDSEKAKKPVRSMIETRGEKPKEKAKNSKKKGAKKEGSDGPLATSKPVPAEKSGLPVGPENGVELSKEELIRRKREEFIQKHGRGMEKSNKSTKSDAPKEKGKKAPRVWELGGCANKEVLDYSTPTTNGTPEAALSEDINLIRGTGSGGQLQDLDCSSSDDEGAAQNSTKPSATKGTLGGMFGMLKGLVGSKSLSREDMESVLDKMRDHLIAKNVAADIAVQLCESVANKLEGKVMGTFSTVTSTVKQALQESLVQILQPQRRVDMLRDIMDAQRRQRPYVVTFCGVNGVGKSTNLAKISFWLLENGFSVLIAACDTFRAGAVEQLRTHTRRLSALHPPEKHGGRTMVQLFEKGYGKDAAGIAMEAIAFARNQGFDVVLVDTAGRMQDNAPLMTALAKLITVNTPDLVLFVGEALVGNEAVDQLVKFNRALADHSMAQTPRLIDGIVLTKFDTIDDKVGAAISMTYITSKPIVFVGTGQTYCDLRSLNAKAVVAALMKA

SEQ ID NO: 63567 - protein, 183 aa, Homo sapiens
MRLLSFVVLALFAVTQAEEGARLLASKSLLNRYAVEGRDLTLQYNIYNVGSSAALDVELSDDSFPPEDFGIVSGMLNVKWDRIAPASNVSHTVVLRPLKAGYFNFTSATITYLAQEDGPVVIGSTSAPGQGGILAQREFDRRFSPHFLDWAAFGVMTLPSIGIPLLLWYSSKRKYDTPKTKKN

SEQ ID NO: 63568 - protein, 183 aa, Homo sapiens; identical to SEQ ID NO: 63567

SEQ ID NO: 63569 - protein, 85 aa, Homo sapiens
MRLLSFVVLALFAVTQAEEGARLLASKSLLNRYAVEGRDLTLQYNIYNVGSSAALDVELSDDSFPPEDFGIVSGMLNVKWDRIAP

SEQ ID NO: 63570 - protein, 147 aa, Homo sapiens
MRLLSFVVLALFAVTQAEEGARLLASKSLLNRYAVEGRDLTLQYNIYNVGSSAALDVELSDDSFPPEDFGIVSGMLNVKWDRIAPASNVSHTVVLRPLKAGYFNFTSATITYLAQEDGPVVIGSTSAPGQGGILAQREFDRRFSPHF

SEQ ID NO: 63571 - protein, 173 aa, Homo sapiens
MAAMASLGALALLLLSSLSRCSAEACLEPQITPSYYTTSDAVISTETVFIVEISLTCKNRVQNMALYADVGGKQFPVTRGQDVGRYQVSWSLDHKSAHAGTYEVRFFDEESYSLLRKAQRNNEDISIIPPLFTVSVDHRGTWNGPWVSTEVLAAAIGLVIYYLAFSAKSHIQA

SEQ ID NO: 63572 - protein, 148 aa, Homo sapiens
MAAMASLGALALLLLSSLSRCSAEACLEPQITPSYYTTSDAVISTETVFIVEISLTCKNRVQVSWSLDHKSAHAGTYEVRFFDEESYSLLRKAQRNNEDISIIPPLFTVSVDHRGTWNGPWVSTEVLAAAIGLVIYYLAFSAKSHIQA

SEQ ID NO: 63573 - protein, 173 aa, Homo sapiens; identical to SEQ ID NO: 63571

SEQ ID NO: 63574 - protein, 173 aa, Homo sapiens; identical to SEQ ID NO: 63571

SEQ ID NO: 63575 - protein, 120 aa, Homo sapiens
  VARIANT 1: note = MOD_RES - Any amino acid
XVGSGCRSAAVSALVVRVAPPCPLCPHSAQHPTQVSWSLDHKSAHAGTYEVRFFDEESYSLLRKAQRNNEDISIIPPLFTVSVDHRGTWNGPWVSTEVLAAAIGLVIYYLAFSAKSHIQA

SEQ ID NO: 63576 - protein, 847 aa, Homo sapiens
MSLWGLVSKMPPEKVQRLYVDFPQHLRHLLGDWLESQPWEFLVGSDAFCCNLASALLSDTVQHLQASVGEQGEGSTILQHISTLESIYQRDPLKLVATFRQILQGEKKAVMEQFRHLPMPFHWKQEELKFKTGLRRLQHRVGEIHLLREALQKGAEAGQVSLHSLIETPANGTGPSEALAMLLQETTGELEAAKALVLKRIQIWKRQQQLAGNGAPFEESLAPLQERCESLVDIYSQLQQEVGAAGGELEPKTRASLTGRLDEVLRTLVTSCFLVEKQPPQVLKTQTKFQAGVRFLLGLRFLGAPAKPPLVRADMVTEKQARELSVPQGPGAGAESTGEIINNTVPLENSIPGNCCSALFKNLLLKKIKRCERKGTESVTEEKCAVLFSASFTLGPGKLPIQLQALSLPLVVIVHGNQDNNAKATILWDNAFSEMDRVPFVVAERVPWEKMCETLNLKFMAEVGTNRGLLPEHFLFLAQKIFNDNSLSMEAFQHRSVSWSQFNKEILLGRGFTFWQWFDGVLDLTKRCLRSYWSDRLIIGFISKQYVTSLLLNEPDGTFLLRFSDSEIGGITIAHVIRGQDGSPQIENIQPFSAKDLSIRSLGDRIRDLAQLKNLYPKKPKDEAFRSHYKPEQMGKDGRGYVPATIKMTVERDQPLPTPELQMPTMVPSYDLGMAPDSSMSMQLGPDMVPQVYPPHSHSIPPYQGLSPEESVNVLSAFQEPHLQMPPSLGQMSLPFDQPHPQGLLPCQPQEHAVSSPDPLLCSDVTMVEDSCLSQPVTAFPQGTWIGEDIFPPLLPPTEQDLTKLLLEGQGESGGGSLGAQPLLQPSHYGQSGISMSHMDLRANPSW

SEQ ID NO: 63577 - protein, 847 aa, Homo sapiens; identical to SEQ ID NO: 63576

SEQ ID NO: 63578 - protein, 737 aa, Homo sapiens
MEQFRHLPMPFHWKQEELKFKTGLRRLQHRVGEIHLLREALQKGAEAGQVSLHSLIETPANGTGPSEALAMLLQETTGELEAAKALVLKRIQIWKRQQQLAGNGAPFEESLAPLQERCESLVDIYSQLQQEVGAAGGELEPKTRASLTGRLDEVLRTLVTSCFLVEKQPPQVLKTQTKFQAGVRFLLGLRFLGAPAKPPLVRADMVTEKQARELSVPQGPGAGAESTGEIINNTVPLENSIPGNCCSALFKNLLLKKIKRCERKGTESVTEEKCAVLFSASFTLGPGKLPIQLQALSLPLVVIVHGNQDNNAKATILWDNAFSEMDRVPFVVAERVPWEKMCETLNLKFMAEVGTNRGLLPEHFLFLAQKIFNDNSLSMEAFQHRSVSWSQFNKEILLGRGFTFWQWFDGVLDLTKRCLRSYWSDRLIIGFISKQYVTSLLLNEPDGTFLLRFSDSEIGGITIAHVIRGQDGSPQIENIQPFSAKDLSIRSLGDRIRDLAQLKNLYPKKPKDEAFRSHYKPEQMGKDGRGYVPATIKMTVERDQPLPTPELQMPTMVPSYDLGMAPDSSMSMQLGPDMVPQVYPPHSHSIPPYQGLSPEESVNVLSAFQEPHLQMPPSLGQMSLPFDQPHPQGLLPCQPQEHAVSSPDPLLCSDVTMVEDSCLSQPVTAFPQGTWIGEDIFPPLLPPTEQDLTKLLLEGQGESGGGSLGAQPLLQPSHYGQSGISMSHMDLRANPSW

SEQ ID NO: 63579 - protein, 737 aa, Homo sapiens; identical to SEQ ID NO: 63578

SEQ ID NO: 63580 - protein, 737 aa, Homo sapiens; identical to SEQ ID NO: 63578

SEQ ID NO: 63581 - protein, 679 aa, Homo sapiens
MSLWGLVSKMPPEKVQRLYVDFPQHLRHLLGDWLESQPWEFLVGSDAFCCNLASALLSDTVQHLQASVGEQGEGSTILQHISTLESIYQRDPLKLVATFRQILQGEKKAVMEQFRHLPMPFHWKQEELKFKTGLRRLQHRVGEIHLLREALQKGAEAGQVSLHSLIETPANGTGPSEALAMLLQETTGELEAAKALVLKRIQIWKRQQQLAGNGAPFEESLAPLQERCESLVDIYSQLQQEVGAAGGELEPKTRASLTGRLDEVLRTLVTSCFLVEKQPPQVLKTQTKFQAGVRFLLGLRFLGAPAKPPLVRADMVTEKQARELSVPQGPGAGAESTGEIINNTVPLENSIPGNCCSALFKNLLLKKIKRCERKGTESVTEEKCAVLFSASFTLGPGKLPIQLQALSLPLVVIVHGNQDNNAKATILWDNAFSEMDRVPFVVAERVPWEKMCETLNLKFMAEVGTNRGLLPEHFLFLAQKIFNDNSLSMEAFQHRSVSWSQFNKEILLGRGFTFWQWFDGVLDLTKRCLRSYWSDRLIIGFISKQYVTSLLLNEPDGTFLLRFSDSEIGGITIAHVIRGQDGSPQIENIQPFSAKDLSIRSLGDRIRDLAQLKNLYPKKPKDEAFRSHYKPEQMGKDGRGYVPATIKMTVERDQPLPTPELQMPTMVPSYDLGMALIPP

SEQ ID NO: 63582 - protein, 730 aa, Homo sapiens
MEQFRHLPMPFHWKQEELKFKTGLRRLQHRVGEIHLLREALQKGAEAGQVSLHSLIETPANGTGPSEALAMLLQETTGELEAAKALVLKRIQIWKRQQQLAGNGAPFEESLAPLQERCESLVDIYSQLQQEVGAAGGELEPKTRASLTGRLDEVLRTLVTSCFLVEKQPPQVLKTQTKFQAGVRFLLGLRFLGAPAKPPLVRADMVTEKQARELSVPQGPGAGAESTGEIINNTVPLENSIPGNCCSALFKNLLLKKIKRCERKGTESVTEEKCAVLFSASFTLGPGKLPIQLQALSLPLVVIVHGNQDNNAKATILWDNAFSEMDRVPFVVAERVPWEKMCETLNLKFMAEVGTNRGLLPEHFLFLAQKIFNDNSLSMEAFQHRSVSWSQFNKEILLGRGFTFWQWFDGVLDLTKRCLRSYWSDRLIIGFISKQYVTSLLLNEPDGTFLLRFSDSEIGGITIAHVIRGQDGSPQIENIQPFSAKDLSIRSLGDRIRDLAQLKNLYPKKPKDEAFRSHYKPEQMGKDGRGYVPATIKMTVERDQPLPTPELQMPTMVPSYDLGMAPDSSMSMQLGPDMVPQVYPPHSHSIPPYQGLSPEESVNVLSAFQEPHLQMPPSLGQMSLPFDQPHPQGLLPCQPQEHAVSSPDPLLCSDVTMVEDSCLSQPVTAFPQGTWIGEDIFPPLLPPTEQDLTKLLLEGQGESGGGSLGHSPSCSPPTMGNLGSQCPTWT

SEQ ID NO: 63583 - protein, 847 aa, Homo sapiens; identical to SEQ ID NO: 63576

SEQ ID NO: 63584 - protein, 64 aa, Homo sapiens
MSLWGLVSKMPPEKVQRLYVDFPQHLRHLLGDWLESQPWEFLVGSDAFCCNLASALLSDTVQHL

SEQ ID NO: 63585 - protein, 144 aa, Homo sapiens
MSLWGLVSKMPPEKVQRLYVDFPQHLRHLLGDWLESQPWEFLVGSDAFCCNLASALLSDTVQHLQASVGEQGEGSTILQHISTLESIYQRDPLKLVATFRQILQGEKKAVMEQFRHLPMPFHWKQEELKFKTGLRRLQHRVGEI

SEQ ID NO: 63586 - protein, 154 aa, Homo sapiens
MSLWGLVSKMPPEKVQRLYVDFPQHLRHLLGDWLESQPWEFLVGSDAFCCNLASALLSDTVQHLQASVGEQGEGSTILQHISTLESIYQRDPLKLVATFRQILQGEKKAVMEQFRHLPMPFHWKQEELKFKTGLRRLQHRVGEIHLLREALQKG

SEQ ID NO: 63587 - protein, 105 aa, Homo sapiens
MSLWGLVSKMPPEKVQRLYVDFPQHLRHLLGDWLESQPWEFLVGSDAFCCNLASALLSDTVQHLQASVGEQGEGSTILQHISTLESIYQRDPLKLVATFRQILQG

SEQ ID NO: 63588 - protein, 103 aa, Homo sapiens
MSLWGLVSKMPPEKVQRLYVDFPQHLRHLLGDWLESQPWEFLVGSDAFCCNLASALLSDTVQHLQASVGEQGEGSTILQHISTLESIYQRDPLKLVATFRQIL

SEQ ID NO: 63589 - protein, 159 aa, Homo sapiens
MSLWGLVSKMPPEKVQRLYVDFPQHLRHLLGDWLESQPWEFLVGSDAFCCNLASALLSDTVQHLQASVGEQGEGSTILQHISTLESIYQRDPLKLVATFRQILQGEKKAVMEQFRHLPMPFHWKQEELKFKTGLRRLQHRVGEIHLLREALQKGAEAGQ

SEQ ID NO: 63590 - protein, 847 aa, Homo sapiens; identical to SEQ ID NO: 63576

SEQ ID NO: 63591 - protein, 74 aa, Homo sapiens
MSLWGLVSKMPPEKVQRLYVDFPQHLRHLLGDWLESQPWEFLVGSDAFCCNLASALLSDTVQHLQASVGEQGEG

SEQ ID NO: 63592 - protein, 187 aa, Homo sapiens
MLGHPKVCEKLKALMVEWTDEFKNDPQLSLISAMIKNLKEQGVTFPAIGSQAAEQAKASPALVAKDPGTVANKKEEEDLAKAIELSLKEQRQQSTTLSTLYPSTSSLLTNHQHEGRKVRAIYDFEAAEDNELTFKAGEIITVLDDSDPNWWKGETHQGIGLFPSNFVTADLTAEPEMIKTEKKTVQF

SEQ ID NO: 63593 - protein, 540 aa, Homo sapiens
MPLFATNPFDQDVEKATSEMNTAEDWGLILDICDKVGQSRTGPKDCLRSIMRRVNHKDPHVAMQALTLLGACVSNCGKIFHLEVCSRDFASEVSNVLNKGHPKVCEKLKALMVEWTDEFKNDPQLSLISAMIKNLKEQGVTFPAIGSQAAEQAKASPALVAKDPGTVANKKEEEDLAKAIELSLKEQRQQSTTLSTLYPSTSSLLTNHQHEGRKVRAIYDFEAAEDNELTFKAGEIITVLDDSDPNWWKGETHQGIGLFPSNFVTADLTAEPEMIKTEKKTVQFSDDVQVETIEPEPEPAFIDEDKMDQLLQMLQSTDPSDDQPDLPELLHLEAMCHQMGPLIDEKLEDIDRKHSELSELNVKVMEALSLYTKLMNEDPMYSMYAKLQNQPYYMQSSGVSGSQVYAGPPPSGAYLVAGNAQMSHLQSYSLPPEQLSSLSQAVVPPSANPALPSQQTQAAYPNTMVSSVQGNTYPSQAPVYSPPPAATAAAATADVTLYQNAGPNMPQVPNYNLTSSTLPQPGGSQQPPQPQQPYSQKALL

SEQ ID NO: 63594 - protein, 118 aa, Homo sapiens
MRRVNHKDPHVAMQALTLLGACVSNCGKIFHLEVCSRDFASEVSNVLNKGHPKVCEKLKALMVEWTDEFKNDPQLSLISAMIKNLKEQGVTFPAIGSQAAEQAKASPALVAKDPGTVA

SEQ ID NO: 63595 - protein, 429 aa, Homo sapiens
MVEWTDEFKNDPQLSLISAMIKNLKEQGVTFPAIGSQAAEQAKASPALVAKDPGTVANKKEEEDLAKAIELSLKEQRQQSTTLSTLYPSTSSLLTNHQHEGRKVRAIYDFEAAEDNELTFKAGEIITVLDDSDPNWWKGETHQGIGLFPSNFVTADLTAEPEMIKTEKKTVQFSDDVQVETIEPEPEPAFIDEDKMDQLLQMLQSTDPSDDQPDLPELLHLEAMCHQMGPLIDEKLEDIDRKHSELSELNVKVMEALSLYTKLMNEDPMYSMYAKLQNQPYYMQSSGVSGSQVYAGPPPSGAYLVAGNAQMSHLQSYSLPPEQLSSLSQAVVPPSANPALPSQQTQAAYPNTMVSSVQGNTYPSQAPVYSPPPAATAAAATADVTLYQNAGPNMPQVPNYNLTSSTLPQPGGSQQPPQPQQPYSQKALL

SEQ ID NO: 63596 - protein, 525 aa, Homo sapiens [sequence omitted]

SEQ ID NO: 63597 - protein, 1042 aa, Homo sapiens
MPMWAGGVGSPRRGMAPASTDDLFARKLRQPARPPLTPHTFEPRPVRGPLLRSGSDAGEARPPTPASPRARAHSHEEASRPAATSTRLFTDPLALLGLPAEEPEPAFPPVLEPRWFAHYDVQSLLFDWAPRSQGMGSHSEASSGTLASAEDQAASSDLLHGAPGFVCELGGEGELGLGGPASPPVPPALPNAAVSILEEPQNRTSAYSLEHADLGAGYYRKYFYGKEHQNFFGMDESLGPVAVSLRREEKEGSGGGTLHSYRVIVRTTQLRTLRGTISEDALPPGPPRGLSPRKLLEHVAPQLSPSCLRLGSASPKVPRTLLTLDEQVLSFQRKVGILYCRAGQGSEEEMYNNQEAGPAFMQFLTLLGDVVRLKGFESYRAQLDTKTDSTGTHSLYTTYQDHEIMFHVSTMLPYTPNNQQQLLRKRHIGNDIVTIVFQEPGSKPFCPTTIRSHFQHVFLVVRAHTPCTPHTTYRVAVSRTQDTPAFGPALPAGGGPFAANADFRAFLLAKALNGEQAAGHARQFHAMATRTRQQYLQDLATNEVTTTSLDSASRFGLPSLGGRRRAAPRGPGAELQAAGSLVWGVRAAPGARVAAGAQASGPEGIEVPCLLGISAEALVLVAPRDGRVVFNCACRDVLAWTFSEQQLDLYHGRGEAITLRFDGSPGQAVGEVVARLQLVSRGCETRELALPRDGQGRLGFEVDAEGFVTHVERFTFAETAGLRPGARLLRVCGQTLPSLRPEAAAQLLRSAPKVCVTVLPPDESGRPRRSFSELYTLSLQEPSRRGAPDPVQDEVQGVTLLPTTKQLLHLCLQDGGSPPGPGDLAEERTEFLHSQNSLSPRSSLSDEAPVLPNTTPDLLLATTAKPSVPSADSETPLTQDRPGSPSGSEDKGNPAPELRASFLPRTLSLRNSISRIMSEAGSGTLEDEWQAISEIASTCNTILESLSREGQPIPESGDPKGTPKSDAEPEPGNLSEKVSHLESMLRKLQEDLQKEKADRAALEEEVRSLRHNNRRLQAESESAATRLLLASKQLGSPTADLA

SEQ ID NO: 63598 - protein, 940 aa, Homo sapiens
MPMWAGGVGSPRRGMAPASTDDLFARKLRQPARPPLTPHTFEPRPVRGPLLRSGSDAGEARPPTPASPRARAHSHEEASRPAATSTRLFTDPLALLGLPAEEPEPAFPPVLEPRWFAHYDVQSLLFDWAPRSQGMGSHSEASSGTLASAEDQAASSDLLHGAPGFVCELGGEGELGLGGPASPPVPPALPNAAVSILEEPQNRTSAYSLEHADLGAGYYRKYFYGKEHQNFFGMDESLGPVAVSLRREEKEGSGGGTLHSYRVIVRTTQLRTLRGTISEDALPPGPPRGLSPRKLLEHVAPQLSPSCLRLGSASPKVPRTLLTLDEQVLSFQRKVGILYCRAGQGSEEEMYNNQEAGPAFMQFLTLLGDVVRLKGFESYRAQLDTKTDSTGTHSLYTTYQDHEIMFHVSTMLPYTPNNQQQLLRKRHIGNDIVTIVFQEPGSKPFCPTTIRSHFQHVFLVVRAHTPCTPHTTYRVAVSRTQDTPAFGPALPAGGGPFAANADFRAFLLAKALNGEQAAGHARQFHAMATRTRQQYLQDLATNEQLDLYHGRGEAITLRFDGSPGQAVGEVVARLQLVSRGCETRELALPRDGQGRLGFEVDAEGFVTHVERFTFAETAGLRPGARLLRVCGQTLPSLRPEAAAQLLRSAPKVCVTVLPPDESGRPRRSFSELYTLSLQEPSRRGAPDPVQDEVQGVTLLPTTKQLLHLCLQDGGSPPGPGDLAEERTEFLHSQNSLSPRSSLSDEAPVLPNTTPDLLLATTAKPSVPSADSETPLTQDRPGSPSGSEDKGNPAPELRASFLPRTLSLRNSISRIMSEAGSGTLEDEWQAISEIASTCNTILESLSREGQPIPESGDPKGTPKSDAEPEPGNLSEKVSHLESMLRKLQEDLQKEKADRAALEEEVRSLRHNNRRLQAESESAATRLLLASKQLGSPTADLA

SEQ ID NO: 63599 - protein, 6 aa, Homo sapiens
MPMWAG

SEQ ID NO: 63600 - protein, 103 aa, Homo sapiens
MPMWAGGVGSPRRGMAPASTDDLFARKLRQPARPPLTPHTFEPRPVRGPLLRSGSDAGEARPPTPASPRARAHSHEEASRPAATSTRLFTDPLALLGLPAEEP

SEQ ID NO: 63601 - protein, 1042 aa, Homo sapiens; identical to SEQ ID NO: 63597

SEQ ID NO: 63602 - protein, 1722 aa, Homo sapiens
MSDPRQSQEEKHKLGRASSKFKDPPRIMQSDDYFARKFKAINGNMGPTTSLNASNSNETGGGGPANGTPAVPKMGVRARVSEWPPKKDCSKELTCKALWESRSQTSYESITSVLQNGQSDQSEGQQDEQLDLDFVEAKYTIGDIFVHSPQRGLHPIRQRSNSDVTISDIDAEDVLDQNAVNPNTGAALHREYGSTSSIDRQGLSGENFFAMLRGYRVENYDHKAMVPFGFPEFFRCDPAISPSLHAAAQISRGEFVRISGLDYVDSALLMGRDRDKPFKRRLKSESVETSLFRKLRTVKSEHETFKFTSELEESRLERGIRPWNCQRCFAHYDVQSILFNINEAMATRANVGKRKNITTGASAASQTQMPTGQTGNCESPLGSKEDLNSKENLDADEGDGKSNDLVLSCPYFRNETGGEGDRRIALSRANSSSFSSGESCSFESSLSSHCTNAGVSVLEVPRENQPIHREKVKRYIIEHIDLGAYYYRKFFYGKEHQNYFGIDENLGPVAVSIRREKVEDAKEKEGSQFNYRVAFRTSELTTLRGAILEDAIPSTARHGTARGLPLKEVLEYVIPELSIQCLRQASNSPKVSEQLLKLDEQGLSFQHKIGILYCKAGQSTEEEMYNNETAGPAFEEFLDLLGQRVRLKGFSKYRAQLDNKTDSTGTHSLYTTYKDYELMFHVSTLLPYMPNNRQQLLRKRHIGNDIVTIVFQEPGALPFTPKSIRSHFQHVFVIVKVHNPCTENVCYSVGVSRSKDVPPFGPPIPKGVTFPKSAVFRDFLLAKVINAENAAHKSEKFRAMATRTRQEYLKDLAENFVTTATVDTSVKFSFITLGAKKKEKVKPRKDAHLFSIGAIMWHVIARDFGQSADIECLLGISNEFIMLIEKDSKNVVFNCSCRDVIGWTSGLVSIKVFYERGECVLLSSVDNCAEDIREIVQRLVIVTRGCETVEMTLRRNGLGQLGFHVNFEGIVADVEPFGFAWKAGLRQGSRLVEICKVAVATLTHEQMIDLLRTSVTVKVVIIQPHDDGSPRRGCSELCRIPMVEYKLDSEGTPCEYKTPFRRNTTWHRVPTPALQPLSRASPIPGTPDRLPCQQLLQQAQAAIPRSTSFDRKLPDGTRSSPSNQSSSSDPGPGGSGPWRPQVGYDGCQSPLLLEHQGSGPLECDGAREREDTMEASRHPETKWHGPPSKVLGSYKERALQKDGSCKDSPNKLSHIGDKSCSSHSSSNTLSSNTSSNSDDKHFGSGDLMDPELLGLTYIKGASTDSGIDTAPCMPATILGPVHLAGSRSLIHSRAEQWADAADVSGPDDEPAKLYSVHGYASTISAGSAAEGSMGDLSEISSHSSGSHHSGSPSAHCSKSSGSLDSSKVYIVSHSSGQQVPGSMSKPYHRQGAVNKYVIGWKKSEGSPPPEEPEVTECPGMYSEMDVMSTATQHQTVVGDAVAETQHVLSKEDFLKLMLPDSPLVEEGRRKFSFYGNLSPRRSLYRTLSDESICSNRRGSSFGSSRSSVLDQALPNDILFSTTPPYHSTLPPRAHPAPSMGSLRNEFWFSDGSLSDKSKCADPGLMPLPDTATGLDWTHLVDAARAFEGLDSDEELGLLCHHTSYLDQRVASFCTLTDMQHGQDLEGAQELPLCVDPGSGKEFMDTTGERSPSPLTGKVNQLELILRQLQTDLRKEKQDKAVLQAEVQHLRQDNMRLQEESQTATAQLRKFTEWFFTTIDKKS

SEQ ID NO: 63603 - protein, 778 aa, Homo sapiens
MSPCFSFIGCKLCSIVTRGCETVEMTLRRNGLGQLGFHVNFEGIVADVEPFGFAWKAGLRQGSRLVEICKVAVATLTHEQMIDLLRTSVTVKVVIIQPHDDGSPRRGCSELCRIPMVEYKLDSEGTPCEYKTPFRRNTTWHRVPTPALQPLSRASPIPGTPDRLPCQQLLQQAQAAIPRSTSFDRKLPDGTRSSPSNQSSSSDPGPGGSGPWRPQVGYDGCQSPLLLEHQGSGPLECDGAREREDTMEASRHPETKWHGPPSKVLGSYKERALQKDGSCKDSPNKLSHIGDKSCSSHSSSNTLSSNTSSNSDDKHFGSGDLMDPELLGLTYIKGASTDSGIDTAPCMPATILGPVHLAGSRSLIHSRAEQWADAADVSGPDDEPAKLYSVHGYASTISAGSAAEGSMGDLSEISSHSSGSHHSGSPSAHCSKSSGSLDSSKVYIVSHSSGQQVPGSMSKPYHRQGAVNKYVIGWKKSEGSPPPEEPEVTECPGMYSEMDVMSTATQHQTVVGDAVAETQHVLSKEDFLKLMLPDSPLVEEGRRKFSFYGNLSPRRSLYRTLSDESICSNRRGSSFGSSRSSVLDQALPNDILFSTTPPYHSTLPPRAHPAPSMGSLRNEFWFSDGSLSDKSKCADPGLMPLPDTATGLDWTHLVDAARAFEDQRVASFCTLTDMQHGQDLEGAQELPLCVDPGSGKEFMDTTGERSPSPLTGKVNQLELILRQLQTDLRKEKQDKAVLQAEVQHLRQDNMRLQEESQTATAQLRKFTEWFFTTIDKKS

SEQ ID NO: 63604 - protein, 1722 aa, Homo sapiens; identical to SEQ ID NO: 63602

SEQ ID NO: 63605 - protein, 305 aa, Homo sapiens
MDPKGLLSLTFVLFLSLAFGASYGTGGRMMNCPKILRQLGSKVLLPLTYERINKSMNKSIHIVVTMAKSLENSVENKIVSLDPSEAGPPRYLGDRYKFYLENLTLGIRESRKEDEGWYLMTLEKNVSVQRFCLQLRLYEQVSTPEIKVLNKTQENGTCTLILGCTVEKGDHVAYSWSEKAGTHPLNPANSSHLLSLTLGPQHADNIYICTVSNPISNNSQTFSPWPGCRTDPSGKTNHYQTTVEKKSLTIYAQVQKPGPLQKKLDSFPAQDPCTTIYVAATEPVPESVQETNSITVYASVTLPES

SEQ ID NO: 63606 - protein, 335 aa, Homo sapiens
MDPKGLLSLTFVLFLSLAFGASYGTGGRMMNCPKILRQLGSKVLLPLTYERINKSMNKSIHIVVTMAKSLENSVENKIVSLDPSEAGPPRYLGDRYKFYLENLTLGIRESRKEDEGWYLMTLEKNVSVQRFCLQLRLYEQVSTPEIKVLNKTQENGTCTLILGCTVEKGDHVAYSWSEKAGTHPLNPANSSHLLSLTLGPQHADNIYICTVSNPISNNSQTFSPWPGCRTDPSETKPWAVYAGLLGGVIMILIMVVILQLRRRGKTNHYQTTVEKKSLTIYAQVQKPGPLQKKLDSFPAQDPCTTIYVAATEPVPESVQETNSITVYASVTLPES

SEQ ID NO: 63607 - protein, 298 aa, Homo sapiens
MDPKGLLSLTFVLFLSLAFGASYGTGGRMMNCPKILRQLGSKVLLPLTYERINKSMNKSIHIVVTMAKSLENSVENKIVSLDPSEAGPPRYLGDRYKFYLENLTLGIRESRKEDEGWYLMTLEKNVSVQRFCLQLRLYEQVSTPEIKVLNKTQENGTCTLILGCTVEKGDHVAYSWSEKAGTHPLNPANSSHLLSLTLGPQHADNIYICTVSNPISNNSQTFSPWPGCRTDPSETKPWAVYAGLLGGVIMILIMVVILQLRRRGKTNHYQTTVEKKSLTIYAQVQKPGDSHHQTSDLF

SEQ ID NO: 63608 - protein, 144 aa, Homo sapiens
MDPKGLLSLTFVLFLSLAFGASYGTGGRMMNCPKILRQLGSKVLLPLTYERINKSMNKSIHIVVTMAKSLENSVENKIVSLDPSEAGPPRYLGDRYKFYLENLTLGIRESRKEDEGWYLMTLEKSLHFGYLYFVLGADHDNLQT

SEQ ID NO: 63609 - protein, 269 aa, Homo sapiens
MDPKGLLSLTFVLFLSLAFGASYGTGGRMMNCPKILRQLGSKVLLPLTYERINKSMNKSIHIVVTMAKSLENSVENKIVSLDPSEAGPPRYLGDRYKFYLENLTLGIRESRKEDEGWYLMTLEKNVSVQRFCLQLRLYEQVSTPEIKVLNKTQENGTCTLILGCTVEKGDHVAYSWSEKAGTHPLNPANSSHLLSLTLGPQHADNIYICTVSNPISNNSQTFSPWPGCRTDPSETKPWAVYAGLLGGVIMILIMVVILQLRRRASSEET

SEQ ID NO: 63610 - protein, 342 aa, Homo sapiens
MCSTMSAPTCLAHLPPCFLLLALVLVPSDASGQSSRNDWQVLQPEGPMLVAEGETLLLRCMVVGSCTDGMIKWVKVSTQDQQEIYNFKRGSFPGVMPMIQRTSEPLNCDYSIYIHNVTREHTGTYHCVRFDGLSEHSEMKSDEGTSVLVKGAGDPEPDLWIIQPQELVLGTTGDTVFLNCTVLGDGPPGPIRWFQGAGLSREAIYNFGGISHPKETAVQASNNDFSILLQNVSSEDAGTYYCVKFQRKPNRQYLSGQGTSLKVKAKSTSSKEAEFTSEPATEMSPTGLLVVFAPVVLGLKAITLAALLLALATSRRSPGQEDVKTTGPAGAMNTLAWSKGQE

SEQ ID NO: 63611 - protein, 207 aa, Homo sapiens
MCSTMSAPTCLAHLPPCFLLLALVLVPSDASGQSSRNDWQVLQPEGPMLVAEGAGDPEPDLWIIQPQELVLGTTGDTVFLNCTVLGDGPPGPIRWFQGAGLSREAIYNFGGISHPKETAVQASNNDFSILLQNVSSEDAGTYYCVKFQRKPNRQYLSGQGTSLKVKEQNLPLPKRQNSPVNLQLRCLQQVSVPTSVESMSPPQARGP

SEQ ID NO: 63612 - protein, 207 aa, Homo sapiens; identical to SEQ ID NO: 63611

SEQ ID NO: 63613 - protein, 244 aa, Homo sapiens
MCSTMSAPTCLAHLPPCFLLLALVLVPSDASGQSSRNDWQVLQPEGPMLVAEGAGDPEPDLWIIQPQELVLGTTGDTVFLNCTVLGDGPPGPIRWFQGAGLSREAIYNFGGISHPKETAVQASNNDFSILLQNVSSEDAGTYYCVKFQRKPNRQYLSGQGTSLKVKAKSTSSKEAEFTSEPATEMSPTGLLVVFAPVVLGLKAITLAALLLALATSRRSPGQEDVKTTGPAGAMNTLAWSKGQE

SEQ ID NO: 63614 - protein, 210 aa, Homo sapiens
MKSDEGTSVLVKGAGDPEPDLWIIQPQELVLGTTGDTVFLNCTVLGDGPPGPIRWFQGAGLSREAIYNFGGISHPKETAVQASNNDFSILLQNVSSEDAGTYYCVKFQRKPNRQYLSGQGTSLKVKAKSTSSKEAEFTSEPATEMSPTGERTHLSGVNESPTGKGAMNGLVMGREQSQTPGANLPPRMLPGLHLNCRTRTPENHVITAQL

SEQ ID NO: 63615 - protein, 276 aa, Homo sapiens
MPVPASWPHPPGPFLLLTLLLGLTEVAGEEELQMIQPEKLLLVTVGKTATLHCTVTSLLPVGPVLWFRGVGPGRELIYNQKEGHFPRVTTVSDLTKRNNMDFSIRISSITPADVGTYYCVKFRKGSPENVEFKSGPGTEMALGAKPSAPVVLGPAARTTPEHTVSFTCESHGFSPRDITLKWFKNGNELSDFQTNVDPTGQSVAYSIRSTARVVLDPWDVRSQVICEVAHVTLQGDPLRGTANLSEAIRGPASSLTALLLIAVLLGPIYVPWKQKT

SEQ ID NO: 63616 - protein, 387 aa, Homo sapiens
MPVPASWPHPPGPFLLLTLLLGLTEVAGEEELQMIQPEKLLLVTVGKTATLHCTVTSLLPVGPVLWFRGVGPGRELIYNQKEGHFPRVTTVSDLTKRNNMDFSIRISSITPADVGTYYCVKFRKGSPENVEFKSGPGTEMALGAKPSAPVVLGPAARTTPEHTVSFTCESHGFSPRDITLKWFKNGNELSDFQTNVDPTGQSVAYSIRSTARVVLDPWDVRSQVICEVAHVTLQGDPLRGTANLSEAIRVPPTLEVTQQPMRVGNQVNVTCQVRKFYPQSLQLTWSENGNVCQRETASTLTENKDGTYNWTSWFLVNISDQRDDVVLTCQVKHDGQLAVSKRLALEVTVHQKDQSSDATPGPASSLTALLLIAVLLGPIYVPWKQKT

SEQ ID NO: 63617 - protein, 170 aa, Homo sapiens
MPVPASWPHPPGPFLLLTLLLGLTEVAGEEELQMIQPEKLLLVTVGKTATLHCTVTSLLPVGPVLWFRGVGPGRELIYNQKEGHFPRVTTVSDLTKRNNMDFSIRISSITPADVGTYYCVKFRKGSPENVEFKSGPGTEMALGGPASSLTALLLIAVLLGPIYVPWKQKT

SEQ ID NO: 63618 - protein, 354 aa, Homo sapiens
MIQPEKLLLVTVGKTATLHCTVTSLLPVGPVLWFRGVGPGRELIYNQKEGHFPRVTTVSDLTKRNNMDFSIRISSITPADVGTYYCVKFRKGSPENVEFKSGPGTEMALGAKPSAPVVLGPAARTTPEHTVSFTCESHGFSPRDITLKWFKNGNELSDFQTNVDPTGQSVAYSIRSTARVVLDPWDVRSQVICEVAHVTLQGDPLRGTANLSEAIRVPPTLEVTQQPMRVGNQVNVTCQVRKFYPQSLQLTWSENGNVCQRETASTLTENKDGTYNWTSWFLVNISDQRDDVVLTCQVKHDGQLAVSKRLALEVTVHQKDQSSDATPGPASSLTALLLIAVLLGPIYVPWKQKT

SEQ ID NO: 63619 - protein, 276 aa, Homo sapiens; identical to SEQ ID NO: 63615

SEQ ID NO: 63620 - protein, 461 aa, Homo sapiens
MAPQSLPSSRMAPLGMLLGLLMAACFTFCLSHQNLKEFALTNPEKSSTKETERKETKAEEELDAEVLEVFHPTHEWQALQPGQAVPAGSHVRLNLQTGEREAKLQYEDKFRNNLKGKRLDINTNTYTSQDLKSALAKFKEGAEMESSKEDKARQAEVKRLFRPIEELKKDFDELNVVIETDMQIMVRLINKFNSSSSSLEEKIAALFDLEYYVHQMDNAQDLLSFGGLQVVINGLNSTEPLVKEYAAFVLGAAFSSNPKVQVEAIEGGALQKLLVILATEQPLTAKKKVLFALCSLLRHFPYAQRQFLKLGGLQVLRTLVQEKGTEVLAVRVVTLLYDLVTEKMFAEEEAELTQEMSPEKLQQYRQVHLLPGLWEQGWCEITAHLLALPEHDAREKVLQTLGVLLTTCRDRYRQDPQLGRTLASLQAEYQVLASLELQDGEDEGYFQELLGSVNSLLKELR

SEQ ID NO: 63621 - protein, 461 aa, Homo sapiens; identical to SEQ ID NO: 63620

SEQ ID NO: 63622 - protein, 95 aa, Homo sapiens
MAPQSLPSSRMAPLGMLLGLLMAACFTFCLSHQNLKEFALTNPEKSSTKETERKETKAEEELDAEVLEVFHPTHEWQALQPGQAVPAGSHVRLNL

SEQ ID NO: 63623 - protein, 163 aa, Homo sapiens
MAPQSLPSSRMAPLGMLLGLLMAACFTFCLSHQNLKEFALTNPEKSSTKETERKETKAEEELDAEVLEVFHPTHEWQALQPGQAVPAGSHVRLNLQTGEREAKLQYEDKFRNNLKGKRLDINTNTYTSQDLKSALAKFKEGAEMESSKEDKARQAEVKRLFRP

SEQ ID NO: 63624 - protein, 123 aa, Homo sapiens
MAPQSLPSSRMAPLGMLLGLLMAACFTFCLSHQNLKEFALTNPEKSSTKETERKETKAEEELDAEVLEVFHPTHEWQALQPGQAVPAGSHVRLNLQTGEREAKLQYEDKFRNNLKGKRLDINT

SEQ ID NO: 63625 - protein, 192 aa, Homo sapiens
MAACFTFCLSHQNLKEFALTNPEKSSTKETERKETKAEEELDAEVLEVFHPTHEWQALQPGQAVPAGSHVRLNLQTGEREAKLQYEDKFRNNLKGKRLDINTNTYTSQDLKSALAKFKEGAEMESSKEDKMDNAQDLLSFGGLQVVINGLNSTEPLVKEYAAFVLGAAFSSNPKVQVEAIEGGALQKLLVIL

SEQ ID NO: 63626 - protein, 1273 aa, Homo sapiens
MKRRLDDQESPVYAAQQRRIPGSTEAFPHQHRVLAPAPPVYEAVSETMQSATGIQYSVTPSYQVSAMPQSSGSHGPAIAAVHSSHHHPTAVQPHGGQVVQSHAHPAPPVAPVQGQQQFQRLKVEDALSYLDQVKLQFGSQPQVYNDFLDIMKEFKSQSIDTPGVISRVSQLFKGHPDLIMGFNTFLPPGYKIEVQTNDMVNVTTPGQVHQIPTHGIQPQPQPPPQHPSQPSAQSAPAPAQPAPQPPPAKVSKPSQLQAHTPASQQTPPLPPYASPRSPPVQPHTPVTISLGTAPSLQNNQPVEFNHAINYVNKIKNRFQGQPDIYKAFLEILHTYQKEQRNAKEAGGNYTPALTEQEVYAQVARLFKNQEDLLSEFGQFLPDANSSVLLSKTTAEKVDSVRNDHGGTVKKPQLNNKPQRPSQNGCQIRRHPTGTTPPVKKKPKLLNLKDSSMADASKHGGGTESLFFDKVRKALRSAEAYENFLRCLVIFNQEVISRAELVQLVSPFLGKFPELFNWFKNFLGYKESVHLETYPKERATEGIAMEIDYASCKRLGSSYRALPKSYQQPKCTGRTPLCKEVLNDTWVSFPSWSEDSTFVSSKKTQYEEHIYRCEDERFELDVVLETNLATIRVLEAIQKKLSRLSAEEQAKFRLDNTLGGTSEVIHRKALQRIYADKAADIIDGLRKNPSIAVPIVLKRLKMKEEEWREAQRGFNKVWREQNEKYYLKSLDHQGINFKQNDTKVLRSKSLLNEIESIYDERQEQATEENAGVPVGPHLSLAYEDKQILEDAAALIIHHVKRQTGIQKEDKYKIKQIMHHFIPDLLFAQRGDLSDVEEEEEEEMDVDEATGAVKKHNGVGGSPPKSKLLFSNTAAQKLRGMDEVYNLFYVNNNWYIFMRLHQILCLRLLRICSQAERQIEEENREREWEREVLGIKRDKSDSPAIQLRLKEPMDVDVEDYYPAFLDMVRSLLDGNIDSSQYEDSLREMFTIHAYIAFTMDKLIQSIVRQLQHIVSDEICVQVTDLYLAENNNGATGGQLNTQNSRSLLESTYQRKAEQLMSDENCFKLMFIQSQGQVQLTIELLDTEEENSDDPVEAERWSDYVERYMNSDTTSPELREHLAQKPVFLPRNLRRIRKCQRGREQQEKEGKEGNSKKTMENVDSLDKLECRFKLNSYKMVYVIKSEDYMYRRTALLRAHQSHERVSKRLHQRFQAWVDKWTKEHVPREMAAETSKWLMGEGLEGLVPCTTTCDTETLHFVSINKYRVKYGTVFKAP

SEQ ID NO: 63627 - protein, 1273 aa, Homo sapiens; identical to SEQ ID NO: 63626

SEQ ID NO: 63628 - protein, 1273 aa, Homo sapiens; identical to SEQ ID NO: 63626

SEQ ID NO: 63629 - protein, 1130 aa, Homo sapiens
MAHAGGGSGGSGAGGPAGRGLSGARWGRSGSAGHEKLPVHVEDALTYLDQVKIRFGSDPATYNGFLEIMKEFKSQSIDTPGVIRRVSQLFHEHPDLIVGFNAFLPLGYRIDIPKNGKLNIQSPLTSQENSHNHGDGAEDFKQQVPYKEDKPQVPLESDSVEFNNAISYVNKIKTRFLDHPEIYRSFLEILHTYQKEQLNTRGRPFRGMSEEEVFTEVANLFRGQEDLLSEFGQFLPEAKRSLFTGNGPCEMHSVQKNEHDKTPEHSRKRSRPSLLRPVSAPAKKKMKLRGTKDLSIAAVGKYGTLQEFSFFDKVRRVLKSQEVYENFLRCIALFNQELVSGSELLQLVSPFLGKFPELFAQFKSFLGVKELSFAPPMSDRSGDGISREIDYASCKRIGSSYRALPKTYQQPKCSGRTAICKEVLNDTWVSFPSWSEDSTFVSSKKTPYEEQLHRCEDERFELDVVLETNLATIRVLESVQKKLSRMAPEDQEKFRLDDSLGGTSEVIQRRAIYRIYGDKAPEIIESLKKNPVTAVPVVLKRLKAKEEEWREAQQGFNKIWREQYEKAYLKSLDHQAVNFKQNDTKALRSKSLLNEIESVYDEHQEQHSEGRSAPSSEPHLIFVYEDRQILEDAAALISYYVKRQPAIQKEDQGTIHQLLHQFVPSLFFSQQLDLGASEESADEDRDSPQGQTTDPSERKKPAPGPHSSPPEEKGAFGDAPATEQPPLPPPAPHKPLDDVYSLFFANNNWYFFLRLHQTLCSRLLKIYRQAQKQLLEYRTEKEREKLLCEGRREKGSDPAMELRLKQPSEVELEEYYPAFLDMVRSLLEGSIDPTQYEDTLREMFTIHAYVGFTMDKLVQNIARQLHHLVSDDVCLKVVELYLNEKKRGAAGGNLSSRCVRAARETSYQWKAERCMADENCFKVMFLQRKGQVIMTIELLDTEEAQTEDPVEVQHLARYVEQYVGTEGASSSPTEGFLLKPVFLQRNLKKFRRRWQSEQARALRGEARSSWKRLVGVESACDVDCRFKLSTHKMVFIVNSEDYMYRRGTLCRAKQVQPLVLLRHHQHFEEWHSRWLEDNVTVEAASLVQDWLMGEEDEDMVPCKTLCETVHVHGLPVTRYRVQYSRRPASP

SEQ ID NO: 63630 - protein, 1162 aa, Homo sapiens
MAHAGGGSGGSGAGGPAGRGLSGARWGRSGSAGHEKLPVHVEDALTYLDQVKIRFGSDPATYNGFLEIMKEFKSQSIDTPGVIRRVSQLFHEHPDLIVGFNAFLPLGYRIDIPKNGKLNIQSPLTSQENSHNHGDGAEDFKQQVPYKEDKPQVPLESDSVEFNNAISYVNKIKTRFLDHPEIYRSFLEILHTYQKEQLNTRGRPFRGMSEEEVFTEVANLFRGQEDLLSEFGQFLPEAKRSLFTGNGPCEMHSVQKNEHDKTPEHSRKRSRPSLLRPVSAPAKKKMKLRGTKDLSIAAVGKYGTLQEFSFFDKVRRVLKSQEVYENFLRCIALFNQELVSGSELLQLVSPFLGKFPELFAQFKSFLGVKELSFAPPMSDRSGDGISREIDYASCKRIGSSYRALPKTYQQPKCSGRTAICKELDHWTLLQGSWTDDYCMSKFKNTCWIPGYSAGVLNDTWVSFPSWSEDSTFVSSKKTPYEEQLHRCEDERFELDVVLETNLATIRVLESVQKKLSRMAPEDQEKFRLDDSLGGTSEVIQRRAIYRIYGDKAPEIIESLKKNPVTAVPVVLKRLKAKEEEWREAQQGFNKIWREQYEKAYLKSLDHQAVNFKQNDTKALRSKSLLNEIESVYDEHQEQHSEGRSAPSSEPHLIFVYEDRQILEDAAALISYYVKRQPAIQKEDQGTIHQLLHQFVPSLFFSQQLDLGASEESADEDRDSPQGQTTDPSERKKPAPGPHSSPPEEKGAFGDAPATEQPPLPPPAPHKPLDDVYSLFFANNNWYFFLRLHQTLCSRLLKIYRQAQKQLLEYRTEKEREKLLCEGRREKGSDPAMELRLKQPSEVELEEYYPAFLDMVRSLLEGSIDPTQYEDTLREMFTIHAYVGFTMDKLVQNIARQLHHLVSDDVCLKVVELYLNEKKRGAAGGNLSSRCVRAARETSYQWKAERCMADENCFKVMFLQRKGQVIMTIELLDTEEAQTEDPVEVQHLARYVEQYVGTEGASSSPTEGFLLKPVFLQRNLKKFRRRWQSEQARALRGEARSSWKRLVGVESACDVDCRFKLSTHKMVFIVNSEDYMYRRGTLCRAKQVQPLVLLRHHQHFEEWHSRWLEDNVTVEAASLVQDWLMGEEDEDMVPCKTLCETVHVHGLPVTRYRVQYSRRPASP

SEQ ID NO: 63631 - protein, 1056 aa, Homo sapiens
MSSQQFPRLGAPSTGLSQAPSQIANSGSAGLINPAATVNDESGRDSEVSAREHMSSSSSLQSREEKQEPVVVRPYPQVQMLSTHHAVASATPVAVTAPPAHLTPAVPLSFSEGLMKPPPKPTMPSRPIAPAPPSTLSLPPKVPGQVTVTMESSIPQASAIPVATISGQQGHPSNLHHIMTTNVQMSIIRSNAPGPPLHIGASHLPRGAAAAAVMSSSKVTTVLRPTSQLPNAATAQPAVQHIIHQPIQSRPPVTTSNAIPPAVVATVSATRAQSPVITTTAAHATDSALSRPTLSIQHPPSAAISIQRPAQSRDVTTRITLPSHPALGTPKQQLHTMAQKTIFSTGTPVAAATVAPILATNTIPSATTAGSVSHTQAPTSTIVTMTVPSHSSHATAVTTSNIPVAKVVPQQITHTSPRIQPDYPAERSSLIPISGHRASPNPVAMETRSDNRPSVPVQFQYFLPTYPPSAYPLAAHTYTPITSSVSTIRQYPVSAQAPNSAITAQTGVGVASTVHLNPMQLMTVDASHARHIQGIQPAPISTQGIQPAPIGTPGIQPAPLGTQGIHSATPINTQGLQPAPMGTQQPQPEGKTSVVLADGATIVANPISNPFSAAPAATTVVQTHSQSASTNAPAQGSSPRPSILRKKPATDGMAVRKTLIPPQPPDVASPRVESSMRSTSGSPRPAGAKPKSEIHVSMATPVTVSMETVSNQNNDQPTIAVPPTAQQPPPTIPTMIAAASPPSQPAVALSTIPGAVPITPPITTIAAAPPPSVTVGGSLSSVLGPPVPEIKVKEEVEPMDIMRPVSAVPPLATNTVSPSLALLANNLSMPTSDLPPGASPRKKPRKQQHVISTEEGDMMETNSTDDEKSTAKSLLVKAEKRKSPPKEYIDEEGVRYVPVRPRPPITLLRHYRNPWKAAYHHFQRYSDVRVKEEKKAMLQEIANQKGVSCRAQGWKVHLCAAQLLQLTNLEHDVYERLTNLQEGIIPKKKAATDDDLHRINELIQGNMQRCKLVMDQISEARDSMLKVLDHKDRVLKLLNKNGTVKKVSKLKRKEKV

SEQ ID NO: 63632 - protein, 1048 aa, Homo sapiens
MGPPRHPQAGEIEAGGAGGGRRLQVEMSSQQFPRLGAPSTGLSQAPSQIANSGSAGLINPAATVNDESGRDSEVSAREHMSSSSSLQSREEKQEPVVVRPYPQVQMLSTHHAVASATPVAVTAPPAHLTPAVPLSFSEGLMKPPPKPTMPSRPIAPAPPSTLSLPPKVPGQVTVTMESSIPQASAIPVATISGQQGHPSNLHHIMTTNVQMSIIRSNAPGPPLHIGASHLPRGAAAAAVMSSSKVTTVLRPTSQLPNAATAQPAVQHIIHQPIQSRPPVTTSNAIPPAVVATVSATRAQSPVITTTAAHATDSALSRPTLSIQHPPSAAISIQRPAQSRDVTTRITLPSHPALGTPKQQLHTMAQKTIFSTGTPVAAATVAPILATNTIPSATTAGSVSHTQAPTSTIVTMTVPSHSSHATAVTTSNIPVAKVVPQQITHTSPRIQPDYPAERSSLIPISGHRASPNPVAMETRSDNRPSVPVQFQYFLPTYPPSAYPLAAHTYTPITSSVSTIRQYPVSAQAPNSAITAQTGVGVASTVHLNPMQLMTVDASHARHIQGIQPAPISTQGIQPAPIGTPGIQPAPLGTQGIHSATPINTQGLQPAPMGTQQPQPEGKTSAVVLADGATIVANPISNPFSAAPAATTVVQTHSQSASTNAPAQGSSPRPSILRKKPATDGAKPKSEIHVSMATPVTVSMETVSNQNNDQPTIAVPPTAQQPPPTIPTMIAAASPPSQPAVALSTIPGAVPITPPITTIAAAPPPSVTVGGSLSSVLGPPVPEIKVKEEVEPMDIMRPVSAVPPLATNTVSPSLALLANNLSMPTSDLPPGASPRKKPRKQQHVISTEEGDMMETNSTDDEKSTAKSLLVKAEKRKSPPKEYIDEEGVRYVPVRPRPPITLLRHYRNPWKAAYHHFQRYSDVRVKEEKKAMLQEIANQKGVSCRAQGWKVHLCAAQLLQLTNLEHDVYERLTNLQEGIIPKKKAATDDDLHRINELIQGNMQRCKLVMDQISEARDSMLKVLDHKDRVLKLLNKNGTVKKVSKLKRKEKV

SEQ ID NO: 63633 - protein, 1083 aa, Homo sapiens
MGPPRHPQAGEIEAGGAGGGRRLQVEMSSQQFPRLGAPSTGLSQAPSQIANSGSAGLINPAATVNDESGRDSEVSAREHMSSSSSLQSREEKQEPVVVRPYPQVQMLSTHHAVASATPVAVTAPPAHLTPAVPLSFSEGLMKPPPKPTMPSRPIAPAPPSTLSLPPKVPGQVTVTMESSIPQASAIPVATISGQQGHPSNLHHIMTTNVQMSIIRSNAPGPPLHIGASHLPRGAAAAAVMSSSKVTTVLRPTSQLPNAATAQPAVQHIIHQPIQSRPPVTTSNAIPPAVVATVSATRAQSPVITTTAAHATDSALSRPTLSIQHPPSAAISIQRPAQSRDVTTRITLPSHPALGTPKQQLHTMAQKTIFSTGTPVAAATVAPILATNTIPSATTAGSVSHTQAPTSTIVTMTVPSHSSHATAVTTSNIPVAKVVPQQITHTSPRIQPDYPAERSSLIPISGHRASPNPVAMETRSDNRPSVPVQFQYFLPTYPPSAYPLAAHTYTPITSSVSTIRQYPVSAQAPNSAITAQTGVGVASTVHLNPMQLMTVDASHARHIQGIQPAPISTQGIQPAPIGTPGIQPAPLGTQGIHSATPINTQGLQPAPMGTQQPQPEGKTSAVVLADGATIVANPISNPFSAAPAATTVVQTHSQSASTNAPAQGSSPRPSILRKKPATDGMAVRKTLIPPQPPDVASPRVESSMRSTSGSPRPAGAKPKSEIHVSMATPVTVSMETVSNQNNDQPTIAVPPTAQQPPPTIPTMIAAASPPSQPAVALSTIPGAVPITPPITTIAAAPPPSVTVGGSLSSVLGPPVPEIKVKEEVEPMDIMRPVSAVPPLATNTVSPSLALLANNLSMPTSDLPPGASPRKKPRKQQHVISTEEGDMMETNSTDDEKSTAKSLLVKAEKRKSPPKEYIDEEGVRYVPVRPRPPITLLRHYRNPWKAAYHHFQRYSDVRVKEEKKAMLQEIANQKGVSCRAQGWKVHLCAAQLLQLTNLEHDVYERLTNLQEGIIPKKKAATDDDLHRINELIQGNMQRCKLVMDQISEARDSMLKVLDHKDRVLKLLNKNGTVKKVSKLKRKEKV

SEQ ID NO: 63634 - protein, 262 aa, Homo sapiens
MSSQQFPRLGAPSTGLSQAPSQIANSGSAGLINPAATVNDESGRDSEVSAREHMSSSSSLQSREEKQEPVVVRPYPQVQMLSTHHAVASATPVAVTAPPAHLTPAVPLSFSEGLMKPPPKPTMPSRPIAPAPPSTLSLPPKVPGQVTVTMESSIPQASAIPVATISGQQGHPSNLHHIMTTNVQMSIIRSNAPGPPLHIGASHLPRGAAAAAVMSSSKVTTVLRPTSQLPNAATAQPAVQHIIHQPIQSRPPVTTSNAIPPA

SEQ ID NO: 63635 - protein, 268 aa, Homo sapiens
MQQIRPPFIRGPPHHASNPNSPLSNPMLPGIGPPPGGPRNLGPTSSPMHRPMLSPHIHPPSTPTMPGNPPGLLPPPPPGAPLPSLPFPPVSMMPNGPMPVPQMMNFGLPSLAPLVPPPTLLVPYPVIVPLPVPIPIPIPIPHVSDSKPPKKLLSPEEPAVSELESVKENNCASNCHLDGEAAKKLMGEEALAGGDKSDPNLNNPADEDHAYALRMLPKTGCVIQPVPKPAEKAAMAPCIISSPMLSAGPEDLEPPLKRRCLRIRNQNK

SEQ ID NO: 63636 - protein, 873 aa, Homo sapiens
MAEMEKEGRPPENKRSRKPAHPVKREINEEMKNFAENTMNELLGWYGYDKVELKDGEDIEFRSYPTDGESRQHISVLKENSLPKPKLPEDSVISPYNISTGYSGLATGNGLSDSPAGSKDHGSVPIIVPLIPPPFIKPPAEDDVSNVQIMCAWCQKVGIKRYSLSMGSEVKSFCSEKCFAACRRAYFKRNKARDEDGHAENFPQQHYAKETPRLAFKNNCELLVCDWCKHIRHTKEYLDFGDGERRLQFCSAKCLNQYKMDIFYKETQANLPAGLCSTLHPPMENKAEGTGVQLLTPDSWNIPLTDARRKAPSPVATAGQSQGPGPSASTTVSPSDTANCSVTKIPTPVPKSIPISETPNIPPVSVQPPASIGPPLGVPPRSPPMVMTNRGPVPLPIFMEQQIMQQIRPPFIRGPPHHASNPNSPLSNPMLPGIGPPPGGPRNLGPTSSPMHRPMLSPHIHPPSTPTMPGNPPGLLPPPPPGAPLPSLPFPPVSMMPNGPMPVPQMMNFGLPSLAPLVPPPTLLVPYPVIVPLPVPIPIPIPIPHVSDSKPPNGFSSNGENFIPNAPGDSAAAGGKPSGHSLSPRDSKQGSSKSADSPPGCSGQALSLAPTPAEHGRSEVVDLTRRAGSPPGPPGAGGQLGFPGVLQGPQDGVIDLTVGHRARLHNVIHRALHAHVKAEREPSAAERRTCGGCRDGHCSPPAAGDPGPGAPAGPEAAAACNVIVNGTRGAAAEGAKSAEPPPEQPPPPPPPAPPKKLLSPEEPAVSELESVKENNCASNCHLDGEAAKKLMGEEALAGGDKSDPNLNNPADEDHAYALRMLPKTGCVIQPVPKPAEKAAMAPCIISSPMLSAGPEDLEPPLKRRCLRIRNQNK

SEQ ID NO: 63637 - protein, 410 aa, Homo sapiens
MPGVCDRAPDFLSPSEDQVLRPALGSSVALNCTAWVVSGPHCSLPSVQWLKDGLPLGIGGHYSLHEYSWVKANLSEVLVSSVLGVNVTSTEVYGAFTCSIQNISFSSFTLQRAGPTSHVAAVLASLLVLLALLLAALLYVKCRLNVLLWYQDAYGEVEINDGKLYDAYVSYSDCPEDRKFVNFILKPQLERRRGYKLFLDDRDLLPRAEPSADLLVNLSRCRRLIVVLSDAFLSRAWCSHSFREGLCRLLELTRRPIFITFEGQRRDPAHPALRLLRQHRHLVTLLLWRPGSVTPSSDFWKEVQLALPRKVQYRPVEGDPQTQLQDDKDPMLILRGRVPEGRALDSEVDPDPEGDLGVRGPVFGEPSAPPHTSGVSLGESRSSEVDVSDLGSRNYSARTDFYCLVSKDDM

SEQ ID NO: 63638 - protein, 504 aa, Homo sapiens
MPGVCDRAPDFLSPSEDQVLRPALGSSVALNCTAWVVSGPHCSLPSVQWLKDGLPLGIGGHYSLHEYSWVKANLSEVLVSSVLGVNVTSTEVYGAFTCSIQNISFSSFTLQRAGPTSHVAAVLASLLVLLALLLAALLYVKCRLNVLLWYQDAYGEVEINDGKLYDAYVSYSDCPEDRKFVNFILKPQLERRRGYKLFLDDRDLLPRAEPSADLLVNLSRCRRLIVVLSDAFLSRAWCSHSFREGLCRLLELTRRPIFITFEGQRRDPAHPALRLLRQHRHLVTLLLWRPGSVTPSSDFWKEVQLALPRKVQYRPVEGDPQTQLQDDKDPMLILRGRVPEGRALDSEVDPDPEGDLGMPAQPHSPTGEAQHRAEWGQAQGTGPGGAPGVEDSSRHREPLHGLCPGGARPSVCLGTSWASQAITAGGEQGQPLAVGLGQGCGWPPQASRSPHPRCPGACLWRAISSTAHQWGLAGREPEQRSGRLGSRLAKLQCPHRLLLPGVQG

SEQ ID NO: 63639 - protein, 410 aa, Homo sapiens; identical to SEQ ID NO: 63637

SEQ ID NO: 63640 - protein, 410 aa, Homo sapiens; identical to SEQ ID NO: 63637

SEQ ID NO: 63641 - protein, 504 aa, Homo sapiens; identical to SEQ ID NO: 63638

SEQ ID NO: 63642 - protein, 368 aa, Homo sapiens
MFAKGKGSAVPSDGQAREKLALYVYEYLLHVGAQKSAQTFLSEIRWEKNITLGEPPGFLHSWWCVFWDLYCAAPERRDTCEHSSEAKAFHDYSAAAAPSPVLGNIPPNDGMPGGPIPPGFFQGPPGSQPSPHAQPPPHNPSSMMGPHSQPPGGVPGTQPLLPNSMDPTRQQGHPNMGGSMQRMNPPRGMGPMGPGPQNYGSGMRPPPNSLGPAMPGINMGPGAGRPWPNPNSANSIPYSSSSPGTYVGPPGGGGPPGTPIMPSPADSTNSSDNIYTMINPVPPGGSRSNFPMGPGSDGPMGGMGGMEPHHMNGSLGSGDIDGLPKNSPNNISGISNPPGTPRDDGELGGNFLHSFQNDNYSPSMTMSV

SEQ ID NO: 63643 - protein, 361 aa, Homo sapiens
MFAKGKGSAVPSDGQAREKLALYVYEYLLHVGAQKSAQTFLSEIRWEKNITLGEPPGFLHSWWCVFWDLYCAAPERRDTCEHSSEAKAFHDYSAAAAPSPVLGNIPPNDGMPGGPIPPGFFQPFMSPRYAGGPRPPIRMGNQPPGGVPGTQPLLPNSMDPTRQQGHPNMGGSMQRMNPPRGMGPMGPGPQNYGSGMRPPPNSLGPAMPGINMGPGAGRPWPNPNSANSIPYSSSSPGTYVGPPGGGGPPGTPIMPSPADSTNSSDNIYTMINPVPPGGSRSNFPMGPGSDGPMGGMGGMEPHHMNGSLGSGDIDGLPKNSPNNISGISNPPGTPRDDGELGGNFLHSFQNDNYSPSMTMSV

SEQ ID NO: 63644 - protein, 388 aa, Homo sapiens
MFAKGKGSAVPSDGQAREKLALYVYEYLLHVGAQKSAQTFLSEIRWEKNITLGEPPGFLHSWWCVFWDLYCAAPERRDTCEHSSEAKAFHDYSAAAAPSPVLGNIPPNDGMPGGPIPPGFFQGPPGSQPSPHAQPPPHNPSSMMGPHSQPFMSPRYAGGPRPPIRMGNQPPGGVPGTQPLLPNSMDPTRQQGHPNMGGSMQRMNPPRGMGPMGPGPQNYGSGMRPPPNSLGPAMPGINMGPGAGRPWPNPNSANSIPYSSSSPGTYVGPPGGGGPPGTPIMPSPADSTNSSDNIYTMINPVPPGGSRSNFPMGPGSDGPMGGMGGMEPHHMNGSLGSGDIDGLPKNSPNNISGISNPPGTPRDDGELGGNFLHSFQNDNYSPSMTMSV

SEQ ID NO: 63645 - protein, 278 aa, Homo sapiens
MPGGPIPPGFFQGPPGSQPSPHAQPPPHNPSSMMGPHSQPFMSPRYAGGPRPPIRMGNQPPGGVPGTQPLLPNSMDPTRQQGHPNMGGSMQRMNPPRGMGPMGPGPQNYGSGMRPPPNSLGPAMPGINMGPGAGRPWPNPNSANSIPYSSSSPGTYVGPPGGGGPPGTPIMPSPADSTNSSDNIYTMINPVPPGGSRSNFPMGPGSDGPMGGMGGMEPHHMNGSLGSGDIDGLPKNSPNNISGISNPPGTPRDDGELGGNFLHSFQNDNYSPSMTMSV

SEQ ID NO: 63646 - protein, 156 aa, Homo sapiens
PPGGVPGTQPLLPNSMDPTRQQGHPNMGGSMQRMNPPRGMGPMGPGPQNYGSGMRPPPNSLGPAMPGINMGPGAGRPWPNPNSANSIPYSSSSPGTYVGPPGGGGPPGTPIMPSPADSTNSSDNIYTMINPVPPGGSRSNVSLLSNNLHIRHHNKS

SEQ ID NO: 63647 - protein, 385 aa, Homo sapiens
MYAKGGKGSAVPSDSQAREKLALYVYEYLLHIGAQKSAQTFLSEIRWEKNITLGEPPGFLHSWWCVFWDLYCAAPDRREACEHSGEAKAFQDYSAAAAPSPVMGSMAPGDTMAAGSMAAGFFQGPPGSQPSPHNPNAPMMGPHGQPFMSPRFPGGPRPTLRMPSQPPAGLPGSQPLLPGAMEPSPRAQGHPSMGGPMQRVTPPRGMASVGPQSYGGGMRPPPNSLAGPGLPAMNMGPGVRGPWASPSGNSIPYSSSSPGSYTGPPGGGGPPGTPIMPSPGDSTNSSENMYTIMNPIGQGAGRANFPLGPGPEGPMAAMSAMEPHHVNGSLGSGDMDGLPKSSPGAVAGLSNAPGTPRDDGEMAAAGTFLHPFPSESYSPGMTMSV

SEQ ID NO: 63648 - protein, 363 aa, Homo sapiens
MYAKGGKGSAVPSDSQAREKLALYVYEYLLHIGAQKSAQTFLSEIRWEKNITLGEPPGFLHSWWCVFWDLYCAAPDRREACEHSGEAKAFQDYSAAAAPSPVMGSMAPGDTMAAGSMAAGFFQPFMSPRFPGGPRPTLRMPSQPPAGLPGSQPLLPGAMEPSPRAQGHPSMGGPMQRVTPPRGMASVGPQSYGGGMRPPPNSLAGPGLPAMNMGPGVRGPWASPSGNSIPYSSSSPGSYTGPPGGGGPPGTPIMPSPGDSTNSSENMYTIMNPIGQGAGRANFPLGPGPEGPMAAMSAMEPHHVNGSLGSGDMDGLPKSSPGAVAGLSNAPGTPRDDGEMAAAGTFLHPFPSESYSPGMTMSV

SEQ ID NO: 63649 - protein, 766 aa, Homo sapiens
MKEKSKNAARTRREKENSEFYELAKLLPLPSAITSQLDKASIIRLTTSYLKMRVVFPEGLGEAWGHSSRTSPLDNVGRELGSHLLQTLDGFIFVVAPDGKIMYISETASVHLGLSQVELTGNSIYEYIHPADHDEMTAVLTAHQPYHSHFVQEYEIERSFFLRMKCVLAKRNAGLTCGGYKVIHCSGYLKIRQYSLDMSPFDGCYQNVGLVAVGHSLPPSAVTEIKLHSNMFMFRASLDMKLIFLDSRVAELTGYEPQDLIEKTLYHHVHGCDTFHLRCAHHLLLVKGQVTTKYYRFLAKHGGWVWVQSYATIVHNSRSSRPHCIVSVNYVLTDTEYKGLQLSLDQISASKPAFSYTSSSTPTMTDNRKGAKSRLSSSKSKSRTSPYPQYSGFHTERSESDHDSQWGGSPLTDTASPQLLDPADRPGSQHDASCAYRQFSDRSSLCYGFALDHSRLVEERHFHTQACEGGRCEAGRYFLGTPQAGREPWWGSRAALPLTKASPESREAYENSMPHIASVHRIHGRGHWDEDSVVSSPDPGSASESGDRYRTEQYQSSPHEPSKIETLIRATQQMIKEEENRLQLRKAPSDQLASINGAGKKHSLCFANYQQPPPTGEVCHGSALANTSPCDHIQQREGKMLSPHENDYDNSPTALSRISSPNSDRISKSSLILAKDYLHSDISPHQTAGDHPTVSPNCFGSHRQYFDKHAYTLTGYALEHLYDSETIRNYSLGCNGSHFDVTSHLRMQPDPAQGHKGTSVIITNGS

SEQ ID NO: 63650 - protein, 766 aa, Homo sapiens; identical to SEQ ID NO: 63649

SEQ ID NO: 63651 - protein, 667 aa, Homo sapiens
MKEKSKNAAKTRREKENGEFYELAKLLPLPSAITSQLDKASIIRLTTSYLKMRAVFPEGLGDAWGQPSRAGPLDGVAKELGSHLLQTLDGFVFVVASDGKIMYISETASVHLGLSQVELTGNSIYEYIHPSDHDEMTAVLTAHQPLHHHLLQEYEIERSFFLRMKCVLAKRNAGLTCSGYKVIHCSGYLKIRQYMLDMSLYDSCYQIVGLVAVGQSLPPSAITEIKLYSNMFMFRASLDLKLIFLDSRVTEVTGYEPQDLIEKTLYHHVHGCDVFHLRYAHHLLLVKGQVTTKYYRLLSKRGGWVWVQSYATVVHNSRSSRPHCIVSVNYVLTEIEYKELQLSLEQVSTAKSQDSWRTALSTSQETRKLVKPKNTKMKTKLRTNPYPPQQYSSFQMDKLECGQLGNWRASPPASAAAPPELQPHSESSDLLYTPSYSLPFSYHYGHFPLDSHVFSSKKPMLPAKFGQPQGSPCEVARFFLSTLPASGECQWHYANPLVPSSSSPAKNPPEPPANTARHSLVPSYEAPAAAVRRFGEDTAPPSFPSCGHYREEPALGPAKAARQAARDGARLALARAAPECCAPPTPEAPGAPAQLPFVLLNYHRVLARRGPLGGAAPAASGLACAPGGPEAATGALRLRHPSPAATSPPGAPLPHYLGASVIITNGR

SEQ ID NO: 63652 - protein, 570 aa, Homo sapiens
MKEKSKNAAKTRREKENGEFYELAKLLPLPSAITSQLDKASIIRLTTSYLKMRAVFPEGLGDAWGQPSRAGPLDGVAKELGSHLLQTLDGFVFVVASDGKIMYISETASVHLGLSQVELTGNSIYEYIHPSDHDEMTAVLTAHQPLHHHLLQEYEIERSFFLRMKCVLAKRNAGLTCSGYKVIHCSGYLKIRQYMLDMSLYDSCYQIVGLVAVGQSLPPSAITEIKLYSNMFMFRASLDLKLIFLDSRVTEVTGYEPQDLIEKTLYHHVHGCDVFHLRYAHHLLLVKGQVTTKYYRLLSKRGGWVWVQSYATVVHNSRSSRPHCIVSVNYVLTEIEYKELQLSLEQVSTAKSQDSWRTALSTSQETRKLVKPKNTKMKTKLRTNPYPPQQYSSFQMDKLECGQLGNWRASPPASAAAPPELQPHSESSDLLYTPSYSLPFSYHYGHFPLDSHVFSSKKPMLPAKFGQPQGSPCEVARFFLSTLPASGECQWHYANPLVPSSSSPAKNPPEPPANTARHSLVPSYEGGSGLLVGKVGGLRTAGSRSSHGGGWQMETEPSRFGQTCPLSASK

SEQ ID NO: 63653 - protein, 148 aa, Homo sapiens
MFRRPVLQVLRQFVRHESETTTSLVLERSLNRVHLLGRVGQDPVLRQVEGKNPVTIFSLATNEMWRSGDSEVYQLGDVSQKTTWHRISVFRPGLRDVAYQYVKKGSRIYLEGKIDYGEYMDKNNVRRQATTIIADNIIFLSDQTKEKE

SEQ ID NO: 63654 - protein, 121 aa, Homo sapiens
MFRRPVLQVLRQFVRHESETTTSLVLERSLNRVHLLGRVGQDPVLRQVEGKNPVTIFSLATNEMWRSGDSEVYQLGDVSQKTTWHRISVFRPGLRDVAYQYVKKGSRIYLEGKIDYGEYMD

SEQ ID NO: 63655 - protein, 148 aa, Homo sapiens; identical to SEQ ID NO: 63653

SEQ ID NO: 63656 - protein, 135 aa, Homo sapiens
MFRRPVLQVLRQFVRHESETTTSLVLERSLNRVHLLGRVGQDPVLRQVEGKNPVTIFSLATNEMWRSGDSEVYQLGDVSQKTTWHRISVFRPGLRDVAYQYVKKGSRIYLEGKIDYGEYMDKNNVRRQATTIIAD

SEQ ID NO: 63657 - protein, 28 aa, Homo sapiens
MFRRPVLQVLRQFVRHESETTTSLVLER

SEQ ID NO: 63658 - protein, 148 aa, Homo sapiens; identical to SEQ ID NO: 63653

SEQ ID NO: 63659 - protein, 148 aa, Homo sapiens; identical to SEQ ID NO: 63653

SEQ ID NO: 63660 - protein, 148 aa, Homo sapiens; identical to SEQ ID NO: 63653

SEQ ID NO: 63661 - protein, 361 aa, Homo sapiens
MYGKGKSNSSAVPSDSQAREKLALYVYEYLLHVGAQKSAQTFLSEIRWEKNITLGEPPGFLHSWWCVFWDLYCAAPERRETCEHSSEAKAFHDYSAAAAPSPVLGNIPPGDGMPVGPVPPGFFQPFMSPRYPGGPRPPLRIPNQALGGVPGSQPLLPSGMDPTRQQGHPNMGGPMQRMTPPRGMVPLGPQNYGGAMRPPLNALGGPGMPGMNMGPGGGRPWPNPTNANSIPYSSASPGNYVGPPGGGGPPGTPIMPSPADSTNSGDNMYTLMNAVPPGPNRPNFPMGPGSDGPMGGLGGMESHHMNGSLGSGDMDSISKNSPNNMSLSNQPGTPRDDGEMGGNFLNPFQSESYSPSMTMSV

SEQ ID NO: 63662 - protein, 314 aa, Homo sapiens [sequence omitted]

SEQ ID NO: 63663 - protein, 341 aa, Homo sapiens
MYGKGKSNSSAVPSDSQAREKLALYVYEYLLHVGAQKSAQTFLSEIRWEKNITLGEPPGFLHSWWCVFWDLYCAAPERRETCEHSSEAKAFHDYSAAAAPSPVLGNIPPGDGMPVGPVPPGFFQALGGVPGSQPLLPSGMDPTRQQGHPNMGGPMQRMTPPRGMVPLGPQNYGGAMRPPLNALGGPGMPGMNMGPGGGRPWPNPTNANSIPYSSASPGNYVGPPGGGGPPGTPIMPSPADSTNSGDNMYTLMNAVPPGPNRPNFPMGPGSDGPMGGLGGMESHHMNGSLGSGDMDSISKNSPNNMSLSNQPGTPRDDGEMGGNFLNPFQSESYSPSMTMSV

SEQ ID NO: 63664 - protein, 399 aa, Homo sapiens
MAFWGWRAAAALRLWGRVVERVEAGGGVGPFQACGCRLVLGGRDDVSAGLRGSHGARGEPLDPARPLQRPPRPEVPRAFRRQPRAAAPSFFFSSIKGGRRSISFSVGASSVVGSGGSSDKGKLSLQDVAELIRARACQRVVVMVGAGISTPSGIPDFRSPGSGLYSNLQQYDLPYPEAIFELPFFFHNPKPFFTLAKELYPGNYKPNVTHYFLRLLHDKGLLLRLYTQNIDGLERVSGIPASKLVEAHGTFASATCTVCQRPFPGEDIRADVMADRVPRCPVCTGVVKPDIVFFGEPLPQRFLLHVVDFPMADLLLILGTSLEVEPFASLTEAVRSSVPRLLINRDLVGPLAWHPRSRDVAQLGDVVHGVESLVELLGWTEEMRDLVQRETGKLDGPDK

SEQ ID NO: 63665 - protein, 318 aa, Homo sapiens
MAFWGWRAAAALRLWGRVVERVEAGGGVGPFQACGCRLVLGGRDDDVAELIRARACQRVVVMVGAGISTPSGIPDFRSPGSGLYSNLQQYDLPYPEAIFELPFFFHNPKPFFTLAKELYPGNYKPNVTHYFLRLLHDKGLLLRLYTQNIDGLERVSGIPASKLVEAHGTFASATCTVCQRPFPGEDIRADVMADRVPRCPVCTGVVKPDIVFFGEPLPQRFLLHVVDFPMADLLLILGTSLEVEPFASLTEAVRSSVPRLLINRDLVGPLAWHPRSRDVAQLGDVVHGVESLVELLGWTEEMRDLVQRETGKLDGPDK

SEQ ID NO: 63666 - protein, 257 aa, Homo sapiens
MVGAGISTPSGIPDFRSPGSGLYSNLQQYDLPYPEAIFELPFFFHNPKPFFTLAKELYPGNYKPNVTHYFLRLLHDKGLLLRLYTQNIDGLERVSGIPASKLVEAHGTFASATCTVCQRPFPGEDIRADVMADRVPRCPVCTGVVKPDIVFFGEPLPQRFLLHVVDFPMADLLLILGTSLEVEPFASLTEAVRSSVPRLLINRDLVGPLAWHPRSRDVAQLGDVVHGVESLVELLGWTEEMRDLVQRETGKLDGPDK

SEQ ID NO: 63667 - protein, 314 aa, Homo sapiens
MKMSFALTFRSAKGRWIANPSQPCSKASIGLFVPASPPLDPEKVKELQRFITLSKRLLVMTGAGISTESGIPDYRSEKVGLYARTDRRPIQHGDFVRSAPIRQRYWARNFVGWPQFSSHQPNPAHWALSTWEKLGKLYWLVTQNVDALHTKAGSRRLTELHGCMDRVLCLDCGEQTPRGVLQERFQVLNPTWSAEAHGLAPDGDVFLSEEQVRSFQVPTCVQCGGHLKPDVVFFGDTVNPDKVDFVHKRVKEADSLLVVGSSLQVYSGYRFILTAWEKKLPIAILNIGPTRSDDLACLKLNSRCGELLPLIDPC

SEQ ID NO: 63668 - protein, 292 aa, Homo sapiens
MRPLQIVPSRLISQLYCGLKPPASTRNQICLKMARPSSSMADFRKFFAKAKHIVIISGAGVSAESGVPTFRGAGGYWRKWQAQDLATPLAFAHNPSRVWEFYHYRREVMGSKEPNAGHRAIAECETRLGKQGRRVVVITQNIDELHRKAGTKNLLEIHGSLFKTRCTSCGVVAENYKSPICPALSGKGCEEAGCGGLLRPHVVWFGENLDPAILEEVDRELAHCDLCLVVGTSSVVYPAAMFAPQVAARGVPVAEFNTETTPATNRFRFHFQGPCGTTLPEALACHENETVS

SEQ ID NO: 63669 - protein, 310 aa, Homo sapiens
MRPLQIVPSRLISQLYCGLKPPASTRNQICLKMARPSSSMADFRKFFAKAKHIVIISGAGVSAESGVPTFRGAGGYWRKWQAQDLATPLAFAHNPSRVWEFYHYRREVMGSKEPNAGHRAIAECETRLGKQGRRVVVITQNIDELHRKAGTKNLLEIHGSLFKTRCTSCGVVAENYKSPICPALSGKGAPEPGTQDASIPVEKLPRCEEAGCGGLLRPHVVWFGENLDPAILEEVDRELAHCDLCLVVGTSSVVYPAAMFAPQVAARGVPVAEFNTETTPATNRFRFHFQGPCGTTLPEALACHENETVS

SEQ ID NO: 63670 - protein, 299 aa, Homo sapiens
MRPLQIVPSRLISQLYCGLKPPASTRNQICLKMARPSSSMADFRKFFAKAKHIVIISGAGVSAESGVPTFRGAGGYWRKWQAQDLATPLAFAHNPSRVWEFYHYRREVMGSKEPNAGHRAIAECETRLGKQGRRVVVITQNIDELHRKAGTKNLLEIHGSLFKTRCTSCGVVAENYKSPICPALSGKGAPEPGTQDASIPVEKLPRCEEAGCGGLLRPHVVWFGENLDPAILEEVDRELAHCDLCLVVGTSSVVYPAAMFAPQVAARGVPVAEFNTETTPATNRFSHLISISSLIIIKN

SEQ ID NO: 63671 - protein, 202 aa, Homo sapiens
MGSKEPNAGHRAIAECETRLGKQGRRVVVITQNIDELHRKAGTKNLLEIHGSLFKTRCTSCGVVAENYKSPICPALSGKGAPEPGTQDASIPVEKLPRCEEAGCGGLLRPHVVWFGENLDPAILEEVDRELAHCDLCLVVGTSSVVYPAAMFAPQVAARGVPVAEFNTETTPATNRFRFHFQGPCGTTLPEALACHENETVS

SEQ ID NO: 63672 - protein, 400 aa, Homo sapiens
MAAGGLSRSERKAAERVRRLREEQQRERLRQVSRILRKAAAERSAEEGRLLAESADLVTELQGRSRRREGLKRRQEEVCDDPEELRGKVRELASAVRNAKYLVVYTGAGISTAASIPDYRGPNGVWTLLQKGRSVSAADLSEAEPTLTHMSITRLHEQKLVQHVVSQNCDGLHLRSGLPRTAISELHGNMYIEVCTSCVPNREYVRVFDVTERTALHRHQTGRTCHKCGTQLRDTIVHFGERGTLGQPLNWEAATEAASRADTILCLGSSLKVLKKYPRLWCMTKPPSRRPKLYIVNLQWTPKDDWAALKLHGKCDDVMRLLMAELGLEIPAYSRWQDPIFSLATPLRAGEEGSHSRKSLCRSREEAPPGDRGAPLSSAPILGGWFGRGCTKRTKRKKVT

SEQ ID NO: 63673 - protein, 320 aa, Homo sapiens
MPGPRRRSPSACPQVSRILRKAAAERSAEEGRLLAESADLVTELQGRSRRREGLKRRQEEVCDDPEELRGKVRELASAVRNAKYLVVYTGAGISTAASIPDYRGPNGVWTLLQKGRSVSAADLSEAEPTLTHMSITRLHEQKLVQHVVSQNCDGLHLRSGLPRTAISELHGNMYIEVCTSCVPNREYVRVFDVTERTALHRHQTGRTCHKCGTQLRDTIVHFGERGTLGQPLNWEAATEAASRADTILCLGSSLKVLKKYPRLWCMTKPPSRRPKLYIVNLQWTPKDDWAALKLHGKCDDVMRLLMAELGLEIPAYSRVL

SEQ ID NO: 63674 - protein, 284 aa, Homo sapiens
MSMLPSFGFTQEQVACVCEVLQQGGNLERLGRFLWSLPACDHLHKNESVLKAKAVVAFHRGNFRELYKILESHQFSPHNHPKLQQLWLKAHYVEAEKLRGRPLGAVGKYRVRRKFPLPRTIWDGEETSYCFKEKSRGVLREWYAHNPYPSPREKRELAEATGLTTTQVSNWFKNRRQRDRAAEAKERENTENNNSSSNKQNQLSPLEGGKPLMSSSEEEFSPPQSPDQNSVLLLQGNMGHARSSNYSLPGLTASQPSHGLQTHQHQLQDSLLGPLTSSLVDLGS

SEQ ID NO: 63675 - protein, 291 aa, Homo sapiens
MSMLPTFGFTQEQVACVCEVLQQGGNIERLGRFLWSLPACEHLHKNESVLKAKAVVAFHRGNFRELYKILESHQFSPHNHAKLQQLWLKAHYIEAEKLRGRPLGAVGKYRVRRKFPLPRSIWDGEETSYCFKEKSRSVLREWYAHNPYPSPREKRELAEATGLTTTQVSNWFKNRRQRDRAAEAKERENNENSNSNSHNPLNGSGKSVLGSSEDEKTPSGTPDHSSSSPALLLSPPPPGLPSLHSLGHPPGPSAVPVPVPGGGGADPLQHHHGLQDSILNPMSANLVDLGS

SEQ ID NO: 63676 - protein, 332 aa, Homo sapiens
MVFRSPLDLYSSHFLLPNFADSHHRSILLASSGGGNGAGGGGGAGGGSGGGNGAGGGGAGGAGGGGGGGSRAPPEELSMFQLPTLNFSPEQVASVCETLEETGDIERLGRFLWSLPVAPGACEAINKHESILRARAVVAFHTGNFRDLYHILENHKFTKESHGKLQAMWLEAHYQEAEKLRGRPLGPVDKYRVRKKFPLPRTIWDGEQKTHCFKERTRSLLREWYLQDPYPNPSKKRELAQATGLTPTQVGNWFKNRRQRDRAAAAKNRLQHQAIGPSGMRSLAEPGCPTHGSAESPSTAASPTTSVSSLTERADTGTSILSVTSSDSECDV

SEQ ID NO: 63677 - protein, 781 aa, Homo sapiens
MSSSSPTGQIASAADIKQENGMESASEGQEAHREVAGGAAVGLSPPAPAPFPLEPGDAATAAARVSGEEGAVAAAAAGAAADQVQLHSELLGRHHHAAAAAAQTPLAFSPDHVACVCEALQQGGNLDRLARFLWSLPQSDLLRGNESLLKARALVAFHQGIYPELYSILESHSFESANHPLLQQLWYKARYTEAERARGRPLGAVDKYRLRRKFPLPRTIWDGEETVYCFKEKSRNALKELYKQNRYPSPAEKRHLAKITGLSLTQVSNWFKNRRQRDRNPSETQSKSESDGNPSTEDESSKGHEDLSPHPLSSSSDGITNLSLSSHMEPVYMQQIGNAKISLSSSGVLLNGSLVPASTSPVFLNGNSFIQGPSGVILNGLNVGNTQAVALNPPKMSSNIVSNGISMTDILGSTSQDVKEFKVLQSSANSATTTSYSPSVPVSFPGLIPSTEVKREGIQTVASQDGGSVVTFTTPVQINQYGIVQIPNSGANSQFLNGSIGFSPLQLPPVSVAASQGNISVSSSTSDGSTFTSESTTVQQGKVFLSSLAPSAVVYTVPNTGQTIGSVKQEGLERSLVFSQLMPVNQNAQVNANLSSENISGSGLHPLASSLVNVSPTHNFSLSPSTLLNPTELNRDIADSQPMSAPVASKSTVTSVSNTNYATLQNCSLITGQDLLSVPMTQAALGEIVPTAEDQVGHPSPAVHQDFVQEHRLVLQSVANMKENFLSNSESKATSSLMMLDSKSKYVLDGMVDTVCEDLETDKKELAKLQTVQLDEDMQDL

SEQ ID NO: 63678 - protein, 739 aa, Homo sapiens
MATLPAEPSAGPAAGGEAVAAAAATEEEEEEARQLLQTLQAAEGEAAAAAGAGAGAAAAGAEGPGSPGVPGSPPEAASEPPTGLRFSPEQVACVCEALLQAGHAGRLSRFLGALPPAERLRGSDPVLRARALVAFQRGEYAELYRLLESRPFPAAHHAFLQDLYLRARYHEAERARGRALGAVDKYRLRKKFPLPKTIWDGEETVYCFKERSRAALKACYRGNRYPTPDEKRRLATLTGLSLTQVSNWFKNRRQRDRTGAGGGAPCKSESDGNPTTEDESSRSPEDLERGAAPVSAEAAAQGSIFLAGTGPPAPCPASSSILVNGSFLAASGSPAVLLNGGPVIINGLALGEASSLGPLLLTGGGGAPPPQPSPQGASETKTSLVLDPQTGEVRLEEAQSEAPETKGAQVAAPGPALGEEVLGPLAQVVPGPPTAATFPLPPGPVPAVAAPQVVPLSPPPGYPTGLSPTSPLLNLPQVVPTSQVVTLPQAVGPLQLLAAGPGSPVKVAAAAGPANVHLINSGVGVTALQLPSATAPGNFLLANPVSGSPIVTGVALQQGKIILTATFPTSMLVSQVLPPAPGLALPLKPETAISVPEGGLPVAPSPALPEAHALGTLSAQQPPPAAATTSSTSLPFSPDSPGLLPNFPAPPPEGLMLSPAAVPVWSAGLELSAGTEGLLEAEKGLGTQAPHTVLRLPDPDPEGLLLGATAGGEVDEGLEAEAKVLTQLQSVPVEEPLEL

SEQ ID NO: 63679 - protein, 246 aa, Homo sapiens
MFQLPILNFSPQQVAGVCETLEESGDVERLGRFLWSLPVAPAACEALNKNESVLRARAIVAFHGGNYRELYHILENHKFTKESHAKLQALWLEAHYQEAEKLRGRPLGPVDKYRVRKKFPLPRTIWDGEQKTHCFKERTRHLLREWYLQDPYPNPSKKRELAQATGLTPTQVGNWFKNRRQRDRAAAAKNRLQQQVLSQGSGRALRAEGDGTPEVLGVATSPAASLSSKAATSAISITSSDSECDI

SEQ ID NO: 63680 - protein, 119 aa, Homo sapiens
MTQQGAALQNYNNELVKCIEELCQKREELCRQIQEEEDEKQRLQNEVRQLTEKLARVNENLARKIASRNEFDRTIAETEAAYLKILESSQTLLSVLKREAGNLTKATAPDQKSSGGRDS

SEQ ID NO: 63681 - protein, 221 aa, Homo sapiens
MLWLFQSLLFVFCFGPGQLRNIQVTNHSQLFQNMTCELHLTCSVEDADDNVSFRWEALGNTLSSQPNLTVSWDPRISSEQDYTCIAENAVSNLSFSVSAQKLCEDVKIQYTDTKMILFMVSGICIVFGFIILLLLVLRKRRDSLSLSTQRTQGPAESARNLEYVSVSPTNNTVYASVTHSNRETEIWTPRENDTITIYSTINHSKESKPTFSRATALDNVV

SEQ ID NO: 63682 - protein, 332 aa, Homo sapiens
MLWLFQSLLFVFCFGPGNVVSQSSLTPLMVNGILGESVTLPLEFPAGEKVNFITWLFNETSLAFIVPHETKSPEIHVTNPKQGKRLNFTQSYSLQLSNLKMEDTGSYRAQISTKTSAKLSSYTLRILRQLRNIQVTNHSQLFQNMTCELHLTCSVEDADDNVSFRWEALGNTLSSQPNLTVSWDPRISSEQDYTCIAENAVSNLSFSVSAQKLCEDVKIQYTDTKMILFMVSGICIVFGFIILLLLVLRKRRDSLSLSTQRTQGPAESARNLEYVSVSPTNNTVYASVTHSNRETEIWTPRENDTITIYSTINHSKESKPTFSRATALDNVV

SEQ ID NO: 63683 - protein, 331 aa, Homo sapiens
MLWLFQSLLFVFCFGPGNVVSQSSLTPLMVNGILGESVTLPLEFPAGEKVNFITWLFNETSLAFIVPHETKSPEIHVTNPKQGKRLNFTQSYSLQLSNLKMEDTGSYRAQISTKTSAKLSSYTLRILRQLRNIQVTNHSQLFQNMTCELHLTCSVEDADDNVSFRWEALGNTLSSQPNLTVSWDPRISSEQDYTCIAENAVSNLSFSVSAQKLCEDVKIQYTDTKMILFMVSGICIVFGFIILLLLVLRKRRDSLSLSTQRTQGPESARNLEYVSVSPTNNTVYASVTHSNRETEIWTPRENDTITIYSTINHSKESKPTFSRATALDNVV

SEQ ID NO: 63684 - protein, 296 aa, Homo sapiens
MAGSPTCLTLIYILWQLTGSAASGPVKELVGSVGGAVTFPLKSKVKQVDSIVWTFNTTPLVTIQPEGGTIIVTQNRNRERVDFPDGGYSLKLSKLKKNDSGIYYVGIYSSSLQQPSTQEYVLHVYEHLSKPKVTMGLQSNKNGTCVTNLTCCMEHGEEDVIYTWKALGQAANESHNGSILPISWRWGESDMTFICVARNPVSRNFSSPILARKLCEGAADDPDSSMVLLCLLLVPLLLSLFVLGLFLWFLKRERQEENNPKGRSSKYGLLHCGNTEKDGKSPLTAHDARHTKAICL

SEQ ID NO: 63685 - protein, 228 aa, Homo sapiens
MAGSPTCLTLIYILWQLTEHLSKPKVTMGLQSNKNGTCVTNLTCCMEHGEEDVIYTWKALGQAANESHNGSILPISWRWGESDMTFICVARNPVSRNFSSPILARKLCEGAADDPDSSMVLLCLLLVPLLLSLFVLGLFLWFLKRERQEEYIEEKKRVDICRETPNICPHSGENTEYDTIPHTNRTILKEDPANTVYSTVEIPKKMENPHSLLTMPDTPRLFAYENVI

SEQ ID NO: 63686 - protein, 335 aa, Homo sapiens
MAGSPTCLTLIYILWQLTGSAASGPVKELVGSVGGAVTFPLKSKVKQVDSIVWTFNTTPLVTIQPEGGTIIVTQNRNRERVDFPDGGYSLKLSKLKKNDSGIYYVGIYSSSLQQPSTQEYVLHVYEHLSKPKVTMGLQSNKNGTCVTNLTCCMEHGEEDVIYTWKALGQAANESHNGSILPISWRWGESDMTFICVARNPVSRNFSSPILARKLCEGAADDPDSSMVLLCLLLVPLLLSLFVLGLFLWFLKRERQEEYIEEKKRVDICRETPNICPHSGENTEYDTIPHTNRTILKEDPANTVYSTVEIPKKMENPHSLLTMPDTPRLFAYENVI

SEQ ID NO: 63687 - protein, 204 aa, Homo sapiens
MAGSPTCLTLIYILWQLTGSAASGPVKELVGSVGGAVTFPLKSKVKQVDSIVWTFNTTPLVTIQPEGGTIIVTQNRNRERVDFPDGGYSLKLSKLKKNDSGIYYVGIYSSSLQQPSTQEYVLHVYEYIEEKKRVDICRETPNICPHSGENTEYDTIPHTNRTILKEDPANTVYSTVEIPKKMENPHSLLTMPDTPRLFAYENVI

SEQ ID NO: 63688 - protein, 165 aa, Homo sapiens
MAGSPTCLTLIYILWQLTGSAASGPVKELVGSVGGAVTFPLKSKVKQVDSIVWTFNTTPLVTIQPEGGTIIVTQNRNRERVDFPDGGYSLKLSKLKKNDSGIYYVGIYSSSLQQPSTQEYVLHVYENNPKGRSSKYGLLHCGNTEKDGKSPLTAHDARHTKAICL

SEQ ID NO: 63689 - protein, 149 aa, Homo sapiens
MAGSPTCLTLIYILWQLTEHLSKPKVTMGLQSNKNGTCVTNLTCCMEHGEEDVIYTWKALGQAANESHNGSILPISWRWGESDMTFICVARNPVSRNFSSPILARKLCEENNPKGRSSKYGLLHCGNTEKDGKSPLTAHDARHTKAICL

SEQ ID NO: 63690 - protein, 188 aa, Homo sapiens
MAGSPTCLTLIYILWQLTEHLSKPKVTMGLQSNKNGTCVTNLTCCMEHGEEDVIYTWKALGQAANESHNGSILPISWRWGESDMTFICVARNPVSRNFSSPILARKLCEEYIEEKKRVDICRETPNICPHSGENTEYDTIPHTNRTILKEDPANTVYSTVEIPKKMENPHSLLTMPDTPRLFAYENVI

SEQ ID NO: 63691 - protein, 285 aa, Homo sapiens
MVMRPLWSLLLWEALLPITVTGAQVLSKVGGSVLLVAARPPGFQVREAIWRSLWPSEELLATFFRGSLETLYHSRFLGRAQLHSNLSLELGPLESGDSGNFSVLMVDTRGQPWTQTLQLKVYDAVPRPVVQVFIAVERDAQPSKTCQVFLSCWAPNISEITYSWRRETTMDFGMEPHSLFTDGQVLSISLGPGDRDVAYSCIVSNPVSWDLATVTPWDSCHHEAAPGKASYKDVLLVVVPVSLLLMLVTLFSAWHWCPCSGKKKKDVHADRVGPETENPLVQDLP

SEQ ID NO: 63692 - protein, 176 aa, Homo sapiens
MVMRPLWSLLLWEDAVPRPVVQVFIAVERDAQPSKTCQVFLSCWAPNISEITYSWRRETTMDFGMEPHSLFTDGQVLSISLGPGDRDVAYSCIVSNPVSWDLATVTPWDSCHHEAAPGKASYKDVLLVVVPVSLLLMLVTLFSAWHWCPCSGKKKKDVHADRVGPETENPLVQDLP

SEQ ID NO: 63693 - protein, 147 aa, Homo sapiens
MGGRHHLQRQVSESMSALFQAVRLESAWADRVRYMVVVYSSGRQDTEENILLGVDFSSKESGFSVSTAGRMHIFKPVSVQAMWSALQVLHKACEVARRHNYFPGGVALIWATYYESCISSEQSCINEWNAMQDLESTRPDSPALFVD

SEQ ID NO: 63694 - protein, 703 aa, Homo sapiens
MARARRAVVGSVRDVSTAATNLFYFTDFCIFLQPTHCFCCPEVSSSNYLSESFFMVKGAALFLQQGSSPQGQRSLQHPHKHAGDLPQHLQVMINLLRCEDRIKLAVRLESAWADRVRYMVVVYSSGRQDTEENILLGVDFSSKESKSCTIGMVLRLWSDTKIHLDGDGGFSVSTAGRMHIFKPVSVQAMWSALQVLHKACEVARRHNYFPGGVALIWATYYESCISSEQSCINEWNAMQDLESTRPDSPALFVDKPTEGERTERLIKAKLRSIMMSQDLENVTSKEIRNELEKQMNCNLKELKEFIDNEMLLILGQMDKPSLIFDHLYLGSEWNASNLEELQGSGVDYILNVTREIDNFFPGLFAYHNIRVYDEETTDLLAHWNEAYHFINKAKRNHSKCLVHCKMGVSRSASTVIAYAMKEFGWPLEKAYNYVKQKRSITRPNAGFMRQLSEYEGILDASKQRHNKLWRQQTDSSLQQPVDDPAGPGDFLPETPDGTPESQLPFLDDAAQPGLGPPLPCCFRRLSDPLLPSPEDETGSLVHLEDPEREALLEEAAPPAEVHRPARQPQQGSGLCEKDVKKKLEFGSPKGRSGSLLQVEETEREEGLGAGRWGQLPTQLDQNLLNSENLNNNSKRSCPNGMEVGRARPAGWHTPSLPSHSNWPTSASVVGTTGTRHHTQLIFFYCLLWAPSSHLQGPEGSFTG

SEQ ID NO: 63695 - protein, 1049 aa, Homo sapiens
MALVTLQRSPTPSAASSSASNSELEAGSEEDRKLNLSLSESFFMVKGAALFLQQGSSPQGQRSLQHPHKHAGDLPQHLQVMINLLRCEDRIKLAVRLESAWADRVRYMVVVYSSGRQDTEENILLGVDFSSKESKSCTIGMVLRLWSDTKIHLDGDGGFSVSTAGRMHIFKPVSVQAMWSALQVLHKACEVARRHNYFPGGVALIWATYYESCISSEQSCINEWNAMQDLESTRPDSPALFVDKPTEGERTERLIKAKLRSIMMSQDLENVTSKEIRNELEKQMNCNLKELKEFIDNEMLLILGQMDKPSLIFDHLYLGSEWNASNLEELQGSGVDYILNVTREIDNFFPGLFAYHNIRVYDEETTDLLAHWNEAYHFINKAKRNHSKCLVHCKMGVSRSASTVIAYAMKEFGWPLEKAYNYVKQKRSITRPNAGFMRQLSEYEGILDASKQRHNKLWRQQTDSSLQQPVDDPAGPGDFLPETPDGTPESQLPFLDDAAQPGLGPPLPCCFRRLSDPLLPSPEDETGSLVHLEDPEREALLEEAAPPAEVHRPARQPQQGSGLCEKDVKKKLEFGSPKGRSGSLLQVEETEREEGLGAGRWGQLPTQLDQNLLNSENLNNNSKRSCPNGMEDDAIFGILNKVKPSYKSCADCMYPTASGAPEASRERCEDPNAPAICTQPAFLPHITSSPVAHLASRSRVPEKPASGPTEPPPFLPPAGSRRADTSGPGAGAALEPPASLLEPSRETPKVLPKSLLLKNSHCDKNPPSTEVVIKEESSPKKDMKPAKDLRLLFSNESEKPTTNSYLMQHQESIIQLQKAGLVRKHTKELERLKSVPADPAPPSRDGPASRLEASIPEESQDPAALHELGPLVMPSQAGSDEKSEAAPASLEGGSLKSPPPFFYRLDHTSSFSKDFLKTICYTPTSSSMSSNLTRSSSSDSIHSVRGKPGLVKQRTQEIETRLRLAGLTVSSPLKRSHSLAKLGSLTFSTEDLSSEADPSTVADSQDTTLSESSFLHEPQGTPRDPAATSKPSGKPAPENLKSPSWMSKS

SEQ ID NO: 63696 - protein, 737 aa, Homo sapiens
MRCYLSWDRWTSPPLSSIIFISVDYILNVTREIDNFFPGLFAYHNIRVYDEETTDLLAHWNEAYHFINKAKRNHSKCLVHCKMGVSRSASTVIAYAMKEFGWPLEKAYNYVKQKRSITRPNAGFMRQLSEYEGILDASKQRHNKLWRQQTDSSLQQPVDDPAGPGDFLPETPDGTPESQLPFLDDAAQPGLGPPLPCCFRRLSDPLLPSPEDETGSLVHLEDPEREALLEEAAPPAEVHRPARQPQQGSGLCEKDVKKKLEFGSPKGRSGSLLQVEETEREEGLGAGRWGQLPTQLDQNLLNSENLNNNSKRSCPNGMEDDAIFGILNKVKPSYKSCADCMYPTASGAPEASRERCEDPNAPAICTQPAFLPHITSSPVAHLASRSRVPEKPASGPTEPPPFLPPAGSRRADTSGPGAGAALEPPASLLEPSRETPKVLPKSLLLKNSHCDKNPPSTEVVIKEESSPKKDMKPAKDLRLLFSNESEKPTTNSYLMQHQESIIQLQKAGLVRKHTKELERLKSVPADPAPPSRDGPASRLEASIPEESQDPAALHELGPLVMPSQAGSDEKSEAAPASLEGGSLKSPPPFFYRLDHTSSFSKDFLKTICYTPTSSSMSSNLTRSSSSDSIHSVRGKPGLVKQRTQEIETRLRLAGLTVSSPLKRSHSLAKLGSLTFSTEDLSSEADPSTVADSQDTTLSESSFLHEPQGTPRDPAATSKPSGKPAPENLKSPSWMSKS

SEQ ID NO: 63697 - protein, 692 aa, Homo sapiens
MALVTLQRSPTPSAASSSASNSELEAGSEEDRKLNLSLSESFFMVKGAALFLQQGSSPQGQRSLQHPHKHAGDLPQHLQVMINLLRCEDRIKLAVRLESAWADRVRYMVVVYSSGRQDTEENILLGVDFSSKESKSCTIGMVLRLWSDTKIHLDGDGGFSVSTAGRMHIFKPVSVQAMWSALQVLHKACEVARRHNYFPGGVALIWATYYESCISSEQSCINEWNAMQDLESTRPDSPALFVDKPTEGERTERLIKAKLRSIMMSQDLENVTSKEIRNELEKQMNCNLKELKEFIDNEMLLILGQMDKPSLIFDHLYLGSEWNASNLEELQGSGVDYILNVTREIDNFFPGLFAYHNIRVYDEETTDLLAHWNEAYHFINKAKRNHSKCLVHCKMGVSRSASTVIAYAMKEFGWPLEKAYNYVKQKRSITRPNAGFMRQLSEYEGILDASKQRHNKLWRQQTDSSLQQPVDDPAGPGDFLPETPDGTPESQLPFLDDAAQPGLGPPLPCCFRRLSDPLLPSPEDETGSLVHLEDPEREALLEEAAPPAEVHRPARQPQQGSGLCEKDVKKKLEFGSPKGRSGSLLQVEETEREEGLGAGRWGQLPTQLDQNLLNSENLNNNSKRSCPNGMEVGRARPAGWHTPSLPSHSNWPTSASVVGTTGTRHHTQLIFFYCLLWAPSSHLQGPEGSFTG

SEQ ID NO: 63698 - protein, 1423 aa, Homo sapiens
MALVTVQRSPTPSTTSSPCASEADSGEEECRSQPRSISESFLTVKGAALFLPRGNGSSTPRISHRRNKHAGDLQQHLQAMFILLRPEDNIRLAVRLESTYQNRTRYMVVVSTNGRQDTEESIVLGMDFSSNDSSTCTMGLVLPLWSDTLIHLDGDGGFSVSTDNRVHIFKPVSVQAMWSALQSLHKACEVARAHNYYPGSLFLTWVSYYESHINSDQSSVNEWNAMQDVQSHRPDSPALFTDIPTERERTERLIKTKLREIMMQKDLENITSKEIRTELEMQMVCNLREFKEFIDNEMIVILGQMDSPTQIFEHVFLGSEWNASNLEDLQNRGVRYILNVTREIDNFFPGVFEYHNIRVYDEEATDLLAYWNDTYKFISKAKKHGSKCLVHCKMGVSRSASTVIAYAMKEYGWNLDRAYDYVKERRTVTKPNPSFMRQLEEYQGILLASKQRHNKLWRSHSDSDLSDHHEPICKPGLELNKKDITTSADQIAEVKTMESHPPIPPVFVEHMVPQDANQKGLCTKERMICLEFTSREFHAGQIEDELNLNDINGCSSGCCLNESKFPLDNCHASKALIQPGHVPEMANKFPDLTVEDLETDALKADMNVHLLPMEELTSPLKDPPMSPDPESPSPQPSCQTEISDFSTDRIDFFSALEKFVELSQETRSRSFSHSRMEELGGGRNESCRLSVVEVAPSKVTADDQRSSSLSNTPHASEESSMDEEQSKAISELVSPDIFMQSHSENAISVKEIVTEIESISQGVGQIQLKGDILPNPCHTPKKNSIHELLLERAQTPENKPGHMEQDEDSCTAQPELAKDSGMCNPEGCLTTHSSIADLEEGEPAEGEQELQGSGMHPGAKWYPGSVRRATLEFEERLRQEQEHHGAAPTCTSLSTRKNSKNDSSVADLAPKGKSDEAPPEHSFVLKEPEMSKGKGKYSGSEAGSLSHSEQNATVPAPRVLEFDHLPDPQEGPGSDTGTQQEGVLKDLRTVIPYQESETQAVPLPLPKRVEIIEYTHIVTSPNHTGPGSEIATSEKSGEQGLRKVNMEKSVTVLCTLDENLNRTLDPNQVSLHPQVLPLPHSSSPEHNRPTDHPTSILSSPEDRGSSLSTALETAAPFVSHTTHLLSASLDYLHPQTMVHLEGFTEQSSTTDEPSAEQVSWEESQESPLSSGSEVPYKDSQLSSADLSLISKLGDNTGELQEKMDPLPVACRLPHSSSSENIKSLSHSPGVVKERAKEIESRVVFQAGLTKPSQMRRSASLAKLGYLDLCKDCLPEREPASCESPHLKLLQPFLRTDSGMHAMEDQESLENPGAPHNPEPTKSFVEQLTTTECIVQSKPVERPLVQYAKEFGSSQQYLLPRAGLELTSSEGGLPVLQTQGLQCACPAPGLAVAPRQQHGRTHPLRRLKKANDKKRTTNPFYNTM

SEQ ID NO: 63699 - protein, 202 aa, Homo sapiens
MTLSTLARKRKAPLACTCSLGGPDMIPYFSANAVISQNAINQLISESFLTVKGAALFLPRGNGSSTPRISHRRNKHAGDLQQHLQAMFILLRPEDNIRLAVRLESTYQNRTRYMVVVSTNGRQDTEESIVLGMDFSSNDSSTCTMGLVLPLWSDTLIHLDGDGGFSVSTDNRVHIFKPVSVQAMWVDRDSRNKHCDVLLVEE

SEQ ID NO: 63700 - protein, 449 aa, Homo sapiens
MALVTVQRSPTPSTTSSPCASEADSGEEECRSQPRSISESFLTVKGAALFLPRGNGSSTPRISHRRNKHAGDLQQHLQAMFILLRPEDNIRLAVRLESTYQNRTRYMVVVSTNGRQDTEESIVLGMDFSSNDSSTCTMGLVLPLWSDTLIHLDGDGGFSVSTDNRVHIFKPVSVQAMWSALQSLHKACEVARAHNYYPGSLFLTWVSYYESHINSDQSSVNEWNAMQDVQSHRPDSPALFTDIPTERERTERLIKTKLREIMMQKDLENITSKEIRTELEMQMVCNLREFKEFIDNEMIVILGQMDSPTQIFEHVFLGSEWNASNLEDLQNRGVRYILNVTREIDNFFPGVFEYHNIRVYDEEATDLLAYWNDTYKFISKAKKHGSKCLVHCKMGVSRSASTVIAYAMKEYGWNLDRAYDYVKERRTVTKPNPSFMRQLEEYQGILLAR

SEQ ID NO: 63701 - protein, 1450 aa, Homo sapiens
MALVTVQRSPTPSTTSSPCASSSHLEDSESAALLCCECEESEIFTDSNEADSGEEECRSQPRSISESFLTVKGAALFLPRGNGSSTPRISHRRNKHAGDLQQHLQAMFILLRPEDNIRLAVRLESTYQNRTRYMVVVSTNGRQDTEESIVLGMDFSSNDSSTCTMGLVLPLWSDTLIHLDGDGGFSVSTDNRVHIFKPVSVQAMWSALQSLHKACEVARAHNYYPGSLFLTWVSYYESHINSDQSSVNEWNAMQDVQSHRPDSPALFTDIPTERERTERLIKTKLREIMMQKDLENITSKEIRTELEMQMVCNLREFKEFIDNEMIVILGQMDSPTQIFEHVFLGSEWNASNLEDLQNRGVRYILNVTREIDNFFPGVFEYHNIRVYDEEATDLLAYWNDTYKFISKAKKHGSKCLVHCKMGVSRSASTVIAYAMKEYGWNLDRAYDYVKERRTVTKPNPSFMRQLEEYQGILLASKQRHNKLWRSHSDSDLSDHHEPICKPGLELNKKDITTSADQIAEVKTMESHPPIPPVFVEHMVPQDANQKGLCTKERMICLEFTSREFHAGQIEDELNLNDINGCSSGCCLNESKFPLDNCHASKALIQPGHVPEMANKFPDLTVEDLETDALKADMNVHLLPMEELTSPLKDPPMSPDPESPSPQPSCQTEISDFSTDRIDFFSALEKFVELSQETRSRSFSHSRMEELGGGRNESCRLSVVEVAPSKVTADDQRSSSLSNTPHASEESSMDEEQSKAISELVSPDIFMQSHSENAISVKEIVTEIESISQGVGQIQLKGDILPNPCHTPKKNSIHELLLERAQTPENKPGHMEQDEDSCTAQPELAKDSGMCNPEGCLTTHSSIADLEEGEPAEGEQELQGSGMHPGAKWYPGSVRRATLEFEERLRQEQEHHGAAPTCTSLSTRKNSKNDSSVADLAPKGKSDEAPPEHSFVLKEPEMSKGKGKYSGSEAGSLSHSEQNATVPAPRVLEFDHLPDPQEGPGSDTGTQQEGVLKDLRTVIPYQESETQAVPLPLPKRVEIIEYTHIVTSPNHTGPGSEIATSEKSGEQGLRKVNMEKSVTVLCTLDENLNRTLDPNQVSLHPQVLPLPHSSSPEHNRPTDHPTSILSSPEDRGSSLSTALETAAPFVSHTTHLLSASLDYLHPQTMVHLEGFTEQSSTTDEPSAEQVSWEESQESPLSSGSEVPYKDSQLSSADLSLISKLGDNTGELQEKMDPLPVACRLPHSSSSENIKSLSHSPGVVKERAKEIESRVVFQAGLTKPSQMRRSASLAKLGYLDLCKDCLPEREPASCESPHLKLLQPFLRTDSGMHAMEDQESLENPGAPHNPEPTKSFVEQLTTTECIVQSKPVERPLVQYAKEFGSSQQYLLPRAGLELTSSEGGLPVLQTQGLQCACPAPGLAVAPRQQHGRTHPLRRLKKANDKKRTTNPFYNTM

SEQ ID NO: 63702 - protein, 659 aa, Homo sapiens
MALVTVSRSPPGSGASTPVGPWDQAVQRRSRLQRRQSFAVLRGAVLGLQDGGDNDDAAEASSEPTEKAPSEEELHGDQTDFGQGSQSPQKQEEQRQHLHLMVQLLRPQDDIRLAAQLEAPRPPRLRYLLVVSTREGEGLSQDETVLLGVDFPDSSSPSCTLGLVLPLWSDTQVYLDGDGGFSVTSGGQSRIFKPISIQTMWATLQVLHQACEAALGSGLVPGGSALTWASHYQERLNSEQSCLNEWTAMADLESLRPPSAEPGGSSEQEQMEQAIRAELWKVLDVSDLESVTSKEIRQALELRLGLPLQQYRDFIDNQMLLLVAQRDRASRIFPHLYLGSEWNAANLEELQRNRVTHILNMAREIDNFYPERFTYHNVRLWDEESAQLLPHWKETHRFIEAARAQGTHVLVHCKMGVSRSAATVLAYAMKQYECSLEQALRHVQELRPIARPNPGFLRQLQIYQGILTASRQSHVWEQKVGGVSPEEHPAPEVSTPFPPLPPEPEGGGEEKVVGMEESQAAPKEEPGPRPRINLRGVMRSISLLEPSLELESTSETSDMPEVFSSHESSHEEPLQPFPQLARTKGGQQVDRGPQPALKSRQSVVTLQGSAVVANRTQAFQEQEQGQGQGQGEPCISSTPRFRKVVRQASVHDSGEEGEA

SEQ ID NO: 63703 - protein, 696 aa, Homo sapiens
MLLWILLLETSLCFAAGNVTGDVCKEKICSCNEIEGDLHVDCEKKGFTSLQRFTAPTSQFYHLFLHGNSLTRLFPNEFANFYNAVSLHMENNGLHEIVPGAFLGLQLVKRLHINNNKIKSFRKQTFLGLDDLEYLQADFNLLRDIDPGAFQDLNKLEVLILNDNLISTLPANVFQYVPITHLDLRGNRLKTLPYEEVLEQIPGIAEILLEDNPWDCTCDLLSLKEWLENIPKNALIGRVVCEAPTRLQGKDLNETTEQDLCPLKNRVDSSLPAPPAQEETFAPGPLPTPFKTNGQEDHATPGSAPNGGTKIPGNWQIKIRPTAAIATGSSRNKPLANSLPCPGGCSCDHIPGSGLKMNCNNRNVSSLADLKPKLSNVQELFLRDNKIHSIRKSHFVDYKNLILLDLGNNNIATVENNTFKNLLDLRWLYMDSNYLDTLSREKFAGLQNLEYLNVEYNAIQLILPGTFNAMPKLRILILNNNLLRSLPVDVFAGVSLSKLSLHNNYFMYLPVAGVLDQLTSIIQIDLHGNPWECSCTIVPFKQWAERLGSEVLMSDLKCETPVNFFRKDFMLLSNDEICPQLYARISPTLTSHSKNSTGLAETGTHSNSYLDTSRVSISVLVPGLLLVFVTSAFTVVGMLVFILRNRKRSKRRDANSSASEINSLQTVCDSSYWHNGPYNADGAHRVYDCGSHSLSD

SEQ ID NO: 63704 - protein, 724 aa, Homo sapiens
MLSGVWFLSVLTVAGILQTESRKTAKDICKIRCLCEEKENVLNINCENKGFTTVSLLQPPQYRIYQLFLNGNLLTRLYPNEFVNYSNAVTLHLGNNGLQEIRTGAFSGLKTLKRLHLNNNKLEILREDTFLGLESLEYLQADYNYISAIEAGAFSKLNKLKVLILNDNLLLSLPSNVFRFVLLTHLDLRGNRLKVMPFAGVLEHIGGIMEIQLEENPWNCTCDLLPLKAWLDTITVFVGEIVCETPFRLHGKDVTQLTRQDLCPRKSASDSSQRGSHADTHVQRLSPTMNPALNPTRAPKASRPPKMRNRPTPRVTVSKDRQSFGPIMVYQTKSPVPLTCPSSCVCTSQSSDNGLNVNCQERKFTNISDLQPKPTSPKKLYLTGNYLQTVYKNDLLEYSSLDLLHLGNNRIAVIQEGAFTNLTSLRRLYLNGNYLEVLYPSMFDGLQSLQYLYLEYNVIKEIKPLTFDALINLQLLFLNNNLLRSLPDNIFGGTALTRLNLRNNHFSHLPVKGVLDQLPAFIQIDLQENPWDCTCDIMGLKDWTEHANSPVIINEVTCESPAKHAGEILKFLGREAICPDSPNLSDGTVLSMNHNTDTPRSLSVSPSSYPELHTEVPLSVLILGLLVVFILSVCFGAGLFVFVLKRRKGVPSVPRNTNNLDVSSFQLQYGSYNTETHDKTDGHVYNYIPPPVGQMCQNPIYMQKEGDPVAYYRNLQEFSYSNLE

SEQ ID NO: 63705 - protein, 845 aa, Homo sapiens
MLSGVWFLSVLTVAGILQTESRKTAKDICKIRCLCEEKENVLNINCENKGFTTVSLLQPPQYRIYQLFLNGNLLTRLYPNEFVNYSNAVTLHLGNNGLQEIRTGAFSGLKTLKRLHLNNNKLEILREDTFLGLESLEYLQADYNYISAIEAGAFSKLNKLKVLILNDNLLLSLPSNVFRFVLLTHLDLRGNRLKVMPFAGVLEHIGGIMEIQLEENPWNCTCDLLPLKAWLDTITVFVGEIVCETPFRLHGKDVTQLTRQDLCPRKSASDSSQRGSHADTHVQRLSPTMNPALNPTRAPKASRPPKMRNRPTPRVTVSKDRQSFGPIMVYQTKSPVPLTCPSSCVCTSQSSDNGLNVNCQERKFTNISDLQPKPTSPKKLYLTGNYLQTVYKNDLLEYSSLDLLHLGNNRIAVIQEGAFTNLTSLRRLYLNGNYLEVLYPSMFDGLQSLQYLYLEYNVIKEIKPLTFDALINLQLLFLNNNLLRSLPDNIFGGTALTRLNLRNNHFSHLPVKGVLDQLPAFIQIDLQENPWDCTCDIMGLKDWTEHANSPVIINEVTCESPAKHAGEILKFLGREAICPDSPNLSDGTVLSMNHNTDTPRSLSVSPSSYPELHTEVPLSVLILGLLVVFILSVCFGAGLFVFVLKRRKGVPSVPRNTNNLDVSSFQLQYGSYNTETHDKTDGHVYNYIPPPVGQMCQNPIYMQKEGDPVAYYRNLQEFSYSNLEEKKEEPATPAYTISATELLEKQATPREPELLYQNIAERVKELPSAGLVHYNFCTLPKRQFAPSYESRRQNQDRINKTVLYGTPRKCFVGQSKPNHPLLQAKPQSEPDYLEVLEKQTAISQL

SEQ ID NO: 63706 - protein, 845 aa, Homo sapiens; identical to SEQ ID NO: 63705

SEQ ID NO: 63707 - protein, 845 aa, Homo sapiens; identical to SEQ ID NO: 63705

SEQ ID NO: 63708 - protein, 845 aa, Homo sapiens; identical to SEQ ID NO: 63705

SEQ ID NO: 63709 - protein, 845 aa, Homo sapiens; identical to SEQ ID NO: 63705

SEQ ID NO: 63710 - protein, 977 aa, Homo sapiens
MKPSIAEMLHRGRMLWIILLSTIALGWTTPIPLIEDSEEIDEPCFDPCYCEVKESLFHIHCDSKGFTNISQITEFWSRPFKLYLQRNSMRKLYTNSFLHLNNAVSINLGNNALQDIQTGAFNGLKILKRLYLHENKLDVFRNDTFLGLESLEYLQADYNVIKRIESGAFRNLSKLRVLILNDNLIPMLPTNLFKAVSLTHLDLRGNRLKVLFYRGMLDHIGRSLMELQLEENPWNCTCEIVQLKSWLERIPYTALVGDITCETPFHFHGKDLREIRKTELCPLLSDSEVEASLGIPHSSSSKENAWPTKPSSMLSSVHFTASSVEYKSSNKQPKPTKQPRTPRPPSTSQALYPGPNQPPIAPYQTRPPIPIICPTGCTCNLHINDLGLTVNCKERGFNNISELLPRPLNAKKLYLSSNLIQKIYRSDFWNFSSLDLLHLGNNRISYVQDGAFINLPNLKSLFLNGNDIEKLTPGMFRGLQSLHYLYFEFNVIREIQPAAFSLMPNLKLLFLNNNLLRTLPTDAFAGTSLARLNLRKNYFLYLPVAGVLEHLNAIVQIDLNENPWDCTCDLVPFKQWIETISSVSVVGDVLCRSPENLTHRDVRTIELEVLCPEMLHVAPAGESPAQPGDSHLIGAPTSASPYEFSPPGGPVPLSVLILSLLVLFFSAVFVAAGLFAYVLRRRRKKLPFRSKRQEGVDLTGIQMQCHRLFEDGGGGGGGSGGGGRPTLSSPEKAPPVGHVYEYIPHPVTQMCNNPIYKPREEEEVAVSSAQEAGSAERGGPGTQPPGMGEALLGSEQFAETPKENHSNYRTLLEKEKEWALAVSSSQLNTIVTVNHHHPHHPAVGGVSGVVGGTGGDLAGFRHHEKNGGVVLFPPGGGCGSGSMLLDRERPQPAPCTVGFVDCLYGTVPKLKELHVHPPGMQYPDLQQDARLKETLLFSAGKGFTDHQTQKSDYLELRAKLQTKPDYLEVLEKTTYRF

SEQ ID NO: 63711 - protein, 977 aa, Homo sapiens; identical to SEQ ID NO: 63710

SEQ ID NO: 63712 - protein, 163 aa, Homo sapiens
MKPSIAEMLHRGRMLWIILLSTIALGWTTPIPLIEDSEEIDEPCFDPCYCEVKESLFHIHCDSKGFTNISQITEFWSRPFKLYLQRNSMRKLYTNSFLHLNNAVSINLGNNALQDIQTGAFNGLKILKRLYLHENKLDVFRNDTFLGLESLEYLQADYNVIKR

SEQ ID NO: 63713 - protein, 837 aa, Homo sapiens
MFLWLFLILSALISSTNADSDISVEICNVCSCVSVENVLYVNCEKVSVYRPNQLKPPWSNFYHLNFQNNFLNILYPNTFLNFSHAVSLHLGNNKLQNIEGGAFLGLSALKQLHLNNNELKILRADTFLGIENLEYLQADYNLIKYIERGAFNKLHKLKVLILNDNLISFLPDNIFRFASLTHLDIRGNRIQKLPYIGVLEHIGRVVELQLEDNPWNCSCDLLPLKAWLENMPYNIYIGEAICETPSDLYGRLLKETNKQELCPMGTGSDFDVRILPPSQLENGYTTPNGHTTQTSLHRLVTKPPKTTNPSKISGIVAGKALSNRNLSQIVSYQTRVPPLTPCPAPCFCKTHPSDLGLSVNCQEKNIQSMSELIPKPLNAKKLHVNGNSIKDVDVSDFTDFEGLDLLHLGSNQITVIKGDVFHNLTNLRRLYLNGNQIERLYPEIFSGLHNLQYLYLEYNLIKEISAGTFDSMPNLQLLYLNNNLLKSLPVYIFSGAPLARLNLRNNKFMYLPVSGVLDQLQSLTQIDLEGNPWDCTCDLVALKLWVEKLSDGIVVKELKCETPVQFANIELKSLKNEILCPKLLNKPSAPFTSPAPAITFTTPLGPIRSPPGGPVPLSILILSILVVLILTVFVAFCLLVFVLRRNKKPTVKHEGLGNPDCGSMQLQLRKHDHKTNKKDGLSTEAFIPQTIEQMSKSHTCGLKESETGFMFSDPPGQKVVMRNVADKEKDLLHVDTRKRLSTIDELDELFPSRDSNVFIQNFLESKKEYNSIGVSGFEIRYPEKQPDKKSKKSLIGGNHSKIVVEQRKSEYFELKAKLQSSPDYLQVLEEQTALNKI

SEQ ID NO: 63714 - protein, 837 aa, Homo sapiens; identical to SEQ ID NO: 63713

SEQ ID NO: 63715 - protein, 837 aa, Homo sapiens; identical to SEQ ID NO: 63713

SEQ ID NO: 63716 - protein, 958 aa, Homo sapiens
MHTCCPPVTLEQDLHRKMHSWMLQTLAFAVTSLVLSCAETIDYYGEICDNACPCEEKDGILTVSCENRGIISLSEISPPRFPIYHLLLSGNLLNRLYPNEFVNYTGASILHLGSNVIQDIETGAFHGLRGLRRLHLNNNKLELLRDDTFLGLENLEYLQVDYNYISVIEPNAFGKLHLLQVLILNDNLLSSLPNNLFRFVPLTHLDLRGNRLKLLPYVGLLQHMDKVVELQLEENPWNCSCELISLKDWLDSISYSALVGDVVCETPFRLHGRDLDEVSKQELCPRRLISDYEMRPQTPLSTTGYLHTTPASVNSVATSSSAVYKPPLKPPKGTRQPNKPRVRPTSRQPSKDLGYSNYGPSIAYQTKSPVPLECPTACSCNLQISDLGLNVNCQERKIESIAELQPKPYNPKKMYLTENYIAVVRRTDFLEATGLDLLHLGNNRISMIQDRAFGDLTNLRRLYLNGNRIERLSPELFYGLQSLQYLFLQYNLIREIQSGTFDPVPNLQLLFLNNNLLQAMPSGVFSGLTLLRLNLRSNHFTSLPVSGVLDQLKSLIQIDLHDNPWDCTCDIVGMKLWVEQLKVGVLVDEVICKAPKKFAETDMRSIKSELLCPDYSDVVVSTPTPSSIQVPARTSAVTPAVRLNSTGAPASLGAGGGASSVPLSVLILSLLLVFIMSVFVAAGLFVLVMKRRKKNQSDHTSTNNSDVSSFNMQYSVYGGGGGTGGHPHAHVHHRGPALPKVKTPAGHVYEYIPHPLGHMCKNPIYRSREGNSVEDYKDLHELKVTYSSNHHLQQQQQPPPPPQQPQQQPPPQLQLQPGEEERRESHHLRSPAYSVSTIEPREDLLSPVQDADRFYRGILEPDKHCSTTPAGNSLPEYPKFPCSPAAYTFSPNYDLRRPHQYLHPGAGDSRLREPVLYSPPSAVFVEPNRNEYLELKAKLNVEPDYLEVLEKQTTFSQF

SEQ ID NO: 63717 - protein, 717 aa, Homo sapiens
MGAGKHREGGGGDPTSLNGCADLIQRRTEISRDLDEVSKQELCPRRLISDYEMRPQTPLSTTGYLHTTPASVNSVATSSSAVYKPPLKPPKGTRQPNKPRVRPTSRQPSKDLGYSNYGPSIAYQTKSPVPLECPTACSCNLQISDLGLNVNCQERKIESIAELQPKPYNPKKMYLTENYIAVVRRTDFLEATGLDLLHLGNNRISMIQDRAFGDLTNLRRLYLNGNRIERLSPELFYGLQSLQYLFLQYNLIREIQSGTFDPVPNLQLLFLNNNLLQAMPSGVFSGLTLLRLNLRSNHFTSLPVSGVLDQLKSLIQIDLHDNPWDCTCDIVGMKLWVEQLKVGVLVDEVICKAPKKFAETDMRSIKSELLCPDYSDVVVSTPTPSSIQVPARTSAVTPAVRLNSTGAPASLGAGGGASSVPLSVLILSLLLVFIMSVFVAAGLFVLVMKRRKKNQSDHTSTNNSDVSSFNMQYSVYGGGGGTGGHPHAHVHHRGPALPKVKTPAGHVYEYIPHPLGHMCKNPIYRSREGNSVEDYKDLHELKVTYSSNHHLQQQQQPPPPPQQPQQQPPPQLQLQPGEEERRESHHLRSPAYSVSTIEPREDLLSPVQDADRFYRGILEPDKHCSTTPAGNSLPEYPKFPCSPAAYTFSPNYDLRRPHQYLHPGAGDSRLREPVLYSPPSAVFVEPNRNEYLELKAKLNVEPDYLEVLEKQTTFSQF

SEQ ID NO: 63718 - protein, 841 aa, Homo sapiens
MKLWIHLFYSSLLACISLHSQTPVLSSRGSCDSLCNCEEKDGTMLINCEAKGIKMVSEISVPPSRPFQLSLLNNGLTMLHTNDFSGLTNAISIHLGFNNIADIEIGAFNGLGLLKQLHINHNSLEILKEDTFHGLENLEFLQADNNFITVIEPSAFSKLNRLKVLILNDNAIESLPPNIFRFVPLTHLDLRGNQLQTLPYVGFLEHIGRILDLQLEDNKWACNCDLLQLKTWLENMPPQSIIGDVVCNSPPFFKGSILSRLKKESICPTPPVYEEHEDPSGSLHLAATSSINDSRMSTKTTSILKLPTKAPGLIPYITKPSTQLPGPYCPIPCNCKVLSPSGLLIHCQERNIESLSDLRPPPQNPRKLILAGNIIHSLMKSDLVEYFTLEMLHLGNNRIEVLEEGSFMNLTRLQKLYLNGNHLTKLSKGMFLGLHNLEYLYLEYNAIKEILPGTFNPMPKLKVLYLNNNLLQVLPPHIFSGVPLTKVNLKTNQFTHLPVSNILDDLDLLTQIDLEDNPWDCSCDLVGLQQWIQKLSKNTVTDDILCTSPGHLDKKELKALNSEILCPGLVNNPSMPTQTSYLMVTTPATTTNTADTILRSLTDAVPLSVLILGLLIMFITIVFCAAGIVVLVLHRRRRYKKKQVDEQMRDNSPVHLQYSMYGHKTTHHTTERPSASLYEQHMVSPMVHVYRSPSFGPKHLEEEEERNEKEGSDAKHLQRSLLEQENHSPLTGSNMKYKTTNQSTEFLSFQDASSLYRNILEKERELQQLGITEYLRKNIAQLQPDMEAHYPGAHEELKLMETLMYSRPRKVLVEQTKNEYFELKANLHAEPDYLEVLEQQT

SEQ ID NO: 63719 - protein, 1525 aa, Homo sapiens
MRGVGWQMLSLSLGLVLAILNKVAPQACPAQCSCSGSTVDCHGLALRSVPRNIPRNTERLDLNGNNITRITKTDFAGLRHLRVLQLMENKISTIERGAFQDLKELERLRLNRNHLQLFPELLFLGTAKLYRLDLSENQIQAIPRKAFRGAVDIKNLQLDYNQISCIEDGAFRALRDLEVLTLNNNNITRLSVASFNHMPKLRTFRLHSNNLYCDCHLAWLSDWLRQRPRVGLYTQCMGPSHLRGHNVAEVQKREFVCSGKGEGHQSFMAPSCSVLHCPAACTCSNNIVDCRGKGLTEIPTNLPETITEIRLEQNTIKVIPPGAFSPYKKLRRIDLSNNQISELAPDAFQGLRSLNSLVLYGNKITELPKSLFEGLFSLQLLLLNANKINCLRVDAFQDLHNLNLLSLYDNKLQTIAKGTFSPLRAIQTMHLAQNPFICDCHLKWLADYLHTNPIETSGARCTSPRRLANKRIGQIKSKKFRCSGTEDYRSKLSGDCFADLACPEKCRCEGTTVDCSNQKLNKIPEHIPQYTAELRLNNNEFTVLEATGIFKKLPQLRKINFSNNKITDIEEGAFEGASGVNEILLTSNRLENVQHKMFKGLESLKTLMLRSNRITCVGNDSFIGLSSVRLLSLYDNQITTVAPGAFDTLHSLSTLNLLANPFNCNCYLAWLGEWLRKKRIVTGNPRCQKPYFLKEIPIQDVAIQDFTCDDGNDDNSCSPLSRCPTECTCLDTVVRCSNKGLKVLPKGIPRDVTELYLDGNQFTLVPKELSNYKHLTLIDLSNNRISTLSNQSFSNMTQLLTLILSYNRLRCIPPRTFDGLKSLRLLSLHGNDISVVPEGAFNDLSALSHLAIGANPLYCDCNMQWLSDWVKSEYKEPGIARCAGPGEMADKLLLTTPSKKFTCQGPVDVNILAKCNPCLSNPCKNDGTCNSDPVDFYRCTCPYGFKGQDCDVPIHACISNPCKHGGTCHLKEGEEDGFWCICADGFEGENCEVNVDDCEDNDCENNSTCVDGINNYTCLCPPEYTGELCEEKLDFCAQDLNPCQHDSKCILTPKGFKCDCTPGYVGEHCDIDFDDCQDNKCKNGAHCTDAVNGYTCICPEGYSGLFCEFSPPMVLPRTSPCDNFDCQNGAQCIVRINEPICQCLPGYQGEKCEKLVSVNFINKESYLQIPSAKVRPQTNITLQIATDEDSGILLYKGDKDHIAVELYRGRVRASYDTGSHPASAIYSVETINDGNFHIVELLALDQSLSLSVDGGNPKIITNLSKQSTLNFDSPLYVGGMPGKSNVASLRQAPGQNGTSFHGCIRNLYINSELQDFQKVPMQTGILPGCEPCHKKVCAHGTCQPSSQAGFTCECQEGWMGPLCDQRTNDPCLGNKCVHGTCLPINAFSYSCKCLEGHGGVLCDEEEDLFNPCQAIKCKHGKCRLSGLGQPYCECSSGYTGDSCDREISCRGERIRDYYQKQQGYAACQTTKKVSRLECRGGCAGGQCCGPLRSKRRKYSFECTDGSSFVDEVEKVVKCGCTRCVS

SEQ ID NO: 63720 - protein, 1521 aa, Homo sapiens
MRGVGWQMLSLSLGLVLAILNKVAPQACPAQCSCSGSTVDCHGLALRSVPRNIPRNTERLDLNGNNITRITKTDFAGLRHLRVLQLMENKISTIERGAFQDLKELERLRLNRNHLQLFPELLFLGTAKLYRLDLSENQIQAIPRKAFRGAVDIKNLQLDYNQISCIEDGAFRALRDLEVLTLNNNNITRLSVASFNHMPKLRTFRLHSNNLYCDCHLAWLSDWLRQRPRVGLYTQCMGPSHLRGHNVAEVQKREFVCSGHQSFMAPSCSVLHCPAACTCSNNIVDCRGKGLTEIPTNLPETITEIRLEQNTIKVIPPGAFSPYKKLRRIDLSNNQISELAPDAFQGLRSLNSLVLYGNKITELPKSLFEGLFSLQLLLLNANKINCLRVDAFQDLHNLNLLSLYDNKLQTIAKGTFSPLRAIQTMHLAQNPFICDCHLKWLADYLHTNPIETSGARCTSPRRLANKRIGQIKSKKFRCSGTEDYRSKLSGDCFADLACPEKCRCEGTTVDCSNQKLNKIPEHIPQYTAELRLNNNEFTVLEATGIFKKLPQLRKINFSNNKITDIEEGAFEGASGVNEILLTSNRLENVQHKMFKGLESLKTLMLRSNRITCVGNDSFIGLSSVRLLSLYDNQITTVAPGAFDTLHSLSTLNLLANPFNCNCYLAWLGEWLRKKRIVTGNPRCQKPYFLKEIPIQDVAIQDFTCDDGNDDNSCSPLSRCPTECTCLDTVVRCSNKGLKVLPKGIPRDVTELYLDGNQFTLVPKELSNYKHLTLIDLSNNRISTLSNQSFSNMTQLLTLILSYNRLRCIPPRTFDGLKSLRLLSLHGNDISVVPEGAFNDLSALSHLAIGANPLYCDCNMQWLSDWVKSEYKEPGIARCAGPGEMADKLLLTTPSKKFTCQGPVDVNILAKCNPCLSNPCKNDGTCNSDPVDFYRCTCPYGFKGQDCDVPIHACISNPCKHGGTCHLKEGEEDGFWCICADGFEGENCEVNVDDCEDNDCENNSTCVDGINNYTCLCPPEYTGELCEEKLDFCAQDLNPCQHDSKCILTPKGFKCDCTPGYVGEHCDIDFDDCQDNKCKNGAHCTDAVNGYTCICPEGYSGLFCEFSPPMVLPRTSPCDNFDCQNGAQCIVRINEPICQCLPGYQGEKCEKLVSVNFINKESYLQIPSAKVRPQTNITLQIATDEDSGILLYKGDKDHIAVELYRGRVRASYDTGSHPASAIYSVETINDGNFHIVELLALDQSLSLSVDGGNPKIITNLSKQSTLNFDSPLYVGGMPGKSNVASLRQAPGQNGTSFHGCIRNLYINSELQDFQKVPMQTGILPGCEPCHKKVCAHGTCQPSSQAGFTCECQEGWMGPLCDQRTNDPCLGNKCVHGTCLPINAFSYSCKCLEGHGGVLCDEEEDLFNPCQAIKCKHGKCRLSGLGQPYCECSSGYTGDSCDREISCRGERIRDYYQKQQGYAACQTTKKVSRLECRGGCAGGQCCGPLRSKRRKYSFECTDGSSFVDEVEKVVKCGCTRCVS

SEQ ID NO: 63721 - protein, 1525 aa, Homo sapiens
MRGVGWQMLSLSLGLVLAILNKVAPQACPAQCSCSGSTVDCHGLALRSVPRNIPRNTERLDLNGNNITRITKTDFAGLRHLRVLQLMENKISTIERGAFQDLKELERLRLNRNHLQLFPELLFLGTAKLYRLDLSENQIQAIPRKAFRGAVDIKNLQLDYNQISCIEDGAFRALRDLEVLTLNNNNITRLSVASFNHMPKLRTFRLHSNNLYCDCHLAWLSDWLRQRPRVGLYTQCMGPSHLRGHNVAEVQKREFVCSDEEEGHQSFMAPSCSVLHCPAACTCSNNIVDCRGKGLTEIPTNLPETITEIRLEQNTIKVIPPGAFSPYKKLRRIDLSNNQISELAPDAFQGLRSLNSLVLYGNKITELPKSLFEGLFSLQLLLLNANKINCLRVDAFQDLHNLNLLSLYDNKLQTIAKGTFSPLRAIQTMHLAQNPFICDCHLKWLADYLHTNPIETSGARCTSPRRLANKRIGQIKSKKFRCSGTEDYRSKLSGDCFADLACPEKCRCEGTTVDCSNQKLNKIPEHIPQYTAELRLNNNEFTVLEATGIFKKLPQLRKINFSNNKITDIEEGAFEGASGVNEILLTSNRLENVQHKMFKGLESLKTLMLRSNRITCVGNDSFIGLSSVRLLSLYDNQITTVAPGAFDTLHSLSTLNLLANPFNCNCYLAWLGEWLRKKRIVTGNPRCQKPYFLKEIPIQDVAIQDFTCDDGNDDNSCSPLSRCPTECTCLDTVVRCSNKGLKVLPKGIPRDVTELYLDGNQFTLVPKELSNYKHLTLIDLSNNRISTLSNQSFSNMTQLLTLILSYNRLRCIPPRTFDGLKSLRLLSLHGNDISVVPEGAFNDLSALSHLAIGANPLYCDCNMQWLSDWVKSEYKEPGIARCAGPGEMADKLLLTTPSKKFTCQGPVDVNILAKCNPCLSNPCKNDGTCNSDPVDFYRCTCPYGFKGQDCDVPIHACISNPCKHGGTCHLKEGEEDGFWCICADGFEGENCEVNVDDCEDNDCENNSTCVDGINNYTCLCPPEYTGELCEEKLDFCAQDLNPCQHDSKCILTPKGFKCDCTPGYVGEHCDIDFDDCQDNKCKNGAHCTDAVNGYTCICPEGYSGLFCEFSPPMVLPRTSPCDNFDCQNGAQCIVRINEPICQCLPGYQGEKCEKLVSVNFINKESYLQIPSAKVRPQTNITLQIATDEDSGILLYKGDKDHIAVELYRGRVRASYDTGSHPASAIYSVETINDGNFHIVELLALDQSLSLSVDGGNPKIITNLSKQSTLNFDSPLYVGGMPGKSNVASLRQAPGQNGTSFHGCIRNLYINSELQDFQKVPMQTGILPGCEPCHKKVCAHGTCQPSSQAGFTCECQEGWMGPLCDQRTNDPCLGNKCVHGTCLPINAFSYSCKCLEGHGGVLCDEEEDLFNPCQAIKCKHGKCRLSGLGQPYCECSSGYTGDSCDREISCRGERIRDYYQKQQGYAACQTTKKVSRLECRGGCAGGQCCGPLRSKRRKYSFECTDGSSFVDEVEKVVKCGCTRCVS

SEQ ID NO: 63722 - protein, 1529 aa, Homo sapiens
MRGVGWQMLSLSLGLVLAILNKVAPQACPAQCSCSGSTVDCHGLALRSVPRNIPRNTERLDLNGNNITRITKTDFAGLRHLRVLQLMENKISTIERGAFQDLKELERLRLNRNHLQLFPELLFLGTAKLYRLDLSENQIQAIPRKAFRGAVDIKNLQLDYNQISCIEDGAFRALRDLEVLTLNNNNITRLSVASFNHMPKLRTFRLHSNNLYCDCHLAWLSDWLRQRPRVGLYTQCMGPSHLRGHNVAEVQKREFVCSGHQSFMAPSCSVLHCPAACTCSNNIVDCRGKGLTEIPTNLPETITEIRLEQNTIKVIPPGAFSPYKKLRRIDLSNNQISELAPDAFQGLRSLNSLVLYGNKITELPKSLFEGLFSLQLLLLNANKINCLRVDAFQDLHNLNLLSLYDNKLQTIAKGTFSPLRAIQTMHLAQNPFICDCHLKWLADYLHTNPIETSGARCTSPRRLANKRIGQIKSKKFRCSAKEQYFIPGTEDYRSKLSGDCFADLACPEKCRCEGTTVDCSNQKLNKIPEHIPQYTAELRLNNNEFTVLEATGIFKKLPQLRKINFSNNKITDIEEGAFEGASGVNEILLTSNRLENVQHKMFKGLESLKTLMLRSNRITCVGNDSFIGLSSVRLLSLYDNQITTVAPGAFDTLHSLSTLNLLANPFNCNCYLAWLGEWLRKKRIVTGNPRCQKPYFLKEIPIQDVAIQDFTCDDGNDDNSCSPLSRCPTECTCLDTVVRCSNKGLKVLPKGIPRDVTELYLDGNQFTLVPKELSNYKHLTLIDLSNNRISTLSNQSFSNMTQLLTLILSYNRLRCIPPRTFDGLKSLRLLSLHGNDISVVPEGAFNDLSALSHLAIGANPLYCDCNMQWLSDWVKSEYKEPGIARCAGPGEMADKLLLTTPSKKFTCQGPVDVNILAKCNPCLSNPCKNDGTCNSDPVDFYRCTCPYGFKGQDCDVPIHACISNPCKHGGTCHLKEGEEDGFWCICADGFEGENCEVNVDDCEDNDCENNSTCVDGINNYTCLCPPEYTGELCEEKLDFCAQDLNPCQHDSKCILTPKGFKCDCTPGYVGEHCDIDFDDCQDNKCKNGAHCTDAVNGYTCICPEGYSGLFCEFSPPMVLPRTSPCDNFDCQNGAQCIVRINEPICQCLPGYQGEKCEKLVSVNFINKESYLQIPSAKVRPQTNITLQIATDEDSGILLYKGDKDHIAVELYRGRVRASYDTGSHPASAIYSVETINDGNFHIVELLALDQSLSLSVDGGNPKIITNLSKQSTLNFDSPLYVGGMPGKSNVASLRQAPGQNGTSFHGCIRNLYINSELQDFQKVPMQTGILPGCEPCHKKVCAHGTCQPSSQAGFTCECQEGWMGPLCDQRTNDPCLGNKCVHGTCLPINAFSYSCKCLEGHGGVLCDEEEDLFNPCQAIKCKHGKCRLSGLGQPYCECSSGYTGDSCDREISCRGERIRDYYQKQQGYAACQTTKKVSRLECRGGCAGGQCCGPLRSKRRKYSFECTDGSSFVDEVEKVVKCGCTRCVS

SEQ ID NO: 63723 - protein, 1472 aa, Homo sapiens
MAPGWAGVGAAVRARLALALALASVLSGPPAVACPTKCTCSAASVDCHGLGLRAVPRGIPRNAERLDLDRNNITRITKMDFAGLKNLRVLHLEDNQVSVIERGAFQDLKQLERLRLNKNKLQVLPELLFQSTPKLTRLDLSENQIQGIPRKAFRGITDVKNLQLDNNHISCIEDGAFRALRDLEILTLNNNNISRILVTSFNHMPKIRTLRLHSNHLYCDCHLAWLSDWLRQRRTVGQFTLCMAPVHLRGFNVADVQKKEYVCPAPHSEPPSCNANSISCPSPCTCSNNIVDCRGKGLMEIPANLPEGIVEIRLEQNSIKAIPAGAFTQYKKLKRIDISKNQISDIAPDAFQGLKSLTSLVLYGNKITEIVKGLFDGLVSLQLLLLNANKINCLRVNTFQDLQNLNLLSLYDNKLQTISKGLFAPLQSIQTLHLAQNPFVCDCHLKWLADYLQDNPIETSGARCSSPRRLANKRISQIKSKKFRCSGSEDYRSRFSSECFMDLVCPEKCRCEGTIVDCSNQKLVRIPSHLPEYVTDLRLNDNEVSVLEATGIFKKLPNLRKINLSNNKIKEVREGAFDGAASVQELMLTGNQLETVHGRVFRGLSGLKTLMLRSNLIGCVSNDTFAGLSSVRLLSLYDNRITTITPGAFTTLVSLSTINLLSNPFNCNCHLAWLGKWLRKRRIVSGNPRCQKPFFLKEIPIQDVAIQDFTCDGNEESSCQLSPRCPEQCTCMETVVRCSNKGLRALPRGMPKDVTELYLEGNHLTAVPRELSALRHLTLIDLSNNSISMLTNYTFSNMSHLSTLILSYNRLRCIPVHAFNGLRSLRVLTLHGNDISSVPEGSFNDLTSLSHLALGTNPLHCDCSLRWLSEWVKAGYKEPGIARCSSPEPMADRLLLTTPTHRFQCKGPVDINIVAKCNACLSSPCKNNGTCTQDPVELYRCACPYSYKGKDCTVPINTCIQNPCQHGGTCHLSDSHKDGFSCSCPLGFEGQRCEINPDDCEDNDCENNATCVDGINNYVCICPPNYTGELCDEVIDHCVPELNLCQHEAKCIPLDKGFSCECVPGYSGKLCETDNDDCVAHKCRHGAQCVDTINGYTCTCPQGFSGPFCEHPPPMVLLQTSPCDQYECQNGAQCIVVQQEPTCRCPPGFAGPRCEKLITVNFVGKDSYVELASAKVRPQANISLQVATDKDNGILLYKGDNDPLALELYQGHVRLVYDSLSSPPTTVYSVETVNDGQFHSVELVTLNQTLNLVVDKGTPKSLGKLQKQPAVGINSPLYLGGIPTSTGLSALRQGTDRPLGGFHGCIHEVRINNELQDFKALPPQSLGVSPGCKSCTVCKHGLCRSVEKDSVVCECRPGWTGPLCDQEARDPCLGHRCHHGKCVATGTSYMCKCAEGYGGDLCDNKNDSANACSAFKCHHGQCHISDQGEPYCLCQPGFSGEHCQQVFRAQVFQSSLPGNCSWSCWPPRPPMP

SEQ ID NO: 63724 - protein, 1523 aa, Homo sapiens
MAPGWAGVGAAVRARLALALALASVLSGPPAVACPTKCTCSAASVDCHGLGLRAVPRGIPRNAERLDLDRNNITRITKMDFAGLKNLRVLHLEDNQVSVIERGAFQDLKQLERLRLNKNKLQVLPELLFQSTPKLTRLDLSENQIQGIPRKAFRGITDVKNLQLDNNHISCIEDGAFRALRDLEILTLNNNNISRILVTSFNHMPKIRTLRLHSNHLYCDCHLAWLSDWLRQRRTVGQFTLCMAPVHLRGFNVADVQKKEYVCPAPHSEPPSCNANSISCPSPCTCSNNIVDCRGKGLMEIPANLPEGIVEIRLEQNSIKAIPAGAFTQYKKLKRIDISKNQISDIAPDAFQGLKSLTSLVLYGNKITEIVKGLFDGLVSLQLLLLNANKINCLRVNTFQDLQNLNLLSLYDNKLQTISKGLFAPLQSIQTLHLAQNPFVCDCHLKWLADYLQDNPIETSGARCSSPRRLANKRISQIKSKKFRCSGSEDYRSRFSSECFMDLVCPEKCRCEGTIVDCSNQKLVRIPSHLPEYVTDLRLNDNEVSVLEATGIFKKLPNLRKINLSNNKIKEVREGAFDGAASVQELMLTGNQLETVHGRVFRGLSGLKTLMLRSNLIGCVSNDTFAGLSSVRLLSLYDNRITTITPGAFTTLVSLSTINLLSNPFNCNCHLAWLGKWLRKRRIVSGNPRCQKPFFLKEIPIQDVAIQDFTCDGNEESSCQLSPRCPEQCTCMETVVRCSNKGLRALPRGMPKDVTELYLEGNHLTAVPRELSALRHLTLIDLSNNSISMLTNYTFSNMSHLSTLILSYNRLRCIPVHAFNGLRSLRVLTLHGNDISSVPEGSFNDLTSLSHLALGTNPLHCDCSLRWLSEWVKAGYKEPGIARCSSPEPMADRLLLTTPTHRFQCKGPVDINIVAKCNACLSSPCKNNGTCTQDPVELYRCACPYSYKGKDCTVPINTCIQNPCQHGGTCHLSDSHKDGFSCSCPLGFEGQRCEINPDDCEDNDCENNATCVDGINNYVCICPPNYTGELCDEVIDHCVPELNLCQHEAKCIPLDKGFSCECVPGYSGKLCETDNDDCVAHKCRHGAQCVDTINGYTCTCPQGFSGPFCEHPPPMVLLQTSPCDQYECQNGAQCIVVQQEPTCRCPPGFAGPRCEKLITVNFVGKDSYVELASAKVRPQANISLQVATDKDNGILLYKGDNDPLALELYQGHVRLVYDSLSSPPTTVYSVETVNDGQFHSVELVTLNQTLNLVVDKGTPKSLGKLQKQPAVGINSPLYLGGIPTSTGLSALRQGTDRPLGGFHGCIHEVRINNELQDFKALPPQSLGVSPGCKSCTVCKHGLCRSVEKDSVVCECRPGWTGPLCDQEARDPCLGHRCHHGKCVATGTSYMCKCAEGYGGDLCDNKNDSANACSAFKCHHGQCHISDQGEPYCLCQPGFSGEHCQQENPCLGQVVREVIRRQKGYASCATASKVPIMECRGGCGPQCCQPTRSKRRKYVFQCTDGSSFVEEVERHLECGCLACS

SEQ ID NO: 63725 - protein, 1085 aa, Homo sapiens
MSTPSRFKKDKEIIAEYESQVKEIRAQLVEQQKCLEQQTEMRVQLLQDLQDFFRKKAEIETEYSRNLEKLAERFMAKTRSTKDHQQYKKDQNLLSPVNCWYLLLNQVRRESKDHATLSDIYLNNVIMRFMQISEDSTRMFKKSKEIAFQLHEDLMKVLNELYTVMKTYHMYHAESISAESKLKEAEKQEEKQIGRSGDPVFHIRLEERHQRRSSVKKIEKMKEKRQAKYSENKLKSIKARNEYLLTLEATNASVFKYYIHDLSDLIDCCDLGYHASLNRALRTYLSAEYNLETSRHEGLDIIENAVDNLEPRSDKQRFMEMYPAAFCPPMKFEFQSHMGDEVCQVSAQQPVQAELMLRYQQLQSRLATLKIENEEVKKTTEATLQTIQDMVTIEDYDVSECFQHSRSTESVKSTVSETYLSKPSIAKRRANQQETEQFYFMKLREYLEGSNLITKLQAKHDLLQRTLGEGHRAEYMTTRPPNVPPKPQKHRKSRPRSQYNTKLFNGDLETFVKDSGQVIPLIVESCIRFINLYGLQHQGIFRVSGSQVEVNDIKNSFERGENPLADDQSNHDINSVAGVLKLYFRGLENPLFPKERFNDLISCIRIDNLYERALHIRKLLLTLPRSVLIVMRYLFAFLNHLSQYSDENMMDPYNLAICFGPTLMPVPEIQDQVSCQAHVNEIIKTIIIHHETIFPDAKELDGPVYEKCMAGDDYCDSPYSEHGTLEEVDQDAGTEPHTSEDECEPIEAIAKFDYVGRSARELSFKKGASLLLYHRASEDWWEGRHNGIDGLVPHQYIVVQDMDDTFSDTLSQKADSEASSGPVTEDKSSSKDMNSPTDRHPDGYLARQRKRGEPPPPVRRPGRTSDGHCPLHPPHALSNSSVDLGSPSLASHPRGLLQNRGLNNDSPERRRRPGHGSLTNISRHDSLKKIDSPPIRRSTSSGQYTGFNDHKPLDPETIAQDIEETMNTALNELRELERQSTAKHAPDVVLDTLEQVKNSPTPATSTESLSPLHNVALRSSEPQIRRSTSSSSDTMSTFKPMVAPRMGVQLKPPALRPKPAVLPKTNPTIGPAPPPQGPTDKSCTM

SEQ ID NO: 63726 - protein, 1062 aa, Homo sapiens
MSTPSRFKKDKEIIAEYESQVKEIRAQLVEQQKCLEQQTEMRVQLLQDLQDFFRKKAEIETEYSRNLEKLAERFMAKTRSTKDHQQYKKDQNLLSPVNCWYLLLNQVRRESKDHATLSDIYLNNVIMRFMQISEDSTRMFKKSKEIAFQLHEDLMKVLNELYTVMKTYHMYHAESISAESKLKEAEKQEEKQIGRSGDPVFHIRLEERHQRRSSVKKIEKMKEKRQAKYSENKLKSIKARNEYLLTLEATNASVFKYYIHDLSDLIDCCDLGYHASLNRALRTYLSAEYNLETSRHEGLDIIENAVDNLEPRSDKQRFMEMYPAAFCPPMKFEFQSHMGDEVCQVSAQQPVQAELMLRYQQLQSRLATLKIENEEVKKTTEATLQTIQDMVTIEDYDVSECFQHSRSTESVKSTVSETYLSKPSIAKRRANQQETEQFYFMKLREYLEGSNLITKLQAKHDLLQRTLGEGHRAEYMTTSRGRRNSHTRHQDSGQVIPLIVESCIRFINLYGLQHQGIFRVSGSQVEVNDIKNSFERGENPLADDQSNHDINSVAGVLKLYFRGLENPLFPKERFNDLISCIRIDNLYERALHIRKLLLTLPRSVLIVMRYLFAFLNHLSQYSDENMMDPYNLAICFGPTLMPVPEIQDQVSCQAHVNEIIKTIIIHHETIFPDAKELDGPVYEKCMAGDDYCDSPYSEHGTLEEVDQDAGTEPHTSEDECEPIEAIAKFDYVGRSARELSFKKGASLLLYHRASEDWWEGRHNGIDGLVPHQYIVVQDMDDTFSDTLSQKADSEASSGPVTEDKSSSKDMNSPTDRHPDGYLARQRKRGEPPPPVRRPGRTSDGHCPLHPPHALSNSSVDLGSPSLASHPRGLLQNRGLNNDSPERRRRPGHGSLTNISRHDSLKKIDSPPIRRSTSSGQYTGFNDHKPLDPETIAQDIEETMNTALNELRELERQSTAKHAPDVVLDTLEQVKNSPTPATSTESLSPLHNVALRSSEPQIRRSTSSSSDTMSTFKPMVAPRMGVQLKPPALRPKPAVLPKTNPTIGPAPPPQGPTDKSCTM

SEQ ID NO: 63727 - protein, 985 aa, Homo sapiens
  VARIANT 1: note = MOD_RES - Any amino acid
XKDQNVLSPVNCWNLLLNQVKRESRDHTTLSDIYLNNIIPRFVQVSEDSGRLFKKSKEVGQQLQDDLMKVLNELYSVMKTYHMYNADSISAQSKLKEAEKQEEKQIGKSVKQEDRQTPRSPDSTANVRIEEKHVRRSSVKKIEKMKEKRQAKYTENKLKAIKARNEYLLALEATNASVFKYYIHDLSDLIDQCCDLGYHASLNRALRTFLSAELNLEQSKHEGLDAIENAVENLDATSDKQRLMEMYNNVFCPPMKFEFQPHMGDMASQLCAQQPVQSELVQRCQQLQSRLSTLKIENEEVKKTMEATLQTIQDIVTVEDFDVSDCFQYSNSMESVKSTVSETFMSKPSIAKRRANQQETEQFYFTKMKEYLEGRNLITKLQAKHDLLQKTLGESQRTDCSLARRSSTVRKQDSSQAIPLVVESCIRFISRHGLQHEGIFRVSGSQVEVNDIKNAFERGEDPLAGDQNDHDMDSIAGVLKLYFRGLEHPLFPKDIFHDLMACVTMDNLQERALHIRKVLLVLPKTTLIIMRYLFAFLNHLSQFSEENMMDPYNLAICFGPSLMSVPEGHDQVSCQAHVNELIKTIIIQHENIFPSPRELEGPVYSRGGSMEDYCDSPHGETTSVEDSTQDVTAEHHTSDDECEPIEAIAKFDYVGRTARELSFKKGASLLLYQRASDDWWEGRHNGIDGLIPHQYIVVQDTEDGVVERSSPKSEIEVISEPPEEKVTARAGASCPSGGHVADIYLANINKQRKRPESGSIRKTFRSDSHGLSSSLTDSSSPGVGASCRPSSQPIMSQSLPKEGPDKCSISGHGSLNSISRHSSLKNRLDSPQIRKTATAGRSKSFNNHRPMDPEVIAQDIEATMNSALNELRELERQSSVKHTPDVVLDTLEPLKTSPVVAPTSEPSSPLHTQLLKDPEPAFQRSASTAGDIACAFRPVKSVKMAAPVKPPATRPKPTVFPKTNATSPGVNSSTSPQSTDKSCTV

SEQ ID NO: 63728 - protein, 931 aa, Homo sapiens
QSKEVGQQLQDDLMKVLNELYSVMKTYHMYNADSISAQSKLKEAEKQEEKQIGKSVKQEDRQTPRSPDSTANVRIEEKHVRRSSVKKIEKMKEKRQAKYTENKLKAIKARNEYLLALEATNASVFKYYIHDLSDLIDQCCDLGYHASLNRALRTFLSAELNLEQSKHEGLDAIENAVENLDATSDKQRLMEMYNNVFCPPMKFEFQPHMGDMASQLCAQQPVQSELVQRCQQLQSRLSTLKIENEEVKKTMEATLQTIQDIVTVEDFDVSDCFQYSNSMESVKSTVSETFMSKPSIAKRRANQQETEQFYFTKMKEYLEGRNLITKLQAKHDLLQKTLGESQRTDCSLARRSSTVRKQDSSQAIPLVVESCIRFISRHGLQHEGIFRVSGSQVEVNDIKNAFERGEDPLAGDQNDHDMDSIAGVLKLYFRGLEHPLFPKDIFHDLMACVTMDNLQERALHIRKVLLVLPKTTLIIMRYLFAFLNHLSQFSEENMMDPYNLAICFGPSLMSVPEGHDQVSCQAHVNELIKTIIIQHENIFPSPRELEGPVYSRGGSMEDYCDSPHGETTSVEDSTQDVTAEHHTSDDECEPIEAIAKFDYVGRTARELSFKKGASLLLYQRASDDWWEGRHNGIDGLIPHQYIVVQDTEDGVVERSSPKSEIEVISEPPEEKVTARAGASCPSGGHVADIYLANINKQRKRPESGSIRKTFRSDSHGLSSSLTDSSSPGVGASCRPSSQPIMSQSLPKEGPDKCSISGHGSLNSISRHSSLKNRLDSPQIRKTATAGRSKSFNNHRPMDPEVIAQDIEATMNSALNELRELERQSSVKHTPDVVLDTLEPLKTSPVVAPTSEPSSPLHTQLLKDPEPAFQRSASTAGDIACAFRPVKSVKMAAPVKPPATRPKPTVFPKTNATSPGVNSSTSPQSTDKSCTV

SEQ ID NO: 63729 - protein, 703 aa, Homo sapiens
RKDQNVLSPVNCWNLLLNQVKRESRDHTTLSDIYLNNIIPRFVQVSEDSGRLFKKSKEVGQQLQDDLMKVLNELYSVMKTYHMYNADSISAQSKLKEAEKQEEKQIGKSVKQEDRQTPRSPDSTANVRIEEKHVRRSSVKKIEKMKEKRQAKYTENKLKAIKARNEYLLALEATNASVFKYYIHDLSDLIDCCDLGYHASLNRALRTFLSAELNLEQSKHEGLDAIENAVENLDATSDKQRLMEMYNNVFCPPMKFEFQPHMGDMASQLCAQQPVQSELVQRCQQLQSRLSTLKIENEEVKKTMEATLQTIQDIVTVEDFDVSDCFQYSNSMESVKSTVSETFMSKPSIAKRRANQQETEQFYFTKMKEYLEGRNLITKLQAKHDLLQKTLGESQRTDCSLARRSSTVRKQDSSQAIPLVVESCIRFISRHGLQHEGIFRVSGSQVEVNDIKNAFERGEDPLAGDQNDHDMDSIAGVLKLYFRGLEHPLFPKDIFHDLMACVTMDNLQERALHIRKVLLVLPKTTLIIMRYLFAFLNHLSQFSEENMMDPYNLAICFGPSLMSVPEGHDQVSCQAHVNELIKTIIIQHENIFPSPRELEGPVYSRGGSMEDYCDSPHGETTSVEDSTQDVTAEHHTSDDECEPIEAIAKFDYVGRTARELSFKKGASLLLYQRASDDWWEGRHNGIDGLIPHQYIVVQDTLIS

SEQ ID NO: 63730 - protein, 252 aa, Homo sapiens
MEDYCDSPHGETTSVEDSTQDVTAEHHTSDDECEPIEAIAKFDYVGRTARELSFKKGASLLLYQRASDDWWEGRHNGIDGLIPHQYIVVQDTEDGVVERSSPKSEIEVISEPPEEKVTARAGASCPSGGHVADIYLANINNNLHLDNTKPVTTKQRKRPESGSIRKTFRSDSHGLSSSLTDSSSPGVGASCRPSSQPIMSQSLPKEGPDKCSISGHGSLNSISRHSSLKNRLDSPQIRKTATAGRSKSFNNH

SEQ ID NO: 63731 - protein, 230 aa, Homo sapiens
  VARIANT 1: note = MOD_RES - Any amino acid
XAEHHTSDDECEPIEAIAKFDYVGRTARELSFKKGASLLLYQRASDDWWEGRHNGIDGLIPHQYIVVQDTEDGVVERSSPKSEIEVISEPPEEKVTARAGASCPSGGHVADIYLANINNNLHLDNTKPVTTKQRKRPESGSIRKTFRSDSHGLSSSLTDSSSPGVGASCRPSSQPIMSQSLPKEGPDKCSISGHGSLNSISRHSSLKNRLDSPQIRKTATAGRSKSFNNH

SEQ ID NO: 63732 - protein, 450 aa, Homo sapiens
VKKTMEATLQTIQDIVTVEDFDVSDCFQYSNSMESVKSTVSETFMSKPSIAKRRANQQETEQFYFTKMKEYLEGRNLITKLQAKHDLLQKTLGESQRTDCSLARRSSTVRKQDSSQAIPLVVESCIRFISRHGLQHEGIFRVSGSQVEVNDIKNAFERGEDPLAGDQNDHDMDSIAGVLKLYFRGLEHPLFPKDIFHDLMACVTMDNLQERALHIRKVLLVLPKTTLIIMRYLFAFLNHLSQFSEENMMDPYNLAICFGPSLMSVPEGHDQVSCQAHVNELIKTIIIQHENIFPSPRELEGPVYSRGGSMEDYCDSPHGETTSVEDSTQDVTAEHHTSDDECEPIEAIAKFDYVGRTARELSFKKGASLLLYQRASDDWWEGRHNGIDGLIPHQYIVVQDTEDGVVERSSPKSEIEVISEPPEEKVTARAGASCPSGGHVADIYLANINK

SEQ ID NO: 63733 - protein, 1075 aa, Homo sapiens
MSSQTKFKKDKEIIAEYEAQIKEIRTQLVEQFKCLEQQSESRLQLLQDLQEFFRRKAEIELEYSRSLEKLAERFSSKIRSSREHQFKKDQYLLSPVNCWYLVLHQTRRESRDHATLNDIFMNNVIVRLSQISEDVIRLFKKSKEIGLQMHEELLKVTNELYTVMKTYHMYHAESISAESKLKEAEKQEEKQFNKSGDLSMNLLRHEDRPQRRSSVKKIEKMKEKRQAKYSENKLKCTKARNDYLLNLAATNAAISKYYIHDVSDLIDCCDLGFHASLARTFRTYLSAEYNLETSRHEGLDVIENAVDNLDSRSDKHTVMDMCNQVFCPPLKFEFQPHMGDEVCQVSAQQPVQTELLMRYHQLQSRLATLKIENEEVRKTLDATMQTLQDMLTVEDFDVSDAFQHSRSTESVKSAASETYMSKINIAKRRANQQETEMFYFTKFKEYVNGSNLITKLQAKHDLLKQTLGEGERAECGTTRGRRNARTRNQDSGQAIPLVVESCIRYINLYGLQQQGIFRVPGSQVEVNDIKNSFERGEDPLVDDQNERDINSVAGVLKLYFRGLENPLFPKERFQDLISTIKLENPAERVHQIQQILVTLPRVVIVVMRYLFAFLNHLSQYSDENMMDPYNLAICFGPTLMHIPDGQDPVSCQAHINEVIKTIIIHHEAIFPSPRELEGPVYEKCMAGGEEYCDSPHSEPGAIDEVDHDNGTEPHTSDEEVEQIEAIAKFDYMGRSPRELSFKKGASLLLYHRASEDWWEGRHNGVDGLIPHQYIVVQDMDDAFSDSLSQKADSEASSGPLLDDKASSKNDLQSPTEHISDYGFGGVMGRVRLRSDGAAIPRRRSGGDTHSPPRGLGPSIDTPPRAAACPSSPHKIPLTRGRIESPEKRRMATFGSAGSINYPDKKALSEGHSMRSTCGSTRHSSLGDHKSLEAEALAEDIEKTMSTALHELRELERQNTVKQAPDVVLDTLEPLKNPPGPVSSEPASPLHTIVIRDPDAAMRRSSSSSTEMMTTFKPALSARLAGAQLRPPPMRPVRPVVQHRSSSSSSSGVGSPAVTPTEKMFPNSSADKSGTM

SEQ ID NO: 63734 - protein, 1099 aa, Homo sapiens
MSSQTKFKKDKEIIAEYEAQIKEIRTQLVEQFKCLEQQSESRLQLLQDLQEFFRRKAEIELEYSRSLEKLAERFSSKIRSSREHQFKKDQYLLSPVNCWYLVLHQTRRESRDHATLNDIFMNNVIVRLSQISEDVIRLFKKSKEIGLQMHEELLKVTNELYTVMKTYHMYHAESISAESKLKEAEKQEEKQFNKSGDLSMNLLRHEDRPQRRSSVKKIEKMKEKRQAKYSENKLKCTKARNDYLLNLAATNAAISKYYIHDVSDLIDCCDLGFHASLARTFRTYLSAEYNLETSRHEGLDVIENAVDNLDSRSDKHTVMDMCNQVFCPPLKFEFQPHMGDEVCQVSAQQPVQTELLMRYHQLQSRLATLKIENEEVRKTLDATMQTLQDMLTVEDFDVSDAFQHSRSTESVKSAASETYMSKINIAKRRANQQETEMFYFTKFKEYVNGSNLITKLQAKHDLLKQTLGEGERAECGTTRPPCLPPKPQKMRRPRPLSVYSHKLFNGSMEAFIKDSGQAIPLVVESCIRYINLYGLQQQGIFRVPGSQVEVNDIKNSFERGEDPLVDDQNERDINSVAGVLKLYFRGLENPLFPKERFQDLISTIKLENPAERVHQIQQILVTLPRVVIVVMRYLFAFLNHLSQYSDENMMDPYNLAICFGPTLMHIPDGQDPVSCQAHINEVIKTIIIHHEAIFPSPRELEGPVYEKCMAGGEEYCDSPHSEPGAIDEVDHDNGTEPHTSDEEVEQIEAIAKFDYMGRSPRELSFKKGASLLLYHRASEDWWEGRHNGVDGLIPHQYIVVQDMDDAFSDSLSQKADSEASSGPLLDDKASSKNDLQSPTEHISDYGFGGVMGRVRLRSDGAAIPRRRSGGDTHSPPRGLGPSIDTPPRAAACPSSPHKIPLTRGRIESPEKRRMATFGSAGSINYPDKKALSEGHSMRSTCGSTRHSSLGDHKSLEAEALAEDIEKTMSTALHELRELERQNTVKQAPDVVLDTLEPLKNPPGPVSSEPASPLHTIVIRDPDAAMRRSSSSSTEMMTTFKPALSARLAGAQLRPPPMRPVRPVVQHRSSSSSSSGVGSPAVTPTEKMFPNSSADKSGTM

SEQ ID NO: 63735 - protein, 335 aa, Homo sapiens
MNNVIVRLSQISEDVIRLFKKSKEIGLQMHEELLKVTNELYTVMKTYHMYHAESISAESKLKEAEKQEEKQFNKSGDLSMNLLRHEDRPQRRSSVKKIEKMKEKRQAKYSENKLKCTKARNDYLLNLAATNAAISKYYIHDVSDLIDCCDLGFHASLARTFRTYLSAEYNLETSRHEGLDVIENAVDNLDSRSDKHTVMDMCNQVFCPPLKFEFQPHMGDEVCQVSAQQPVQTELLMRYHQLQSRLATLKIENEEVRKTLDATMQTLQDMLTVEDFDVSDAFQHSRSTESVKSAASETYMSKINIAKRRANQQETEMFYFTKGPDDVFPICHPRL

SEQ ID NO: 63736 - protein, 119 aa, Homo sapiens
MSWWRNNFWIILAVAIIVVSVGLGLILYCVCKWQLRRGKKWEIAKPLKHKQVDEEKMYDFLLLRTACSLPPLPLHYRTSMTETYGVLLCRPGWSALARSRLTAASASWVQAILLPQPPK

SEQ ID NO: 63737 - protein, 145 aa, Homo sapiens
MDTFTVQDSTAMSWWRNNFWIILAVAIIVVSVGLGLILYCVCKWQLRRGKKWEIAKPLKHKQVDEEKMYENVLNESPVQLPPLPPRNWPSLEDSSPQEAPSQPPATYSLVNKVKNKKTVSIPSYIEPEDDYDDVEIPANTEKASF

SEQ ID NO: 63738 - protein, 145 aa, Homo sapiens; identical to SEQ ID NO: 63737

SEQ ID NO: 63739 - protein, 465 aa, Homo sapiens
MNVTSLFSFTSPAVKRLLGWKQGDEEEKWAEKAVDALVKKLKKKKGAMEELEKALSCPGQPSNCVTIPRSLDGRLQVSHRKGLPHVIYCRVWRWPDLQSHHELKPLECCEFPFGSKQKEVCINPYHYKRVESPVLPPVLVPRHSEYNPQHSLLAQFRNLGQNEPHMPLNATFPDSFQQPNSHPFPHSPNSSYPNSPGSSSSTYPHSPTSSDPGSPFQMPADTPPPAYLPPEDPMTQDGSQPMDTNMMAPPLPSEINRGDVQAVAYEEPKHWCSIVYYELNNRVGEAFHASSTSVLVDGFTDPSNNKNRFCLGLLSNVNRNSTIENTRRHIGKGVHLYYVGGEVYAECLSDSSIFVQSRNCNYHHGFHPTTVCKIPSGCSLKIFNNQEFAQLLAQSVNHGFETVYELTKMCTIRMSFVKGWGAEYHRQDVTSTPCWIEIHLHGPLQWLDKVLTQMGSPHNPISSVS

SEQ ID NO: 63740 - protein, 465 aa, Homo sapiens; identical to SEQ ID NO: 63739

SEQ ID NO: 63741 - protein, 58 aa, Homo sapiens
MNVTSLFSFTSPAVKRLLGWKQGDEEEKWAEKAVDALVKKLKKKKGAMEELEKALSCP

SEQ ID NO: 63742 - protein, 10 aa, Homo sapiens
MNVTSLFSFT

SEQ ID NO: 63743 - protein, 95 aa, Homo sapiens
MNVTSLFSFTSPAVKRLLGWKQGDEEEKWAEKAVDALVKKLKKKKGAMEELEKALSCPGQPSNCVTIPRSLDGRLQVSHRKGLPHVIYCRVWRWP

SEQ ID NO: 63744 - protein, 133 aa, Homo sapiens
MNVTSLFSFTSPAVKRLLGWKQGDEEEKWAEKAVDALVKKLKKKKGAMEELEKALSCPGQPSNCVTIPRSLDGRLQVSHRKGLPHVIYCRVWRWPDLQSHHELKPLECCEFPFGSKQKEVCINPYHYKRVESP

SEQ ID NO: 63745 - protein, 106 aa, Homo sapiens
MNVTSLFSFTSPAVKRLLGWKQGDEEEKWAEKAVDALVKKLKKKKGAMEELEKALSCPGQPSNCVTIPRSLDGRLQVSHRKGLPHVIYCRVWRWPDLQSHHELKPL

SEQ ID NO: 63746 - protein, 112 aa, Homo sapiens
MNVTSLFSFTSPAVKRLLGWKQGDEEEKWAEKAVDALVKKLKKKKGAMEELEKALSCPGQPSNCVTIPRSLDGRLQVSHRKGLPHVIYCRVWRWPDLQSHHELKPLECCEFP

SEQ ID NO: 63747 - protein, 465 aa, Homo sapiens; identical to SEQ ID NO: 63739

SEQ ID NO: 63748 - protein, 552 aa, Homo sapiens
MDNMSITNTPTSNDACLSIVHSLMCHRQGGESETFAKRAIESLVKKLKEKKDELDSLITAITTNGAHPSKCVTIQRTLDGRLQVAGRKGFPHVIYARLWRWPDLHKNELKHVKYCQYAFDLKCDSVCVNPYHYERVVSPGIDLSGLTLQSNAPSSMMVKDEYVHDFEGQPSLSTEGHSIQTIQHPPSNRASTETYSTPALLAPSESNATSTANFPNIPVASTSQPASILGGSHSEGLLQIASGPQPGQQQNGFTGQPATYHHNSTTTWTGSRTAPYTPNLPHHQNGHLQHHPPMPPHPGHYWPVHNELAFQPPISNHPAPEYWCSIAYFEMDVQVGETFKVPSSCPIVTVDGYVDPSGGDRFCLGQLSNVHRTEAIERARLHIGKGVQLECKGEGDVWVRCLSDHAVFVQSYYLDREAGRAPGDAVHKIYPSAYIKVFDLRQCHRQMQQQAATAQAAAAAQAAAVAGNIPGPGSVGGIAPAISLSAAAGIGVDDLRRLCILRMSFVKGWGPDYPRQSIKETPCWIEIHLHRALQLLDEVLHTMPIADPQPLD

SEQ ID NO: 63749 - protein, 552 aa, Homo sapiens; identical to SEQ ID NO: 63748

SEQ ID NO: 63750 - protein, 177 aa, Homo sapiens
MDNMSITNTPTSNDACLSIVHSLMCHRQGGESETFAKRAIESLVKKLKEKKDELDSLITAITTNGAHPSKCVTIQRTLDGRLQVAGRKGFPHVIYARLWRWPDLHKNELKHVKYCQYAFDLKCDSVCVNPYHYERVVSPGIDLSGLTLQSNENNWYFSQLLLDLDKGMIQEQAIHGP

SEQ ID NO: 63751 - protein, 436 aa, Homo sapiens
MDNMSITNTPTSNDACLSIVHSLMCHRQGGESETFAKRAIESLVKKLKEKKDELDSLITAITTNGAHPSKCVTIQRTLDGRLQVAGRKGFPHVIYARLWRWPDLHKNELKHVKYCQYAFDLKCDSVCVNPYHYERVVSPGIDLSGLTLQSNAPSSMMVKDEYVHDFEGQPSLSTEGHSIQTIQHPPSNRASTETYSTPALLAPSESNATSTANFPNIPVASTSQPASILGGSHSEGLLQIASGPQPGQQQNGFTGQPATYHHNSTTTWTGSRTAPYTPNLPHHQNGHLQHHPPMPPHPGHYWPVHNELAFQPPISNHPAPEYWCSIAYFEMDVQVGETFKVPSSCPIVTVDGYVDPSGGDRFCLGQLSNVHRTEAIERARLHIGKGVQLECKGEGDVWVRCLSDHAVFVQSYYLDREAGRAPGDAVHKIYPSAYIK

SEQ ID NO: 63752 - protein, 80 aa, Homo sapiens
MTSMASLFSFTSPAVKRLLGWKQGDEEEKWAEKAVDALVKKLKKKKGAMEELEKALSSPGQPSKCVTIPRSLDGRLQVSH

SEQ ID NO: 63753 - protein, 128 aa, Homo sapiens
MTSMASLFSFTSPAVKRLLGWKQGDEEEKWAEKAVDALVKKLKKKKGAMEELEKALSSPGQPSKCVTIPRSLDGRLQVSHRKGLPHVIYCRVWRWPDLQSHHELKPLDICEFPFGSKQKEVCINPYHY

SEQ ID NO: 63754 - skipped

SEQ ID NO: 63755 - protein, 134 aa, Homo sapiens
MTSMASLFSFTSPAVKRLLGWKQGDEEEKWAEKAVDALVKKLKKKKGAMEELEKALSSPGQPSKCVTIPRSLDGRLQVSHRKGLPHVIYCRVWRWPDLQSHHELKPLDICEFPFGSKQKEVCINPYHYKRVESP

SEQ ID NO: 63756 - skipped

SEQ ID NO: 63757 - protein, 464 aa, Homo sapiens
MTSMASLFSFTSPAVKRLLGWKQGDEEEKWAEKAVDALVKKLKKKKGAMEELEKALSSPGQPSKCVTIPRSLDGRLQVSHRKGLPHVIYCRVWRWPDLQSHHELKPLDICEFPFGSKQKEVCINPYHYKRVESPVLPPVLVPRHNEFNPQHSLLVQFRNLSHNEPHMPQNATFPDSFHQPNNTPFPLSPNSPYPPSPASSTYPNSPASSGPGSPFQLPADTPPPAYMPPDDQMGQDNSQPMDTSNNMIPQIMPSISSRDVQPVAYEEPKHWCSIVYYELNNRVGEAFHASSTSVLVDGFTDPSNNKSRFCLGLLSNVNRNSTIENTRRHIGKGVHLYYVGGEVYAECLSDSSIFVQSRNCNFHHGFHPTTVCKIPSSCSLKIFNNQEFAQLLAQSVNHGFEAVYELTKMCTIRMSFVKGWGAEYHRQDVTSTPCWIEILHGPLQWLDKVLTQMGSPLNPISSVS

SEQ ID NO: 63758 - protein, 464 aa, Homo sapiens; identical to SEQ ID NO: 63757

SEQ ID NO: 63759 - protein, 496 aa, Homo sapiens
MFRSKRSGLVRRLWRSRVVPDREEGGSGGGGGGDEDGSLGSRAEPAPRAREGGGCGRSEVRPVAPRRPRDAVGQRGAQGAGRRRRAGGPPRPMSEPGAGAGSSLLDVAEPGGPGWLPESDCETVTCCLFSERDAAGAPRDASDPLAGAALEPAGGGRSREARSRLLLLEQELKTVTYSLLKRLKERSLDTLLEAVESRGGVPGGCVLVPRADLRLGGQPAPPQLLLGRLFRWPDLQHAVELKPLCGCHSFAAAADGPTVCCNPYHFSRLCGPESPPPPYSRLSPRDEYKPLDLSDSTLSYTETEATNSLITAPGEFSDASMSPDATKPSHWCSVAYWEHRTRVGRLYAVYDQAVSIFYDLPQGSGFCLGQLNLEQRSESVRRTRSKIGFGILLSKEPDGVWAYNRGEHPIFVNSPTLDAPGGRALVVRKVPPGYSIKVFDFERSGLQHAPEPDAADGPYDPNSVRISFAKGWGPCYSRQFITSCPCWLEILLNNPR

SEQ ID NO: 63760 - protein, 235 aa, Homo sapiens
MSRMGKPIETQKSPPPPYSRLSPRDEYKPLDLSDSTLSYTETEATNSLITAPGEFSDASMSPDATKPSHWCSVAYWEHRTRVGRLYAVYDQAVSIFYDLPQGSGFCLGQLNLEQRSESVRRTRSKIGFGILLSKEPDGVWAYNRGEHPIFVNSPTLDAPGGRALVVRKVPPGYSIKVFDFERSGLQHAPEPDAADGPYDPNSVRISFAKGWGPCYSRQFITSCPCWLEILLNNPR

SEQ ID NO: 63761 - protein, 338 aa, Homo sapiens
MFRSKRSGLVRRLWRSRVVPDREEGGSGGGGGGDEDGSLGSRAEPAPRAREGGGCGRSEVRPVAPRRPRDAVGQRGAQGAGRRRRAGGPPRPMSEPGAGAGSSLLDVAEPGGPGWLPESDCETVTCCLFSERDAAGAPRDASDPLAGAALEPAGGGRSREARSRLLLLEQELKTVTYSLLKRLKERSLDTLLEAVESRGGVPGGCVLVPRADLRLGGQPAPPQLLLGRLFRWPDLQHAVELKPLCGCHSFAAAADGPTVCCNPYHFSRLCGPESPPPPYSRLSPRDEYKPLDLSDSTLSYTETEATNSLITAPGEFSAADAGIGSRGNRGLESSVPCS

SEQ ID NO: 63762 - protein, 430 aa, Homo sapiens
MHSTTPISSLFSFTSPAVKRLLGWKQGDEEEKWAEKAVDSLVKKLKKKKGAMDELERALSCPGQPSKCVTIPRSLDGRLQVSHRKGLPHVIYCRVWRWPDLQSHHELKPLECCEFPFGSKQKEVCINPYHYRRVETPVLPPVLVPRHSEYNPQLSLLAKFRSASLHSEPLMPHNATYPDSFQQPPCSALPPSPSHAFSQSPCTASYPHSPGSPSEPESPYQHSDFRPVCYEEPQHWCSVAYYELNNRVGETFQASSRSVLIDGFTDPSNNRNRFCLGLLSNVNRNSTIENTRRHIGKGVHLYYVGGEVYAECVSDSSIFVQSRNCNYQHGFHPATVCKIPSGCSLKVFNNQLFAQLLAQSVHHGFEVVYELTKMCTIRMSFVKGWGAEYHRQDVTSTPCWIEIHLHGPLQWLDKVLTQMGSPHNPISSVS

SEQ ID NO: 63763 - protein, 467 aa, Homo sapiens
MHSTTPISSLFSFTSPAVKRLLGWKQGDEEEKWAEKAVDSLVKKLKKKKGAMDELERALSCPGQPSKCVTIPRSLDGRLQVSHRKGLPHVIYCRVWRWPDLQSHHELKPLECCEFPFGSKQKEVCINPYHYRRVETPVLPPVLVPRHSEYNPQLSLLAKFRSASLHSEPLMPHNATYPDSFQQPPCSALPPSPSHAFSQSPCTASYPHSPGSPSEPESPYQHSVDTPPLPYHATEASETQSGQPVDATADRHVVLSIPNGDFRPVCYEEPQHWCSVAYYELNNRVGETFQASSRSVLIDGFTDPSNNRNRFCLGLLSNVNRNSTIENTRRHIGKGVHLYYVGGEVYAECVSDSSIFVQSRNCNYQHGFHPATVCKIPSGCSLKVFNNQLFAQLLAQSVHHGFEVVYELTKMCTIRMSFVKGWGAEYHRQDVTSTPCWIEIHLHGPLQWLDKVLTQMGSPHNPISSVS

SEQ ID NO: 63764 - protein, 467 aa, Homo sapiens; identical to SEQ ID NO: 63763

SEQ ID NO: 63765 - protein, 396 aa, Homo sapiens
MKAVKSERERGSRRRHRDGDVVLPAGVVVKQERLSPEVAPPAHRRPDHSGGSPSPPTSEPARSGHRGNRARGVSRSPPKKKNKASGRRSKSPRSKRNRSPHHSTVKVKQEREDHPRRGREDRQHREPSEQEHRRARNSDRDRHRGHSHQRRTSNERPGSGQGQGRDRDTQNLQAQEEEREFYNARRREHRQRNDVGGGGSESQELVPRPGGNNKEKEVPAKEKPSFELSGALLEDTNTFRGVVIKYSEPPEARIPKKRWRLYPFKNDEVLPVMYIHRQSAYLLGRHRRIADIPIDHPSCSKQHAVFQYRLVEYTRADGTVGRRVKPYIIDLGSGNGTFLNNKRIEPQRYYELKEKDVLKFGFSSREYVLLHESSDTSEIDRKDDEDEEEEEEVSDS

SEQ ID NO: 63766 - protein, 380 aa, Homo sapiens
MKAVKSEREGVVVKQERLSPEVAPPAHRRPDHSGGSPSPPTSEPARSGHRGNRARGVSRSPPKKKNKASGRRSKSPRSKRNRSPHHSTVKVKQEREDHPRRGREDRQHREPSEQEHRRARNSDRDRHRGHSHQRRTSNERPGSGQGQGRDRDTQNLQAQEEEREFYNARRREHRQRNDVGGGGSESQELVPRPGGNNKEKEVPAKEKPSFELSGALLEDTNTFRGVVIKYSEPPEARIPKKRWRLYPFKNDEVLPVMYIHRQSAYLLGRHRRIADIPIDHPSCSKQHAVFQYRLVEYTRADGTVGRRVKPYIIDLGSGNGTFLNNKRIEPQRYYELKEKDVLKFGFSSREYVLLHESSDTSEIDRKDDEDEEEEEEVSDS

SEQ ID NO: 63767 - protein, 757 aa, Homo sapiens
MSNPGTRRNGSSIKIRLTVLCAKNLAKKDFFRLPDPFAKIVVDGSGQCHSTDTVKNTLDPKWNQHYDLYVGKTDSITISVWNHKKIHKKQGAGFLGCVRLLSNAISRLKDTGYQRLDLCKLNPSDTDAVRGQIVVSLQTRDRIGTGGSVVDCRGLLENEGTVYEDSGPGRPLSCFMEEPAPYTDSTGAAAGGGNCRFVESPSQDQRLQAQRLRNPDVRGSLQTPQNRPHGHQSPELPEGYEQRTTVQGQVYFLHTQTGVSTWHDPRIPSPSGTIPGGDAAFLYEFLLQGHTSEPRDLNSVNCDELGPLPPGWEVRSTVSGRIYFVDHNNRTTQFTDPRLHHIMNHQCQLKEPSQPLPLPSEGSLEDEELPAQRYERDLVQKLKVLRHELSLQQPQAGHCRIEVSREEIFEESYRQIMKMRPKDLKKRLMVKFRGEEGLDYGGVAREWLYLLCHEMLNPYYGLFQYSTDNIYMLQINPDSSINPDHLSYFHFVGRIMGLAVFHGHYINGGFTVPFYKQLLGKPIQLSDLESVDPELHKSLVWILENDITPVLDHTFCVEHNAFGRILQHELKPNGRNVPVTEENKKEYVRLYVNWRFMRGIEAQFLALQKGFNELIPQHLLKPFDQKELELIIGGLDKIDLNDWKSNTRLKHCVADSNIVRWFWQAVETFDEERRARLLQFVTGSTRVPLQGFKALQGSTGAAGPRLFTIHLIDANTDNLPKAHTCFNRIDIPPYESYEKLYEKLLTAVEETCGFAVE

SEQ ID NO: 63768 - protein, 731 aa, Homo sapiens
MSNPGTRRNGSSIKIRLTVLCAKNLAKKDFFRLPDPFAKIVVDGSGQCHSTDTVKNTLDPKWNQHYDLYVGKTDSITISVWNHKKIHKKQGAGFLGCVRLLSNAISRLKDTGYQRLDLCKLNPSDTDAVRGQIVVSLQTRDRIGTGGSVVDCRGLLENEGTVYEDSGPGRPLSCFMEEPAPYTDSTGAAAGGGNCRFVESPSQDQRLQAQRLRNPDVRGSLQTPQNRPHGHQSPELPEGYEQRTTVQGQVYFLHTQTGVSTWHDPRIPRDLNSVNCDELGPLPPGWEVRSTVSGRIYFVDHNNRTTQFTDPRLHHIMNHQCQLKEPSQPLPLPSEGSLEDEELPAQRYERDLVQKLKVLRHELSLQQPQAGHCRIEVSREEIFEESYRQIMKMRPKDLKKRLMVKFRGEEGLDYGGVAREWLYLLCHEMLNPYYGLFQYSTDNIYMLQINPDSSINPDHLSYFHFVGRIMGLAVFHGHYINGGFTVPFYKQLLGKPIQLSDLESVDPELHKSLVWILENDITPVLDHTFCVEHNAFGRILQHELKPNGRNVPVTEENKKEYVRLYVNWRFMRGIEAQFLALQKGFNELIPQHLLKPFDQKELELIIGGLDKIDLNDWKSNTRLKHCVADSNIVRWFWQAVETFDEERRARLLQFVTGSTRVPLQGFKALQGSTGAAGPRLFTIHLIDANTDNLPKAHTCFNRIDIPPYESYEKLYEKLLTAVEETCGFAVE

SEQ ID NO: 63769 - protein, 440 aa, Homo sapiens
MATRSCREKAQKLNEQHQLILSKLLREEDNKYCADCEAKGPRWASWNIGVFICIRCAGIHRNLGVHISRVKSVNLDQWTAEQIQCMQDMGNTKARLLYEANLPENFRRPQTDQAVEFFIRDKYEKKKYYDKNAIAITNKEKEKKKEEKKREKEPEKPAKPLTAEKLQKKDQQLEPKKSTSPKKAAEPTVDLLGLDGPAVAPVTNGNTTVPPLNDDLDIFGPMISNPLPATVMPPAQGTPSAPAAATLSTVTSGDLDLFTEQTTKSEEVAKKQLSKDSILSLYGTGTIQQQSTPGVFMGPTNIPFTSQAPAAFQGFPSMGVPVPAAPGLIGNVMGQSPSMMVGMPMPNGFMGNAQTGVMPLPQNVVGPQGGMVGQMGAPQSKFGLPQAQQPQWSLSQMNQQMAGMSISSATPTAGFGQPSSTTAGWSGSSSGQTLSTQLWK

SEQ ID NO: 63770 - protein, 162 aa, Homo sapiens
MGNTKARLLYEANLPENFRRPQTDQAVEFFIRDKYEKKKYYDKNAIAITNISSSDAPLQPLVSSPSLQAAVDKNKLEKEKEKKKEEKKREKEPEKPAKPLTAEKLQKKDQQLEPKKSTSPKKAAEPTVDLLGLVWRKIEKEKSERQLVEVEELTFMYCFPKN

SEQ ID NO: 63771 - protein, 436 aa, Homo sapiens
MATRSCREKAQKLNEQHQLILSKLLREEDNKYCADCEAKGPRWASWNIGVFICIRCAGIHRNLGVHISRVKSVNLDQWTAEQIQCMQDMGNTKARLLYEANLPENFRRPQTDQAVEFFIRDKYEKKKYYDKNAIAITNKEKEKKKEEKKREKEPEKPAKPLTAEKLQKKDQQLEPKKSTSPKKAAEPTVDLLGLDGPAVAPVTNGNTTVPPLNDDLDIFGPMISNPLPATVMPPAQGTPSAPAAATLSTVTSGDLDLFTEQTTKSEEVAKKQLSKDSILSLYGTGTIQQQSTPGVFMGPTNIPFTSQAPAAFQGFPSMGVPVPAAPGLIGNVMGQSPSMMVGMPMPNGFMGNAQTGVMPLPQNVVGPQGGMVGQMGAPQSKFGLPQAQQPQWSLSQIMQKGDAVLQHSISAIYWPMTRWLKCPLVDESADGWHEYQ

SEQ ID NO: 63772 - protein, 467 aa, Homo sapiens
MATRSCREKAQKLNEQHQLILSKLLREEDNKYCADCEAKGPRWASWNIGVFICIRCAGIHRNLGVHISRVKSVNLDQWTAEQIQCMQDMGNTKARLLYEANLPENFRRPQTDQAVEFFIRDKYEKKKYYDKNAIAITNISSSDAPLQPLVSSPSLQAAVDKNKLEKEKEKKKEEKKREKEPEKPAKPLTAEKLQKKDQQLEPKKSTSPKKAAEPTVDLLGLDGPAVAPVTNGNTTVPPLNDDLDIFGPMISNPLPATVMPPAQGTPSAPAAATLSTVTSGDLDLFTEQTTKSEEVAKKQLSKDSILSLYGTGTIQQQSTPGVFMGPTNIPFTSQAPAAFQGFPSMGVPVPAAPGLIGNVMGQSPSMMVGMPMPNGFMGNAQTGVMPLPQNVVGPQGGMVGQMGAPQSKFGLPQAQQPQWSLSQMNQQMAGMSISSATPTAGFGQPSSTTAGWSGSSSGQTLSTQLWK

SEQ ID NO: 63773 - protein, 137 aa, Homo sapiens
MATRSCREKAQKLNEQHQLILSKLLREEDNKYCADCEAKGPRWASWNIGVFICIRCAGIHRNLGVHISRVKSVNLDQWTAEQIQCMQDMGNTKARLLYEANLPENFRRPQTDHEDIILETTAVITLLLNKCLPYAKP

SEQ ID NO: 63774 - protein, 125 aa, Homo sapiens
  VARIANT 1: note = MOD_RES - Any amino acid
XKYYDKNAIAITNISSSDAPLQPLVSSPSLQAAVDKNKLEKEKEKKKEEKKREKEPEKPAKPLTAEKLQKKDQQLEPKKSTSPKKAAEPTVDLLGLVWRKIEKEKSERQLVEVEELTFMYCFPKN

SEQ ID NO: 63775 - protein, 62 aa, Homo sapiens
MLFLKLSVFRAVEFFIRDKYEKKKYYDKNAIAITNISSSDAPLQPLVSSPSLQAAVDKNKLE

SEQ ID NO: 63776 - protein, 399 aa, Homo sapiens
MIFKGPRWASWNIGVFICIRCAGIHRNLGVHISRVKSVNLDQWTQEQIQCMQEMGNGKANRLYEAYLPETFRRPQIDPAVEGFIRDKYEKKKYMDRSLDINAFRKEKDDKWKRGSEPVPEKKLEPVVFEKVKMPQKKEDPQLPRKSSPKSTAPVMDLLGLDAPVACSIANSKTSNTLEKDLDLLASVPSPSSSGSRKVVGSMPTAGSAGSVPENLNLFPEPGSKSEEIGKKQLSKDSILSLYGSQTPQMPTQAMFMAPAQMAYPTAYPSFPGVTPPNSIMGSMMPPPVGMVAQPGASGMVAPMAMPAGYMGGMQASMMGVPNGMMTTQQAGYMAGMAAMPQTVYGVQPAQQLQWNLTQMTQQMAGMNFYGANGMMNYGQSMSGGNGQAANQTLSPQMWK

SEQ ID NO: 63777 - protein, 429 aa, Homo sapiens
MTGKSVKDVDRYQAVLANLLLEEDNKFCADCQSKGPRWASWNIGVFICIRCAGIHRNLGVHISRVKSVNLDQWTQEQIQCMQEMGNGKANRLYEAYLPETFRRPQIDPAVEGFIRDKYEKKKYMDRSLDINAFRKEKDDKWKRGSEPVPEKKLEPVVFEKVKMPQKKEDPQLPRKSSPKSTAPVMDLLGLDAPVACSIANSKTSNTLEKDLDLLASVPSPSSSGSRKVVGSMPTAGSAGSVPENLNLFPEPGSKSEEIGKKQLSKDSILSLYGSQTPQMPTQAMFMAPAQMAYPTAYPSFPGVTPPNSIMGSMMPPPVGMVAQPGASGMVAPMAMPAGYMGGMQASMMGVPNGMMTTQQAGYMAGMAAMPQTVYGVQPAQQLQWNLTQMTQQMAGMNFYGANGMMNYGQSMSGGNGQAANQTLSPQMWK

SEQ ID NO: 63778 - protein, 227 aa, Homo sapiens
MTGKSVKDVDRYQAVLANLLLEEDNKFCADCQSKGPRWASWNIGVFICIRCAGIHRNLGVHISRVKSVNLDQWTQEQIQCMQEMGNGKANRLYEAYLPETFRRPQIDPAVEGFIRDKYEKKKYMDRSLDINAFRKEKDDKWKRGSEPVPEKKLEPVVFEKVKMPQKKEDPQLPRKSSPKSTAPVMDLLGLDAPVACSIANSKTSNTLEKDLDLLASVPSPSSSGSRK

SEQ ID NO: 63779 - protein, 349 aa, Homo sapiens
MQEMGNGKANRLYEAYLPETFRRPQIDPAVEGFIRDKYEKKKYMDRSLDINAFRKEKDDKWKRGSEPVPEKKLEPVVFEKVKMPQKKEDPQLPRKSSPKSTAPVMDLLGLDAPVACSIANSKTSNTLEKDLDLLASVPSPSSSGSRKVVGSMPTAGSAGSVPENLNLFPEPGSKSEEIGKKQLSKDSILSLYGSQTPQMPTQAMFMAPAQMAYPTAYPSFPGVTPPNSIMGSMMPPPVGMVAQPGASGMVAPMAMPAGYMGGMQASMMGVPNGMMTTQQAGYMAGMAAMPQTVYGVQPAQQLQWNLTQMTQQMAGMNFYGANGMMNYGQSMSGGNGQAANQTLSPQMWK

SEQ ID NO: 63780 - protein, 62 aa, Homo sapiens
MARGNQRELARQKNMKKTQEISKGKRKEDSLTASQRKQRDSEIMQEKQKAANEKKSMQTREK

SEQ ID NO: 63781 - protein, 110 aa, Homo sapiens
MARGNQRELARQKNMKKTQEISKGKRKEDSLTASQRKQSSGGQKSESKMSAGPHLPLKAPRENPCFPLPAAGGSRYYLAYGSITPISAFVFVVFFSVFFPSFYEDFCCWI

SEQ ID NO: 63782 - protein, 48 aa, Homo sapiens
MKKTQEISKGKRKEDSLTASQRKQRDSEIMQEKQKAANEKKSMQTREK

SEQ ID NO: 63783 - protein, 20 aa, Homo sapiens
MKKTQEISKGKRKEDSLTAS

SEQ ID NO: 63784 - protein, 96 aa, Homo sapiens
MKKTQEISKGKRKEDSLTASQRKQSSGGQKSESKMSAGPHLPLKAPRENPCFPLPAAGGSRYYLAYGSITPISAFVFVVFFSVFFPSFYEDFCCWI

SEQ ID NO: 63785 - protein, 89 aa, Homo sapiens
MKKTQEISKGKRKEDSLTASQRKQSSGGQKSESKMSAGPHLPLKAPRENPCFPLPAAGGSRYYLAYGSITPISAFVFVVFFSVFFPSFY

SEQ ID NO: 63786 - protein, 1051 aa, Homo sapiens
MGSAEDAVKEKLLWNVKKEVKQIMEEAVTRKFVHEDSSHIIALCGAVEACLLHQLRRRAAGFLRSDKMAALFTKVGKTCPVAGEICHKVQELQQQAEGRKPSGVSQEALRRQGSASGKAPALSPQALKHVWVRTALIEKVLDKVVQYLAENCSKYYEKEALLADPVFGPILASLLVGPCALEYTKLKTADHYWTDPSADELVQRHRIRGPPTRQDSPAKRPALGIRKRHSSGSASEDRLAACARECVESLHQNSRTRLLYGKNHVLVQPKEDMEAVPGYLSLHQSAESLTLKWTPNQLMNGTLGDSELEKSVYWDYALVVPFSQVVCIHCHQQKSGGTLVLVSQDGIQRPPLHFPQGGHLLSFLSCLENGLLPRGQLEPPLWTQQGKGKVFPKLRKRSSIRSVDMEEMGTGRATDYVFRIIYPGHRHEHITINYHHLAASRAASVDDDEEEEDKLHAMLSMICSRNLTAPNPMKDAGDMIEMQGFGPSLPAWHLEPLCSQGSSCLSCSSSSSPHATPSHCSCIPDRLPLRLLCESMKRQIVSRAFYGWLAHCRHLSTVRTHLSALVHHSVIPPDRPPGASAGLTKDVWSKYQKDKKNYKELELLRQVYYGGIEHEIRKDVWPFLLGHYKFGMSKKEMEQVDAVVAARYQQVLAEWKACEVVVRQREREAHPATRTKFSSGSSIDSHVQRLIHRDSTISNDVFISVDDLEPPEPQDPEDSRPKPEQEAGPGTPGTAVVEQQHSVEFDSPDSGLPSSRNYSVASGIQSSLDEGQSVGFEEEDGGGEEGSSGPGPAAHTLREPQDPSQEKPQAGELEAGEELAAVCAAAYTIELLDTVALNLHRIDKDVQRCDRNYWYFTPPNLERLRDVMCSYVWEHLDVGYVQGMCDLLAPLLVTLDNDQLAYSCFSHLMKRMSQNFPNGGAMDTHFANMRSLIQILDSELFELMHQNGDYTHFYFCYRWFLLDFKRELLYEDVFAVWEVIWAARHISSEHFVLFIALALVEAYREIIRDNNMDFTDIIKFFNERAEHHDAQEILRIARDLVHKVQMLIENK

SEQ ID NO: 63787 - protein, 1006 aa, Homo sapiens
MGSAEDAVKEKLLWNVKKEVKQIMEEAVTRKFVHEDSSHIIALCGAVEACLLHQLRRRAAGFLRSDKMAALFTKVGKTCPVAGEICHKVQELQQQAEGRKPSGVSQEALRRQGSASGKAPALSPQALKHVWVRTALIEKVLDKVVQYLAENCSKYYEKEALLADPVFGPILASLLVGPCALEYTKLKTADHYWTDPSADELVQRHRIRGPPTRQDSPAKRPALGIRKRHSSGSASEDRLAACARECVESLHQNSRTRLLYGKNHVLVQPKEDMEAVPGYLSLHQSAESLTLKWTPNQLMNGTLGDSELEKSVYWDYALVVPFSQVVCIHCHQQKSGGTLVLVSQDGIQRPPLHFPQGGHLLSFLSCLENGLLPRGQLEPPLWTQQGKGKVFPKLRKRSSIRSVDMEEMGTGRATDYVFRIIYPGHRHEHNAGDMIEMQGFGPSLPAWHLEPLCSQGSSCLSCSSSSSPHATPSHCSCIPDRLPLRLLCESMKRQIVSRAFYGWLAHCRHLSTVRTHLSALVHHSVIPPDRPPGASAGLTKDVWSKYQKDKKNYKELELLRQVYYGGIEHEIRKDVWPFLLGHYKFGMSKKEMEQVDAVVAARYQQVLAEWKACEVVVRQREREAHPATRTKFSSGSSIDSHVQRLIHRDSTISNDVFISVDDLEPPEPQDPEDSRPKPEQEAGPGTPGTAVVEQQHSVEFDSPDSGLPSSRNYSVASGIQSSLDEGQSVGFEEEDGGGEEGSSGPGPAAHTLREPQDPSQEKPQAGELEAGEELAAVCAAAYTIELLDTVALNLHRIDKDVQRCDRNYWYFTPPNLERLRDVMCSYVWEHLDVGYVQGMCDLLAPLLVTLDNDQLAYSCFSHLMKRMSQNFPNGGAMDTHFANMRSLIQILDSELFELMHQNGDYTHFYFCYRWFLLDFKRELLYEDVFAVWEVIWAARHISSEHFVLFIALALVEAYREIIRDNNMDFTDIIKFFNERAEHHDAQEILRIARDLVHKVQMLIENK

SEQ ID NO: 63788 - protein, 313 aa, Homo sapiens
MDNKKRLAYAIIQFLHDQLRHGGLSSDAQESLEVAIQCLETAFGVTVEDSDLALPQTLPEIFEAAATGKEMPQDLRSPARTPPSEEDSAEAERLKTEGNEQMKVENFEAAVHFYGKAIELNPANAVYFCNRAAAYSKLGNYAGAVQDCERAICIDPAYSKAYGRMGLALSSLNKHVEAVAYYKKALELDPDNETYKSNLKIAELKLREAPSPTGGVGSFDIAGLLNNPGFMSMASNLMNNPQIQQLMSGMISGGNNPLGTPGTSPSQNDLASLIQAGQQFAQQMQQQNPELIEQLRSQIRSRTPSASNDDQQE

SEQ ID NO: 63789 - protein, 88 aa, Homo sapiens
MNMSKQPVSNVRAIQANINIPMGAFRPGAGQPPRRKECTPEVEEGVPPTSDEEKKPIPGAKKLPGPAVNLSEIQNIKSELKYVPKAEQ

SEQ ID NO: 63790 - protein, 2136 aa, Homo sapiens
MADVTARSLQYEYKANSNLVLQADRSLIDRTRRDEPTGEVLSLVGKLEGTRMGDKAQRTKPQMQEERRAKRRKRDEDRHDINKMKGYTLLSEGIDEMVGIIYKPKTKETRETYEVLLSFIQAALGDQPRDILCGAADEVLAVLKNEKLRDKERRKEIDLLLGQTDDTRYHVLVNLGKKITDYGGDKEIQNMDDNIDETYGVNVQFESDEEEGDEDVYGEVREEASDDDMEGDEAVVRCTLSANLVASGELMSSKKKDLHPRDIDAFWLQRQLSRFYDDAIVSQKKADEVLEILKTASDDRECENQLVLLLGFNTFDFIKVLRQHRMMILYCTLLASAQSEAEKERIMGKMEADPELSKFLYQLHETEKEDLIREERSRRERVRQSRMDTDLETMDLDQGGEALAPRQVLDLEDLVFTQGSHFMANKRCQLPDGSFRRQRKGYEEVHVPALKPKPFGSEEQLLPVEKLPKYAQAGFEGFKTLNRIQSKLYRAALETDENLLLCAPTGAGKTNVALMCMLREIGKHINMDGTINVDDFKIIYIAPMRSLVQEMVGSFGKRLATYGITVAELTGDHQLCKEEISATQIIVCTPEKWDIITRKGGERTYTQLVRLIILDEIHLLHDDRGPVLEALVARAIRNIEMTQEDVRLIGLSATLPNYEDVATFLRVDPAKGLFYFDNSFRPVPLEQTYVGITEKKAIKRFQIMNEIVYEKIMEHAGKNQVLVFVHSRKETGKTARAIRDMCLEKDTLGLFLREGSASTEVLRTEAEQCKNLELKDLLPYGFAIHHAGMTRVDRTLVEDLFADKHIQVLVSTATLAWGVNLPAHTVIIKGTQVYSPEKGRWTELGALDILQMLGRAGRPQYDTKGEGILITSHGELQYYLSLLNQQLPIESQMVSKLPDMLNAEIVLGNVQNAKDAVNWLGYAYLYIRMLRSPTLYGISHDDLKGDPLLDQRRLDLVHTAALMLDKNNLVKYDKKTGNFQVTELGRIASHYYITNDTVQTYNQLLKPTLSEIELFRVFSLSSEFKNITVREEEKLELQKLLERVPIPVKESIEEPSAKINVLLQAFISQLKLEGFALMADMVYVTQSAGRLMRAIFEIVLNRGWAQLTDKTLNLCKMIDKRMWQSMCPLRQFRKLPEEVVKKIEKKNFPFERLYDLNHNEIGELIRMPKMGKTIHKYVHLFPKLELSVHLQPITRSTLKVELTITPDFQWDEKVHGSSEAFWILVEDVDSEVILHHEYFLLKAKYAQDEHLITFFVPVFEPLPPQYFIRVVSDRWLSCETQLPVSFRHLILPEKYPPPTELLDLQPLPVSALRNSAFESLYQDKFPFFNPIQTQVFNTVYNSDDNVFVGAPTGSGKTICAEFAILRMLLQSSEGRCVYITPMEALAEQVYMDWYEKFQDRLNKKVVLLTGETSTDLKLLGKGNIIISTPEKWDILSRRWKQRKNVQNINLFVVDEVHLIGGENGPVLEVICSRMRYISSQIERPIRIVALSSSLSNAKDVAHWLGCSATSTFNFHPNVRPVPLELHIQGFNISHTQTRLLSMAKPVYHAITKHSPKKPVIVFVPSRKQTRLTAIDILTTCAADIQRQRFLHCTEKDLIPYLEKLSDSTLKETLLNGVGYLHEGLSPMERRLVEQLFSSGAIQVVVASRSLCWGMNVAAHLVIIMDTQYYNGKIHAYVDYPIYDVLQMVGHANRPLQDDEGRCVIMCQGSKKDFFKKFLYEPLPVESHLDHCMHDHFNAEIVTKTIENKQDAVDYLTWTFLYRRMTQNPNYYNLQGISHRHLSDHLSELVEQTLSDLEQSKCISIEDEMDVAPLNLGMIAAYYYINYTTIELFSMSLNAKTKVRGLIEIISNAAEYENIPIRHHEDNLLRQLAQKVPHKLNNPKFNDPHVKTNLLLQAHLSRMQLSAELQSDTEEILSKAIRLIQACVDVLSSNGWLSPALAAMELAQMVTQAMWSKDSYLKQLPHFTSEHIKRCTDKGVESVFDIMEMEDEERNALLQLTDSQIADVARFCNRYPNIELSYEVVDKDSIRSGGPVVVLVQLEREEEVTGPVIAPLFPQKREEGWWVVIGDAKSNSLISIKRLTLQQKAKVKLDFVAPATGAHNYTLYFMSDAYMGCDQEYKFSVDVKEAETDSDSD

SEQ ID NO: 63791 - protein, 625 aa, Homo sapiens
MADVTARSLQYEYKANSNLVLQADRSLIDRTRRDEPTGEVLSLVGKLEGTRMGDKAQRTKPQMQEERRAKRRKRDEDRHDINKMKGYTLLSEGIDEMVGIIYKPKTKETRETYEVLLSFIQAALGDQPRDILCGAADEVLAVLKNEKLRDKERRKEIDLLLGQTDDTRYHVLVNLGKKITDYGGDKEIQNMDDNIDETYGVNVQFESDEEEGDEDVYGEVREEASDDDMEGDEAVVRCTLSANLVASGELMSSKKKDLHPRDIDAFWLQRQLSRFYDDAIVSQKKADEVLEILKTASDDRECENQLVLLLGFNTFDFIKVLRQHRMMILYCTLLASAQSEAEKERIMGKMEADPELSKFLYQLHETEKEDLIREERSRRERVRQSRMDTDLETMDLDQGGEALAPRQVLDLEDLVFTQGSHFMANKRCQLPDGSFRRQRKGYEEVHVPALKPKPFGSEEQLLPVEKLPKYAQAGFEGFKTLNRIQSKLYRAALETDENLLLCAPTGAGKTNVALMCMLREIGKHINMDGTINVDDFKIIYIAPMRSLVQEMVGSFGKRDAKSNSLISIKRLTLQQKAKVKLDFVAPATGAHNYTLYFMSDAYMGCDQEYKFSVDVKEAETDSDSD

SEQ ID NO: 63792 - protein, 595 aa, Homo sapiens
MRYISSQIERPIRIVALSSSLSNAKDVAHWLGCSATSTFNFHPNVRPVPLELHIQGFNISHTQTRLLSMAKPVYHAITKHSPKKPVIVFVPSRKQTRLTAIDILTTCAADIQRQRFLHCTEKDLIPYLEKLSDSTLKETLLNGVGYLHEGLSPMERRLVEQLFSSGAIQVVVASRSLCWGMNVAAHLVIIMDTQYYNGKIHAYVDYPIYDVLQMVGHANRPLQDDEGRCVIMCQGSKKDFFKKFLYEPLPVESHLDHCMHDHFNAEIVTKTIENKQDAVDYLTWTFLYRRMTQNPNYYNLQGISHRHLSDHLSELVEQTLSDLEQSKCISIEDEMDVAPLNLGMIAAYYYINYTTIELFSMSLNAKTKVRGLIEIISNAAEYENIPIRHHEDNLLRQLAQKVPHKLNNPKFNDPHVKTNLLLQAHLSRMQLSAELQSDTEEILSKAIRLIQACVDVLSSNGWLSPALAAMELAQMVTQAMWSKDSYLKQLPHFTSEHIKRCTDKGVESVFDIMEMEDEERNALLQLTDSQIADVARFCNRYPNIELSYEVVDKDSIRSGGPVVVLVQLEREEEVTGPVIAPLFPQFRAGRSGSRL

SEQ ID NO: 63793 - protein, 595 aa, Homo sapiens
MAKPVYHAITKHSPKKPVIVFVPSRKQTRLTAIDILTTCAADIQRQRFLHCTEKDLIPYLEKLSDSTLKETLLNGVGYLHEGLSPMERRLVEQLFSSGAIQVVVASRSLCWGMNVAAHLVIIMDTQYYNGKIHAYVDYPIYDVLQMVGHANRPLQDDEGRCVIMCQGSKKDFFKKFLYEPLPVESHLDHCMHDHFNAEIVTKTIENKQDAVDYLTWTFLYRRMTQNPNYYNLQGISHRHLSDHLSELVEQTLSDLEQSKCISIEDEMDVAPLNLGMIAAYYYINYTTIELFSMSLNAKTKVRGLIEIISNAAEYENIPIRHHEDNLLRQLAQKVPHKLNNPKFNDPHVKTNLLLQAHLSRMQLSAELQSDTEEILSKAIRLIQACVDVLSSNGWLSPALAAMELAQMVTQAMWSKDSYLKQLPHFTSEHIKRCTDKGVESVFDIMEMEDEERNALLQLTDSQIADVARFCNRYPNIELSYEVVDKDSIRSGGPVVVLVQLEREEEVTGPVIAPLFPQKREEGWWVVIGDAKSNSLISIKRLTLQQKAKVKLDFVAPATGAHNYTLYFMSDAYMGCDQEYKFSVDVKEAETDSDSD

SEQ ID NO: 63794 - protein, 774 aa, Homo sapiens
MMILYCTLLASAQSEAEKERIMGKMEADPELSKFLYQLHETEKEDLIREERSRRERVRQSRMDTDLETMDLDQGGEALAPRQVLDLEDLVFTQGSHFMANKRCQLPDGSFRRQRKGYEEVHVPALKPKPFGSEEQLLPVEKLPKYAQAGFEGFKTLNRIQSKLYRAALETDENLLLCAPTGAGKTNVALMCMLREIGKHINMDGTINVDDFKIIYIAPMRSLVQEMVGSFGKRLATYGITVAELTGDHQLCKEEISATQIIVCTPEKWDIITRKGGERTYTQLVRLIILDEIHLLHDDRGPVLEALVARAIRNIEMTQEDVRLIGLSATLPNYEDVATFLRVDPAKGLFYFDNSFRPVPLEQTYVGITEKKAIKRFQIMNEIVYEKIMEHAGKNQVLVFVHSRKETGKTARAIRDMCLEKDTLGLFLREGSASTEVLRTEAEQCKNLELKDLLPYGFAIHHAGMTRVDRTLVEDLFADKHIQVLVSTATLAWGVNLPAHTVIIKGTQVYSPEKGRWTELGALDILQMLGRAGRPQYDTKGEGILITSHGELQYYLSLLNQQLPIESQMVSKLPDMLNAEIVLGNVQNAKDAVNWLGYAYLYIRMLRSPTLYGISHDDLKGDPLLDQRRLDLVHTAALMLDKNNLVKYDKKTGNFQVTELGRIASHYYITNDTVQTYNQLLKPTLSEIELFRVFSLSSEFKNITVREEEKLELQKLLERVPIPVKESIEEPSAKINVLLQAFISQLKLEGFALMADMVYVTQSAGRLMRAILKLS

SEQ ID NO: 63795 - protein, 719 aa, Homo sapiens
MLLQSSEGRCVYITPMEALAEQVYMDWYEKFQDRLNKKVVLLTGENGPVLEVICSRMRYISSQIERPIRIVALSSSLSNAKDVAHWLGCSATSTFNFHPNVRPVPLELHIQGFNISHTQTRLLSMAKPVYHAITKHSPKKPVIVFVPSRKQTRLTAIDILTTCAADIQRQRFLHCTEKDLIPYLEKLSDSTLKETLLNGVGYLHEGLSPMERRLVEQLFSSGAIQVVVASRSLCWGMNVAAHLVIIMDTQYYNGKIHAYVDYPIYDVLQMVGHANRPLQDDEGRCVIMCQGSKKDFFKKFLYEPLPVESHLDHCMHDHFNAEIVTKTIENKQDAVDYLTWTFLYRRMTQNPNYYNLQGISHRHLSDHLSELVEQTLSDLEQSKCISIEDEMDVAPLNLGMIAAYYYINYTTIELFSMSLNAKTKVRGLIEIISNAAEYENIPIRHHEDNLLRQLAQKVPHKLNNPKFNDPHVKTNLLLQAHLSRMQLSAELQSDTEEILSKAIRLIQACVDVLSSNGWLSPALAAMELAQMVTQAMWSKDSYLKQLPHFTSEHIKRCTDKGVESVFDIMEMEDEERNALLQLTDSQIADVARFCNRYPNIELSYEVVDKDSIRSGGPVVVLVQLEREEEVTGPVIAPLFPQKREEGWWVVIGDAKSNSLISIKRLTLQQKAKVKLDFVAPATGAHNYTLYFMSDAYMGCDQEYKFSVDVKEAETDSDSD

SEQ ID NO: 63796 - protein, 357 aa, Homo sapiens
MIEQQKRKGPELPLVPVKRQRHELLLGAGSGPGAGQQQATPGALLQAGPPRCSSLQAPIMLLSGHEGEVYCCKFHPNGSTLASAGFDRLILLWNVYGDCDNYATLKGHSGAVMELHYNTDGSMLFSASTDKTVAVWDSETGERVKRLKGHTSFVNSCYPARRGPQLVCTGSDDGTVKLWDIRKKAAIQTFQNTYQVLAVTFNDTSDQIISGGIDNDIKVWDLRQNKLTYTMRGHADSVTGLSLSSEGSYLLSNAMDNTVRVWDVRPFAPKERCVKIFQGNVHNFEKNLLRCSWSPDGSKIAAGSADRFVYVWDTTSRRILYKLPGHAGSINEVAFHPDEPIIISASSDKRLYMGEIQ

SEQ ID NO: 63797 - protein, 127 aa, Homo sapiens
MILISAGCPGGLWPIVVLVGLFIWICFAVRVWDVRPFAPKERCVKIFQGNVHNFEKNLLRCSWSPDGSKIAAGSADRFVYVWDTTSRRILYKLPGHAGSINEVAFHPDEPIIISASSDKRLYMGEIQ

SEQ ID NO: 63798 - protein, 409 aa, Homo sapiens
MIEQQKRKGPELPLVPVKRQRHELLLGAGSGPGAGQQQATPGALLQAGPPRCSSLQAPIMLLSGHEGEVYCCKFHPNGSTLASAGFDRLILLWNVYGDCDNYATLKGHSGAVMELHYNTDGSMLFSASTDKTVAVWDSETGERVKRLKGHTSFVNSCYPARRGPQLVCTGSDDGTVKLWDIRKKAAIQTFQNTYQVLAVTFNDTSDQIISGGIDNDIKVWDLRQNKLTYTMRGHADSVTGLSLSSEGSYLLSNAMDNTVRVWDVRPFAPKERCVKIFQGNVHNFEKNLLRCSWSPDGSKIAAGSADRFVYVWDTTSRRILYKLPGHAGSINEVAFHPDEPIIETGFHRIGQGGHELLTSSNPPASASQSAGITGVSHCAQLQTVFMWVSMSVSPLLISGESKSNAPFSS

SEQ ID NO: 63799 - protein, 282 aa, Homo sapiens
MAVPETRPNHTIYINNLNEKIKKDELKKSLYAIFSQFGQILDILVSRSLKMRGQAFVIFKEVSSATNALRSMQGFPFYDKPMRIQYAKTDSDIIAKMKGTFVERDRKREKRKPKSQETPATKKAVQGGGATPVVGAVQGPVPGMPPMTQAPRIMHHMPGQPPYMPPPGMIPPPGLAPGQIPPGAMPPQQLMPGQMPPAQPLSENPPNHILFLTNLPEETNELMLSMLFNQFPGFKEVRLVPGRHDIAFVEFDNEVQAGAARDALQGFKITQNNAMKISFAKK

SEQ ID NO: 63800 - protein, 203 aa, Homo sapiens
MAVPETRPNHTIYIIAKMKGTFVERDRKREKRKPKSQETPATKKAVQGGGATPVVGAVQGPVPGMPPMTQAPRIMHHMPGQPPYMPPPGMIPPPGLAPGQIPPGAMPPQQLMPGQMPPAQPLSENPPNHILFLTNLPEETNELMLSMLFNQFPGFKEVRLVPGRHDIAFVEFDNEVQAGAARDALQGFKITQNNAMKISFAKK

SEQ ID NO: 63801 - protein, 255 aa, Homo sapiens
MVKLTAELIEQAAQYTNAVRDRELDLRGYKIPVIENLGATLDQFDAIDFSDNEIRKLDGFPLLRRLKTLLVNNNRICRIGEGLDQALPCLTELILTNNSLVELGDLDPLASLKSLTYLSILRNPVTNKKHYRLYVIYKVPQVRVLDFQKVKLKERQEAEKMFKGKRGAQLAKDIARRSKTFNPGAGLPTDKKKGGPSPGDVEAIKNAIANASTLAEVERLKGLLQSGQIPGRERRSGPTDDGEEEMEEDTVTNGS

SEQ ID NO: 63802 - protein, 159 aa, Homo sapiens
MPKFYCDYCDTYLTHDSPSVRKTHCSGRKHKENVKDYYQKWMEEQAQSLIDKTTAAFQQGKIPPTPFSAPPPAGAMIPPPPSLPGPPRPGMMPAPHMGGPPMMPMMGPPPPGMMPVGPAPGMRPPMGGHMPMMPGPPMMRPPARPMMVPTRPGMTRPDR

SEQ ID NO: 63803 - protein, 180 aa, Homo sapiens
MNSASVDGHLSGCRLFLFLSPLFRFYCDYCDTYLTHDSPSVRKTHCSGRKHKENVKDYYQKWMEEQAQSLIDKTTAAFQQGKIPPTPFSAPPPAGAMIPPPPSLPGPPRPGMMPAPHMGGPPMMPMMGPPPPGMMPVGPAPGMRPPMGGHMPMMPGPPMMRPPARPMMVPTRPGMTRPDR

SEQ ID NO: 63804 - protein, 118 aa, Homo sapiens
MEEQAQSLIDKTTAAFQQGKIPPTPFSAPPPAGAMIPPPPSLPGPPRPGMMPAPHMGGPPMMPMMGPPPPGMMPVGPAPGMRPPMGGHMPMMPGPPMMRPPARPMMVPTRPGMTRPDR

SEQ ID NO: 63805 - protein, 52 aa, Homo sapiens
MRIEGCIIGFDEYMNLVLDDAEEIHSKTKSRKQLGRIMLKGDNITLLQSVSN

SEQ ID NO: 63806 - protein, 92 aa, Homo sapiens
MAYRGQGQKVQKVMVQPINLIFRYLQNRSRIQVWLYEQVNMRIEGCIIGFDEYMNLVLDDAEEIHSKTKSRKQLGRIMLKGDNITLLQSVSN

SEQ ID NO: 63807 - protein, 240 aa, Homo sapiens [sequence omitted]

SEQ ID NO: 63808 - protein, 240 aa, Homo sapiens [sequence omitted]

SEQ ID NO: 63809 - protein, 240 aa, Homo sapiens [sequence omitted]

SEQ ID NO: 63810 - protein, 240 aa, Homo sapiens [sequence omitted]

SEQ ID NO: 63811 - protein, 244 aa, Homo sapiens
MMDSQTVGKSSKMLQHIDYRMRCILQDGRIFIGTFKAFDKHMNLILCDCDEFRKIKPKNAKQPEREEKRVLGLVLLRGENLVSMTVEGPPPKDTGIARVPLAGAAGGPGVGRAAGRGVPAGVPIPQAPAGLAGPVRGVGGPSQQVMTPQGRGTVAAAAVAATASIAGAPTQYPPGRGTPPPPVGRATPPPGIMAPPPGMRPPMGPPIGLPPARGTPIGMPPPGMRPPPPGIRGPPPPGMRPPRP

SEQ ID NO: 63812 - protein, 1086 aa, Homo sapiens
MATVGEWSCVRCTFLNPAGQRQCSICEAPRHKPDLNHILRLSVEEQKWPCARCTFRNFLGKEACEVCGFTPEPAPGAAFLPVLNGVLPKPPAILGEPKGSCQEEAGPVRTAGLVATEPARGQCEDKDEEEKEEQEEEEGAAEPRGGWACPRCTLHNTPVASSCSVCGGPRRLSLPRIPPEALVVPEVVAPAGFHVVPAAPPPGLPGEGAEANPPATSQGPAAEPEPPRVPPFSPFSSTLQNNPVPRSRREVPPQLQPPVPEAAQPSPSAGCRGAPQGSGWAGASRLAELLSGKRLSVLEEEATEGGTSRVEAGSSTSGSDIIDLAGDTVRYTPASPSSPDFTTWSCAKCTLRNPTVAPRCSACGCSKLHGFQEHGEPPTHCPDCGADKPSPCGRSCGRVSSAQKAARVLPERPGQWACPACTLLNALRAKHCAACHTPQLLVAQRRGAAPLRRRESMHVEQRRQTDEGEAKALWENIVAFCRENNVSFVDDSFPPGPESVGFPAGDSVQQRVRQWLRPQEINCSVFRDHRATWSVFHTLRPSDILQGLLGNCWFLSALAVLAERPDLVERVMVTRSLCAEGAYQVRLCKDGTWTTVLVDDMLPCDEAGCLLFSQAQRKQLWVALIEKALAKLHGSYFALQAGRAIEGLATLTGAPCESLALQLSSTNPREEPVDTDLIWAKMLSSKEAGFLMGASCGGGNMKVDDSAYESLGLRPRHAYSILDVRDVQGTRLLRLRNPWGRFSWNGSWSDEWPHWPGHLRGELMPHGSSEGVFWMEYGDFVRYFDSVDICKVHSDWQEARVQGCFPSSASAPVGVTALTVLERASLEFALFQEGSRRSDAVDSHLLDLCILVFRATFGSGGHLSLGRLLAHSKRAVKKFVSCDVMLEPGEYAVVCCAFNHWGPPLPGTPAPQASSPSAGVPRASPEPPGHVLAVYSSRLVMVEPVEAQPTTLADAIILLTESRGERHEGREGMTCYYLTHGWAGLIVVVENRHPKAYLHVQCDCTDSFNVVSTRGSLRTQDSVPPLHRQVLVILSQLEGNAGFSITHRLAHRKAAQAFLSDWTASKGTHSPPLTPEVAGLHGPRPL

SEQ ID NO: 63813 - protein, 415 aa, Homo sapiens
MATVGEWSCVRCTFLNPAGQRQCSICEAPRHKPDLNHILRLSVEEQKWPCARCTFRNFLGKEACEVCGFTPEPAPGAAFLPVLNGVLPKPPAILGEPKGSCQEEAGPVRTAGLVATEPARGQCEDKDEEEKEEQEEEEGAAEPRGGWACPRCTLHNTPVASSCSVCGGPRRLSLPRIPPEALVVPEVVAPAGFHVVPAAPPPGLPGEGAEANPPATSQGPAAEPEPPRVPPFSPFSSTLQNNPVPRSRREVPPQLQPPVPEAAQPSPSAGCRGAPQGSGWAGASRLAELLSGKRLSVLEEEATEGGTSRVEAGSSTSGSDIIDLAGDTVRYTPASPSSPDFTTWSCAKCTLRNPSPPSLQPLGRGPESLPRAAGPRAGCVQLEAGHGGARGSPADHAGRRHHPAHREPRRAARGP

SEQ ID NO: 63814 - protein, 89 aa, Homo sapiens
MSSQQQKQPCTPPPQLQQQQVKQPCQPPPQEPCIPKTKEPCHPKVPEPCHPKVPEPCQPKVPEPCHPKVPEPCPSIVTPAPAQQKTKQK

SEQ ID NO: 63815 - protein, 73 aa, Homo sapiens
MSSQQQKQPCTPPPQLQQQQVKQPCQPPPQEPCIPKTKEPCHPKVPEPCHPKVPEPCPSIVTPAPAQQKTKQK

SEQ ID NO: 63816 - protein, 72 aa, Homo sapiens
MSYQQQQCKQPCQPPPVCPTPKCPEPCPPPKCPEPCPPPKCPQPCPPQQCQQKYPPVTPSPPCQSKYPPKSK

SEQ ID NO: 63817 - protein, 72 aa, Homo sapiens
MSYQQQQCKQPCQPPPVCPTPKCPEPCPPPKCPEPCPPPKCPQPCPPQQCQQKYPPVTPSPPCQPKYPPKSK

SEQ ID NO: 63818 - protein, 72 aa, Homo sapiens; identical to SEQ ID NO: 63817

SEQ ID NO: 63819 - protein, 72 aa, Homo sapiens; identical to SEQ ID NO: 63817

SEQ ID NO: 63820 - protein, 169 aa, Homo sapiens
MSSYQQKQTFTPPPQLQQQQVKQPSQPPPQEIFVPTTKEPCHSKVPQPGNTKIPEPGCTKVPEPGCTKVPEPGCTKVPEPGCTKVPEPGCTKVPEPGCTKVPEPGYTKVPEPGSIKVPDQGFIKFPEPGAIKVPEQGYTKVPVPGYTKLPEPCPSTVTPGPAQQKTKQK

SEQ ID NO: 63821 - protein, 169 aa, Homo sapiens; identical to SEQ ID NO: 63820

SEQ ID NO: 63822 - protein, 159 aa, Homo sapiens [sequence omitted]

SEQ ID NO: 63823 - protein, 161 aa, Homo sapiens
MSSYQQKQTFTPPPQLQQQQVKQPSQPPPQEIFVPTTKEPCHSKVPQPGNTKIPEPGCTKVPEPGCTKVPEPGCTKVPEPGCTKVPEPGCTKVPEPGYTKVPEPGSIKVPDQGFIKFPEPGAIKVPEQGYTKVPVPGYTKLPEPCPSTVTPGPAQQKTKQK

SEQ ID NO: 63824 - protein, 3662 aa, Homo sapiens
MSRRAPGSRLSSGGGGGGTKYPRSWNDWQPRTDSASADPDNLKYSSSRDRGGSSSYGLQPSNSAVVSRQRHDDTRVHADIQNDEKGGYSVNGGSGENTYGRKSLGQELRVNNVTSPEFTSVQHGSRALATKDMRKSQERSMSYSDESRLSNLLRRITREDDRDRRLATVKQLKEFIQQPENKLVLVKQLDNILAAVHDVLNESSKLLQELRQEGACCLGLLCASLSYEAEKIFKWIFSKFSSSAKDEVKLLYLCATYKALETVGEKKAFSSVMQLVMTSLQSILENVDTPELLCKCVKCILLVARCYPHIFSTNFRDTVDILVGWHIDHTQKPSLTQQVSGWLQSLEPFWVADLAFSTTLLGQFLEDMEAYAEDLSHVASGESVDEDVPPPSVSLPKLAALLRVFSTVVRSIGERFSPIRGPPITEAYVTDVLYRVMRCVTAANQVFFSEAVLTAANECVGVLLGSLDPSMTIHCDMVITYGLDQLENCQTCGTDYIISVLNLLTLIVEQINTKLPSSFVEKLFIPSSKLLFLRYHKEKEVVAVAHAVYQAVLSLKNIPVLETAYKLILGEMTCALNNLLHSLQLPEACSEIKHEAFKNHVFNVDNAKFVVIFDLSALTTIGNAKNSLIGMWALSPTVFALLSKNLMIVHSDLAVHFPAIQYAVLYTLYSHCTRHDHFISSSLSSSSPSLFDGAVISTVTTATKKHFSIILNLLGILLKKDNLNQDTRKLLMTWALEAAVLMKKSETYAPLFSLPSFHKFCKGLLANTLVEDVNICLQACSSLHALSSSLPDDLLQRCVDVCRVQLVHSGTRIRQAFGKLLKSIPLDVVLSNNNHTEIQEISLALRSHMSKAPSNTFHPQDFSDVISFILYGNSHRTGKDNWLERLFYSCQRLDKRDQSTIPRNLLKTDAVLWQWAIWEAAQFTVLSKLRTPLGRAQDTFQTIEGIIRSLAAHTLNPDQDVSQWTTADNDEGHGNNQLRLVLLLQYLENLEKLMYNAYEGCANALTSPPKVIRTFFYTNRQTCQDWLTRIRLSIMRVGLLAGQPAVTVRHGFDLLTEMKTTSLSQGNELEVTIMMVVEALCELHCPEAIQGIAVWSSSIVGKNLLWINSVAQQAEGRFEKASVEYQEHLCAMTGVDCCISSFDKSVLTLANAGRNSASPKHSLNGESRKTVLSKPTDSSPEVINYLGNKACECYISIADWAAVQEWQNAIHDLKKSTSSTSLNLKADFNYIKSLSSFESGKFVECTEQLELLPGENINLLAGGSKEKIDMKKLLPNMLSPDPRELQKSIEVQLLRSSVCLATALNPIEQDQKWQSITENVVKYLKQTSRIAIGPLRLSTLTVSQSLPVLSTLQLYCSSALENTVSNRLSTEDCLIPLFSEALRSCKQHDVRPWMQALRYTMYQNQLLEKIKEQTVPIRSHLMELGLTAAKFARKRGNVSLATRLLAQCSEVQLGKTTTAQDLVQHFKKLSTQGQVDEKWGPELDIEKTKLLYTAGQSTHAMEMLSSCAISFCKSVKAEYAVAKSILTLAKWIQAEWKEISGQLKQVYRAQHQQNFTGLSTLSKNILTLIELPSVNTMEEEYPRIESESTVHIGVGEPDFILGQLYHLSSVQAPEVAKSWAALASWAYRWGRKVVDNASQGEGVRLLPREKSEVQNLLPDTITEEEKERIYGILGQAVCRPAGIQDEDITLQITESEDNEEDDMVDVIWRQLISSCPWLSELDESATEGVIKVWRKVVDRIFSLYKLSCSAYFTFLKLNAGQIPLDEDDPRLHLSHRVEQSTDDMIVMATLRLLRLLVKHAGELRQYLEHGLETTPTAPWRGIIPQLFSRLNHPEVYVRQSICNLLCRVAQDSPHLILYPAIVGTISLSSESQASGNKFSTAIPTLLGNIQGEELLVSECEGGSPPASQDSNKDEPKSGLNEDQAMMQDCYSKIVDKLSSANPTMVLQVQMLVAELRRVTVLWDELWLGVLLQQHMYVLRRIQQLEDEVKRVQNNNTLRKEEKIAIMREKHTALMKPIVFALEHVRSITAAPAETPHEKWFQDNYGDAIENALEKLKTPLNPAKPGSSWIPFKEIMLSLQQRAQKRASYILRLEEISPWLAAMTNTEIALPGEVSARDTVTIHSVGGTITILPTKTKPKKLLFLGSDGKSYPYLFKGLEDLHLDERIMQFLSIVNTMFATINRQETPRFHARHYSVTPLGTRSGLIQWVDGATPLFGLYKRWQQREAALQAQKAQDSYQTPQNPGIVPRPSELYYSKIGPALKTVGLSLDVSRRDWPLHVMKAVLEELMEATPPNLLAKELWSSCTTPDEWWRVTQSYARSTAVMSMVGYIIGLGDRHLDNVLIDMTTGEVVHIDYNVCFEKGKSLRVPEKVPFRMTQNIETALGVTGVEGVFRLSCEQVLHIMRRGRETLLTLLEAFVYDPLVDWTAGGEAGFAGAVYGGGGQQAESKQSKREMEREITRSLFSSRVAEIKVNWFKNRDEMLVVLPKLDGSLDEYLSLQEQLTDVEKLQGKLLEEIEFLEGAEGVDHPSHTLQHRYSEHTQLQTQQRAVQEAIQVKLNEFEQWITHYQAAFNNLEATQLASLLQEISTQMDLGPPSYVPATAFLQNAGQAHLISQCEQLEGEVGALLQQRRSVLRGCLEQLHHYATVALQYPKAIFQKHRIEQWKTWMEELICNTTVERCQELYRKYEMQYAPQPPPTVCQFITATEMTLQRYAADINSRLIRQVERLKQEAVTVPVCEDQLKEIERCIKVFLHENGEEGSLSLASVIISALCTLTRRNLMMEGAASSAGEQLVDLTSRDGAWFLEELCSMSGNVTCLVQLLKQCHLVPQDLDIPNPMEASETVHLANGVYTSLQELNSNFRQIIFPEALRCLMKGEYTLESMLHELDGLIEQTTDGVPLQTLVESLQAYLRNAAMGLEEETHAHYIDVARLLHAQYGELIQPRNGSVDETPKMSAGQMLLVAFDGMFAQVETAFSLLVEKLNKMEIPIAWRKIDIIREARSTQVNFFDDDNHRQVLEEIFFLKRLQTIKEFFRLCGTFSKTLSGSSSLEDQNTVNGPVQIVNVKTLFRNSCFSEDQMAKPIKAFTADFVRQLLIGLPNQALGLTLCSFISALGVDIIAQVEAKDFGAESKVSVDDLCKKAVEHNIQIGKFSQLVMNRATVLASSYDTAWKKHDLVRRLETSISSCKTSLQRVQLHIAMFQQWQHEDLLINRPQAMSVTPPPRSAILTSMKKKLHTLSQIETSIATVQEKLAALESSIEQRLKWAGGANPALAPVLQDFEATIAERRNLVLKESQRASQVTFLCSNIIHFESLRTRTAEALNLDAALFELIKRCQQMCSFASQFNSSVSELELRLLQRVDTGLEHPIGSSEWLLSAHKQLTQDMSTQRAIQTEKEQQIETVCETIQNLVDNIKTVLTGHNRQLGDVKHLLKAMAKDEEAALADGEDVPYENSVRQFLGEYKSWQDNIQTVLFTLVQAMGQVRSQEHVEMLQEITPTLKELKTQSQSIYNNLVSFASPLVTDATNECSSPTSSATYQPSFAAAVRSNTGQKTQPDVMSQNARKLIQKNLATSADTPPSTVPGTGKSVACSPKKAVRDPKTGKAVQERNSYAVSVWKRVKAKLEGRDVDPNRRMSVAEQVDYVIKEATNLDNLAQLYEGWTAWV

SEQ ID NO: 63825 - protein, 3661 aa, Homo sapiens
MSRRAPGSRLSSGGGGGGTKYPRSWNDWQPRTDSASADPDNLKYSSSRDRGGSSSYGLQPSNSAVVSRQRHDDTRVHADIQNDEKGGYSVNGGSGENTYGRKSLGQELRVNNVTSPEFTSVQHGSRALATKDMRKSQERSMSYSDESRLSNLLRRITREDDRDRRLATVKQLKEFIQQPENKLVLVKQLDNILAAVHDVLNESSKLLQELRQEGACCLGLLCASLSYEAEKIFKWIFSKFSSSAKDEVKLLYLCATYKALETVGEKKAFSSVMQLVMTSLQSILENVDTPELLCKCVKCILLVARCYPHIFSTNFRDTVDILVGWHIDHTQKPSLTQQVSGWLQSLEPFWVADLAFSTTLLGQFLEDMEAYAEDLSHVASGESVDEDVPPPSVSLPKLAALLRVFSTVVRSIGERFSPIRGPPITEAYVTDVLYRVMRCVTAANQVFFSEAVLTAANECVGVLLGSLDPSMTIHCDMVITYGLDQLENCQTCGTDYIISVLNLLTLIVEQINTKLPSSFVEKLFIPSSKLLFLRYHKEKEVVAVAHAVYQAVLSLKNIPVLETAYKLILGEMTCALNNLLHSLQLPEACSEIKHEAFKNHVFNVDNAKFVVIFDLSALTTIGNAKNSLIGMWALSPTVFALLSKNLMIVHSDLAVHFPAIQYAVLYTLYSHCTRHDHFISSSLSSSSPSLFDGAVISTVTTATKKHFSIILNLLGILLKKDNLNQDTRKLLMTWALEAAVLMKKSETYAPLFSLPSFHKFCKGLLANTLVEDVNICLQACSSLHALSSSLPDDLLQRCVDVCRVQLVHSGTRIRQAFGKLLKSIPLDVVLSNNNHTEIQEISLALRSHMSKAPSNTFHPQDFSDVISFILYGNSHRTGKDNWLERLFYSCQRLDKRDQSTIPRNLLKTDAVLWQWAIWEAAQFTVLSKLRTPLGRAQDTFQTIEGIIRSLAAHTLNPDQDVSQWTTADNDEGHGNNQLRLVLLLQYLENLEKLMYNAYEGCANALTSPPKVIRTFFYTNRQTCQDWLTRIRLSIMRVGLLAGQPAVTVRHGFDLLTEMKTTSLSQGNELEVTIMMVVEALCELHCPEAIQGIAVWSSSIVGKNLLWINSVAQQAEGRFEKASVEYQEHLCAMTGVDCCISSFDKSVLTLANAGRNSASPKHSLNGESRKTVLSKPTDSSPEVINYLGNKACECYISIADWAAVQEWQNAIHDLKKSTSSTSLNLKADFNYIKSLSSFESGKFVECTEQLELLPGENINLLAGGSKEKIDMKKLLPNMLSPDPRELQKSIEVQLLRSSVCLATALNPIEQDQKWQSITENVVKYLKQTSRIAIGPLRLSTLTVSQSLPVLSTLQLYCSSALENTVSNRLSTEDCLIPLFSEALRSCKQHDVRPWMQALRYTMYQNQLLEKIKEQTVPIRSHLMELGLTAAKFARKRGNVSLATRLLAQCSEVQLGKTTTAQDLVQHFKKLSTQGQVDEKWGPELDIEKTKLLYTAGQSTHAMEMLSSCAISFCKSVKAEYAVAKSILTLAKWIQAEWKEISGQLKQVYRAQHQQNFTGLSTLSKNILTLIELPSVNTMEEEYPRIESESTVHIGVGEPDFILGQLYHLSSVQAPEVAKSWAALASWAYRWGRKVVDNASQGEGVRLLPREKSEVQNLLPDTITEEEKERIYGILGQAVCRPAGIQDEDITLQITESEDNEEDDMVDVIWRQLISSCPWLSELDESATEGVIKVWRKVVDRIFSLYKLSCSAYFTFLKLNAGQIPLDEDDPRLHLSHRVEQSTDDMIVMATLRLLRLLVKHAGELRQYLEHGLETTPTAPWRGIIPQLFSRLNHPEVYVRQSICNLLCRVAQDSPHLILYPAIVGTISLSSESQASGNKFSTAIPTLLGNIQGEELLVSECEGGSPPASQDSNKDEPKSGLNEDQAMMQDCYSKIVDKLSSANPTMVLQVQMLVAELRRVTVLWDELWLGVLLQQHMYVLRRIQQLEDEVKRVQNNNTLRKEEKIAIMREKHTALMKPIVFALEHVRSITAAPAETPHEKWFQDNYGDAIENALEKLKTPLNPAKPGSSWIPFKEIMLSLQQRAQKRASYILRLEEISPWLAAMTNTEIALPGEVSARDTVTIHSVGGTITILPTKTKPKKLLFLGSDGKSYPYLFKGLEDLHLDERIMQFLSIVNTMFATINRQETPRFHARHYSVTPLGTRSGLIQWVDGATPLFGLYKRWQQREAALQAQKAQDSYQTPQNPGIVPRPSELYYSKIGPALKTVGLSLDVSRRDWPLHVMKAVLEELMEATPPNLLAKELWSSCTTPDEWWRVTQSYARSTAVMSMVGYIIGLGDRHLDNVLIDMTTGEVVHIDYNVCFEKGKSLRVPEKVPFRMTQNIETALGVTGVEGVFRLSCEQVLHIMRRGRETLLTLLEAFVYDPLVDWTAGGEAGFAGAVYGGGGQQAESKQSKREMEREITRSLFSSRVAEIKVNWFKNRDEMLVVLPKLDGSLDEYLSLQEQLTDVEKLQGKLLEEIEFLEGAEGVDHPSHTLQHRYSEHTQLQTQQRAVQEAIQVKLNEFEQWITHYQAAFNNLEATQLASLLQEISTQMDLGPPSYVPATAFLQNAGQAHLISQCEQLEGEVGALLQQRRSVLRGCLEQLHHYATVALQYPKAIFQKHRIEQWKTWMEELICNTTVERCQELYRKYEMQYAPQPPPTVCQFITATEMTLQRYAADINSRLIRQVERLKQEAVTVPVCEDQLKEIERCIKVFLHENGEEGSLSLASVIISALCTLTRRNLMMEGAASSAGEQLVDLTSRDGAWFLEELCSMSGNVTCLVQLLKQCHLVPQDLDIPNPMEASETVHLANGVYTSLQELNSNFRQIIFPEALRCLMKGEYTLESMLHELDGLIEQTTDGVPLQTLVESLQAYLRNAAMGLEEETHAHYIDVARLLHAQYGELIQPRNGSVDETPKMSAGQMLLVAFDGMFAQVETAFSLLVEKLNKMEIPIAWRKIDIIREARSTQVNFFDDDNHRQVLEEIFFLKRLQTIKEFFRLCGTFSKTLSGSSSLEDQNTVNGPVQIVNVKTLFRNSCFSEDQMAKPIKAFTADFVRQLLIGLPNQALGLTLCSFISALGVDIIAQVEAKDFGAESKVSVDDLCKKAVEHNIQIGKFSQLVMNRATVLASSYDTAWKKHDLVRRLETSISSCKTSLQRVQLHIAMFQWQHEDLLINRPQAMSVTPPPRSAILTSMKKKLHTLSQIETSIATVQEKLAALESSIEQRLKWAGGANPALAPVLQDFEATIAERRNLVLKESQRASQVTFLCSNIIHFESLRTRTAEALNLDAALFELIKRCQQMCSFASQFNSSVSELELRLLQRVDTGLEHPIGSSEWLLSAHKQLTQDMSTQRAIQTEKEQQIETVCETIQNLVDNIKTVLTGHNRQLGDVKHLLKAMAKDEEAALADGEDVPYENSVRQFLGEYKSWQDNIQTVLFTLVQAMGQVRSQEHVEMLQEITPTLKELKTQSQSIYNNLVSFASPLVTDATNECSSPTSSATYQPSFAAAVRSNTGQKTQPDVMSQNARKLIQKNLATSADTPPSTVPGTGKSVACSPKKAVRDPKTGKAVQERNSYAVSVWKRVKAKLEGRDVDPNRRMSVAEQVDYVIKEATNLDNLAQLYEGWTAWV

SEQ ID NO: 63826 - protein, 1016 aa, Homo sapiens
MSQGPPTGESSEPEAKVLHTKRLYRAVVEAVHRLDLILCNKTAYQEVFKPENISLRNKLRELCVKLMFLHPVDYGRKAEELLWRKVYYEVIQLIKTNKKHIHSRSTLECAYRTHLVAGIGFYQHLLLYIQSHYQLELQCCIDWTHVTDPLIGCKKPVSASGKEMDWAQMACHRCLVYLGDLSRYQNELAGVDTELLAERFYYQALSVAPQIGMPFNQLGTLAGSKYYNVEAMYCYLRCIQSEVSFEGAYGNLKRLYDKAAKMYHQLKKCETRKLSPGKKRCKDIKRLLVNFMYLQSLLQPKSSSVDSELTSLCQSVLEDFNLCLFYLPSSPNLSLASEDEEEYESGYAFLPDLLIFQMVIICLMCVHSLERAGSKQYSAAIAFTLALFSHLVNHVNIRLQAELEEGENPVPAFQSDGTDEPESKEPVEKEEEPDPEPPPVTPQVGEGRKSRKFSRLSCLRRRRHPPKVGDDSDLSEGFESDSSHDSARASEGSDSGSDKSLEGGGTAFDAETDSEMNSQESRSDLEDMEEEEGTRSPTLEPPRGRSEAPDSLNGPLGPSEASIASNLQAMSTQMFQTKRCFRLAPTFSNLLLQPTTNPHTSASHRPCVNGDVDKPSEPASEEGSESEGSESSGRSCRNERSIQEKLQVLMAEGLLPAVKVFLDWLRTNPDLIIVCAQSSQSLWNRLSVLLNLLPAAGELQESGLALCPEVQDLLEGCELPDLPSSLLLPEDMALRNLPPLRAAHRRFNFDTDRPLLSTLEESVVRICCIRSFGHFIARLQGSILQFNPEVGIFVSIAQSEQESLLQQAQAQFRMAQEEARRNRLMRDMAQLRLQLEVSQLEGSLQQPKAQSAMSPYLVPDTQALCHHLPVIRQLATSGRFIVIIPRTVIDGLDLLKKEHPGARDGIRYLEAEFKKGNRYIRCQKEVGKSFERHKLKRQDADAWTLYKILDSCKQLTLAQGAGEEDPSGMVTIITGLPLDNPSVLSGPMQAALQAAAHASVDIKNVLDFYKQWKEIG

SEQ ID NO: 63827 - protein, 374 aa, Homo sapiens
MSQGPPTGESSEPEAKVLHTKRLYRAVVEAVHRLDLILCNKTAYQEVFKPENISLRNKLRELCVKLMFLHPVDYGRKAEELLWRKVYYEVIQLIKTNKKHIHSRSTLECAYRTHLVAGIGFYQHLLLYIQSHYQLELQCCIDWTHVTDPLIGCKKPVSASGKEMDWAQMACHRCLVYLGDLSRYQNELAGVDTELLAERFYYQALSVAPQIGMPFNQLGTLAGSKYYNVEAMYCYLRCIQSEVSFEGAYGNLKRLYDKAAKMYHQLKKCETRKLSPGKKRCKDIKRLLVNFMYLQSLLQPKSRGCTSHCPTSALCLPLSSFQGREQAPPRAAGSLACASTVSCAHQPHRCCALCSWLLCWDRMGCQEEKKGGAV

SEQ ID NO: 63828 - protein, 138 aa, Homo sapiens
  VARIANT 1: note = MOD_RES - Any amino acid
XFIVIIPRTVIDGLDLLKKEHPGARDGIRYLEAEFKKGNRYIRCQKEVGKSFERHKLKRQDADAWTLYKILDSCKQLTLAQGAGEEDPSGMVTIITGLPLDNPSVLSGPMQAALQAAAHASVDIKNVLDFYKQWKEIG

SEQ ID NO: 63829 - protein, 1145 aa, Homo sapiens
MLVTDLEYALDKKVEQDLWNHAFKNQITTLQGQAKNRANPNRSEVQANLSLFLEAASGFYTQLLQELCTVFNVDLPCRVKSSQLGIISNKQTHTSAIVKPQSSSCSYICQHCLVHLGDIARYRNQTSQAESYYRHAAQLVPSNGQPYNQLAILASSKGDHLTTIFYYCRSIAVKFPFPAASTNLQKALSKALESRDEVKTKWGVSDFIKAFIKFHGHVYLSKSLEKLSPLREKLEEQFKRLLFQKAFNSQQLVHVTVINLFQLHHLRDFSNETEQHTYSQDEQLCWTQLLALFMSFLGILCKCPLQNESQEESYNAYPLPAVKVSMDWLRLRPRVFQEAVVDERQYIWPWLISLLNSFHPHEEDLSSISATPLPEEFELQGFLALRPSFRNLDFSKGHQGITGDKEGQQRRIRQQRLISIGKWIADNQPRLIQCENEVGKLLFITEIPELILEDPSEAKENLILQETSVIESLAADGSPGLKSVLSTSRNLSNNCDTGEKPVVTFKENIKTREVNRDQGRSFPPKEVRRDYSKGITVTKNDGKKDNNKRKTETKKCTLEKLQETGKQNVAVQVKSQTELRKTPVSEARKTPVTQTPTQASNSQFIPIHHPGAFPPLPSRPGFPPPTYVIPPPVAFSMGSGYTFPAGVSVPGTFLQPTAHSPAGNQVQAGKQSHIPYSQQRPSGPGPMNQGPQQSQPPSQQPLTSLPAQPTAQSTSQLQVQALTQQQQSPTKAVPALGKSPPHHSGFQQYQQADASKQLWNPPQVQGPLGKIMPVKQPYYLQTQDPIKLFEPSLQPPVMQQQPLEKKMKPFPMEPYNHNPSEVKVPEFYWDSSYSMADNRSVMAQQANIDRRGKRSPGVFRPEQDPVPRMPFEDPKSSPLLPPDLLKSLAALEEEEELIFSNPPDLYPALLGPLASLPGRSLFKSLLEKPSELMSHSSSFLSLTGFSLNQERYPNNSMFNEVYGKNLTSSSKAELSPSMAPQETSLYSLFEGTPWSPSLPASSDHSTPASQSPHSSNPSSLPSSPPTHNHNSVPFSNFGPIGTPDNRDRRTADRWKTDKPAMGGFGIDYLSATSSSESSWHQASTPSGTWTGHGPSMEDSSAVLMESLKSIWSSSMMHPGPSALEQLLMQQKQKQQRGQGTMNPPH

SEQ ID NO: 63830 - protein, 1137 aa, Homo sapiens
MSLQSAQYLRQAEVLKADMTDSKLGPAEVWTSRQALQDLYQKMLVTDLEYALDKKVEQDLWNHAFKNQITTLQGQAKNRANPNRSEVQANLSLFLEAASGFYTQLLQELCTVFNVDLPCRVKSSQLGIISNKQTHTSAIVKPQSSSCSYICQHCLVHLGDIARYRNQTSQAESYYRHAAQLVPSNGQPYNQLAILASSKGDHLTTIFYYCRSIAVKFPFPAASTNLQKALSKALESRDEVKTKWGVSDFIKAFIKFHGHVYLSKSLEKLSPLREKLEEQFKRLLFQKAFNSQQLVHVTVINLFQLHHLRDFSNETEQHTYSQDEQLCWTQLLALFMSFLGILCKCPLQNESQEESYNAYPLPAVKVSMDWLRLRPRVFQEAVVDERQYIWPWLISLLNSFHPHEEDLSSISATPLPEEFELQGFLALRPSFRNLDFSKGHQGITGDKEGQQRRIRQQRLISIGKWIADNQPRLIQCENEVGKLLFITEIPELILEDPSEAKENLILQETSVIESLAADGSPGLKSVLSTSRNLSNNCDTGEKPVVTFKENIKTREVNRDQGRSFPPKEVRRDYSKGITVTKNDGKKDNNKRKTETKKCTLEKLQETGKQNVAVQVKSQTELRKTPVSEARKTPVTQTPTQASNSQFIPIHHPGAFPPLPSRPGFPPPTYVIPPPVAFSMGSGYTFPAGVSVPGTFLQPTAHSPAGNQVQAGKQSHIPYSQQRPSGPGPMNQGPQQSQPPSQQPLTSLPAQPTAQSTSQLQVQALTQQQQSPTKAVPALGKSPPHHSGFQQYQQADASKQLWNPPQVQGPLGKIMPVKQPYYLQTQDPIKLFEPSLQPPVMQQQPLEKKMKPFPMEPYNHNPSEVKVPEFYWDSSYSMADNRSVMAQQANIDRRGKRSPGVFRPEQDPVPRMPFEKSLLEKPSELMSHSSSFLSLTGFSLNQERYPNNSMFNEVYGKNLTSSSKAELSPSMAPQETSLYSLFEGTPWSPSLPASSDHSTPASQSPHSSNPSSLPSSPPTHNHNSVPFSNFGPIGTPDNRDRRTADRWKTDKPAMGGFGIDYLSATSSSESSWHQASTPSGTWTGHGPSMEDSSAVLMESLKSIWSSSMMHPGPSALEQLLMQQKQKQQRGQGTMNPPH

SEQ ID NO: 63831 - protein, 1170 aa, Homo sapiens
MRNWMFLQIVIVGENVSFKSQMRTENLKSEEHLKSSNIRQAEVLKADMTDSKLGPAEVWTSRQALQDLYQKMLVTDLEYALDKKVEQDLWNHAFKNQITTLQGQAKNRANPNRSEVQANLSLFLEAASGFYTQLLQELCTVFNVDLPCRVKSSQLGIISNKQTHTSAIVKPQSSSCSYICQHCLVHLGDIARYRNQTSQAESYYRHAAQLVPSNGQPYNQLAILASSKGDHLTTIFYYCRSIAVKFPFPAASTNLQKALSKALESRDEVKTKWGVSDFIKAFIKFHGHVYLSKSLEKLSPLREKLEEQFKRLLFQKAFNSQQLVHVTVINLFQLHHLRDFSNETEQHTYSQDEQLCWTQLLALFMSFLGILCKCPLQNESQEESYNAYPLPAVKVSMDWLRLRPRVFQEAVVDERQYIWPWLISLLNSFHPHEEDLSSISATPLPEEFELQGFLALRPSFRNLDFSKGHQGITGDKEGQQRRIRQQRLISIGKWIADNQPRLIQCENEVGKLLFITEIPELILEDPSEAKENLILQETSVIESLAADGSPGLKSVLSTSRNLSNNCDTGEKPVVTFKENIKTREVNRDQGRSFPPKEVKSQTELRKTPVSEARKTPVTQTPTQASNSQFIPIHHPGAFPPLPSRPGFPPPTYVIPPPVAFSMGSGYTFPAGVSVPGTFLQPTAHSPAGNQVQAGKQSHIPYSQQRPSGPGPMNQGPQQSQPPSQQPLTSLPAQPTAQSTSQLQVQALTQQQQSPTKAVPALGKSPPHHSGFQQYQQADASKQLWNPPQVQGPLGKIMPVKQPYYLQTQDPIKLFEPSLQPPVMQQQPLEKKMKPFPMEPYNHNPSEVKVPEFYWDSSYSMADNRSVMAQQANIDRRGKRSPGVFRPEQDPVPRMPFEDPKSSPLLPPDLLKSLAALEEEEELIFSNPPDLYPALLGPLASLPGRSLFKSLLEKPSELMSHSSSFLSLTGFSLNQERYPNNSMFNEVYGKNLTSSSKAELSPSMAPQETSLYSLFEGTPWSPSLPASSDHSTPASQSPHSSNPSSLPSSPPTHNHNSVPFSNFGPIGTPDNRDRRTADRWKTDKPAMGGFGIDYLSATSSSESSWHQASTPSGTWTGHGPSMEDSSAVLMESLKSIWSSSMMHPGPSALEQLLMQQKQKQQRGQGTMNPPH

SEQ ID NO: 63832 - protein, 757 aa, Homo sapiens
MLVTDLEYALDKKVEQDLWNHAFKNQITTLQGQAKNRANPNRSEVQANLSLFLEAASGFYTQLLQELCTVFNVDLPCRVKSSQLGIISNKQTHTSAIVKPQSSSCSYICQHCLVHLGDIARYRNQTSQAESYYRHAAQLVPSNGQPYNQLAILASSKGDHLTTIFYYCRSIAVKFPFPAASTNLQKALSKALESRDEVKTKWGVSDFIKAFIKFHGHVYLSKSLEKLSPLREKLEEQFKRLLFQKAFNSQQLVHVTVINLFQLHHLRDFSNETEQHTYSQDEQLCWTQLLALFMSFLGILCKCPLQNESQEESYNAYPLPAVKVSMDWLRLRPRVFQEAVVDERQYIWPWLISLLNSFHPHEEDLSSISATPLPEEFELQGFLALRPSFRNLDFSKGHQGITGDKEGQQRRIRQQRLISIGKWIADNQPRLIQCENEVGKLLFITEIPELILEDPSEAKENLILQETSVIESLAADGSPGLKSVLSTSRNLSNNCDTGEKPVVTFKENIKTREVNRDQGRSFPPKEVKSQTELRKTPVSEARKTPVTQTPTQASNSQFIPIHHPGAFPPLPSRPGFPPPTYVIPPPVAFSMGSGYTFPAGVSVPGTFLQPTAHSPAGNQVQAGKQSHIPYSQQRPSGPGPMNQGPQQSQPPSQQPLTSLPAQPTAQSTSQLQVQALTQQQQSPTKAVPALGKSPPHHSGFQQYQQADASKQLWNPPQVQGPLGKIMPVKQPYYLQTQDPIKLFEPSLQPPVMQQQPL

SEQ ID NO: 63833 - protein, 1049 aa, Homo sapiens
MLVTDLEYALDKKVEQDLWNHAFKNQITTLQGQAKNRANPNRSEVQANLSLFLEAASGFYTQLLQELCTVFNVDLPCRVKSSQLGIISNKQTHTSAIVKPQSSSCSYICQHCLVHLGDIARYRNQTSQAESYYRHAAQLVPSNGQPYNQLAILASSKGDHLTTIFYYCRSIAVKFPFPAASTNLQKALSKALESRDEVKTKWGVSDFIKAFIKFHGHVYLSKSLEKLSPLREKLEEQFKRLLFQKAFNSQQLVHVTVINLFQLHHLRDFSNETEQHTYSQDEQLCWTQLLALFMSFLGILCKCPLQNESQEESYNAYPLPAVKVSMDWLRLRPRVFQEAVVDERQYIWPWLISLLNSFHPHEEDLSSISATPLPEEFELQGFLALRPSFRNLDFSKGHQGITGDKEGQQRRIRQQRLISIGKWIADNQPRLIQCENEVGKLLFITEIPELILEDPSEAKENLILQETSVIESLAADGSPGLKSVLSTSRNLSNNCDTGEKPVVTFKENIKTREVNRDQGRSFPPKEVKSQTELRKTPVSEARKTPVTQTPTQASNSQFIPIHHPGAFPPLPSRPGFPPPTYVIPPPVAFSMGSGYTFPAGVSVPGTFLQPTAHSPAGNQVQAGKQSHIPYSQQRPSGPGPMNQGPQQSQPPSQQPLTSLPAQPTAQSTSQLQVQALTQQQQSPTKAVPALGKSPPHHSGFQQYQQADASKQLWNPPQVQGPLGKIMPVKQPYYLQTQDPIKLFEPSLQPPVMQQQPLEKKMKPFPMEPYNHNPSEVKVPEFYWDSSYSMADNRSVMAQQANIDRRGKRSPGVFRPEQDPVPRMPFEKSLLEKPSELMSHSSSFLSLTGFSLNQERYPNNSMFNEVYGKNLTSSSKAELSPSMAPQETSLYSLFEGTPWSPSLPASSDHSTPASQSPHSSNPSSLPSSPPTHNHNSVPFSNFGPIGTPDNRDRRTADRWKTDKPAMGGFGIDYLSATSSSESSWHQASTPSGTWTGHGPSMEDSSAVLMESLKSIWSSSMMHPGPSALEQLLMQQKQKQQRGQGTMNPPH

SEQ ID NO: 63834 - protein, 1178 aa, Homo sapiens
MSLQSAQYLRQAEVLKADMTDSKLGPAEVWTSRQALQDLYQKMLVTDLEYALDKKVEQDLWNHAFKNQITTLQGQAKNRANPNRSEVQANLSLFLEAASGFYTQLLQELCTVFNVDLPCRVKSSQLGIISNKQTHTSAIVKPQSSSCSYICQHCLVHLGDIARYRNQTSQAESYYRHAAQLVPSNGQPYNQLAILASSKGDHLTTIFYYCRSIAVKFPFPAASTNLQKALSKALESRDEVKTKWGVSDFIKAFIKFHGHVYLSKSLEKLSPLREKLEEQFKRLLFQKAFNSQQLVHVTVINLFQLHHLRDFSNETEQHTYSQDEQLCWTQLLALFMSFLGILCKCPLQNESQEESYNAYPLPAVKVSMDWLRLRPRVFQEAVVDERQYIWPWLISLLNSFHPHEEDLSSISATPLPEEFELQGFLALRPSFRNLDFSKGHQGITGDKEGQQRRIRQQRLISIGKWIADNQPRLIQCENEVGKLLFITEIPELILEDPSEAKENLILQETSVIESLAADGSPGLKSVLSTSRNLSNNCDTGEKPVVTFKENIKTREVNRDQGRSFPPKEVKSQTELRKTPVSEARKTPVTQTPTQASNSQFIPIHHPGAFPPLPSRPGFPPPTYVIPPPVAFSMGSGYTFPAGVSVPGTFLQPTAHSPAGNQVQAGKQSHIPYSQQRPSGPGPMNQGPQQSQPPSQQPLTSLPAQPTAQSTSQLQVQALTQQQQSPTKAVPALGKSPPHHSGFQQYQQADASKQLWNPPQVQGPLGKIMPVKQPYYLQTQDPIKLFEPSLQPPVMQQQPLEKKMKPFPMEPYNHNPSEVKVPEFYWDSSYSMADNRSVMAQQANIDRRGKRSPGVFRPEQDPVPRMPFEDPKSSPLLPPDLLKSLAALEEEEELIFSNPPDLYPALLGPLASLPGRSLFKSLLEKPSELMSHSSSFLSLTGFSLNQERYPNNSMFNEVYGKNLTSSSKAELSPSMAPQETSLYSLFEGTPWSPSLPASSDHSTPASQSPHSSNPSSLPSSPPTHNHNSVPFSNFGPIGTPDNRDRRTADRWKTDKPAMGGFGIDYLSATSSSESSWHQASTPSGTWTGHGPSMEDSSAVLMESLKKQQHGVQQLGPKRQSEEEGSSSICVAHRGPRPLPSCSLPASTFRVKFKAARTCAHQAQKKTRRRPFWKRRKKGK

SEQ ID NO: 63835 - protein, 1091 aa, Homo sapiens
MSLQSAQYLRQAEVLKADMTDSKLGPAEVWTSRQALQDLYQKMLVTDLEYALDKKVEQDLWNHAFKNQITTLQGQAKNRANPNRSEVQANLSLFLEAASGFYTQLLQELCTVFNVDLPCRVKSSQLGIISNKQTHTSAIVKPQSSSCSYICQHCLVHLGDIARYRNQTSQAESYYRHAAQLVPSNGQPYNQLAILASSKGDHLTTIFYYCRSIAVKFPFPAASTNLQKALSKALESRDEVKTKWGVSDFIKAFIKFHGHVYLSKSLEKLSPLREKLEEQFKRLLFQKAFNSQQLVHVTVINLFQLHHLRDFSNETEQHTYSQDEQLCWTQLLALFMSFLGILCKCPLQNESQEESYNAYPLPAVKVSMDWLRLRPRVFQEAVVDERQYIWPWLISLLNSFHPHEEDLSSISATPLPEEFELQGFLALRPSFRNLDFSKGHQGITGDKEGQQRRIRQQRLISIGKWIADNQPRLIQCENEVGKLLFITEIPELILEDPSEAKENLILQETSVIESLAADGSPGLKSVLSTSRNLSNNCDTGEKPVVTFKENIKTREVNRDQGRSFPPKEVKSQTELRKTPVSEARKTPVTQTPTQASNSQFIPIHHPGAFPPLPSRPGFPPPTYVIPPPVAFSMGSGYTFPAGVSVPGTFLQPTAHSPAGNQVQAGKQSHIPYSQQRPSGPGPMNQGPQQSQPPSQQPLTSLPAQPTAQSTSQLQVQALTQQQQSPTKAVPALGKSPPHHSGFQQYQQADASKQLWNPPQVQGPLGKIMPVKQPYYLQTQDPIKLFEPSLQPPVMQQQPLEKKMKPFPMEPYNHNPSEVKVPEFYWDSSYSMADNRSVMAQQANIDRRGKRSPGVFRPEQDPVPRMPFEKSLLEKPSELMSHSSSFLSLTGFSLNQERYPNNSMFNEVYGKNLTSSSKAELSPSMAPQETSLYSLFEGTPWSPSLPASSDHSTPASQSPHSSNPSSLPSSPPTHNHNSVPFSNFGPIGTPDNRDRRTADRWKTDKPAMGGFGIDYLSATSSSESSWHQASTPSGTWTGHGPSMEDSSAVLMESLKSIWSSSMMHPGPSALEQLLMQQKQKQQRGQGTMNPPH

SEQ ID NO: 63836 - protein, 991 aa, Homo sapiens
MAGPVSLRDLLMGASAWMGSESPGGSPTEGGGSAAGGPEPPWREDEICVVGIFGKTALRLNSEKFSLVNTVCDRQVFPLFRHQDPGDPGPGIRTEAGAVGEAGGAEDPGAAAGGSVRGSGAVAEGNRTEAGSQDYSLLQAYYSQESKVLYLLLTSICDNSQLLRACRALQSGEAGGGLSLPHAEAHEFWKHQEKLQCLSLLYLFSVCHILLLVHPTCSFDITYDRVFRALDGLRQKVLPLLKTAIKDCPVGKDWKLNCRPCPPRLLFLFQLNGALKVEPPRNQDPAHPDKPKKHSPKRRLQHALEDQIYRIFRKSRVLTNQSINCLFTVPANQAFVYIVPGSQEEDPVGMLLDQLRSHCTVKDPESLLVPAPLSGPRRYQVMRQHSRQQLSFHIDSSSSSSSGQLVDFTLREFLWQHVELVLSKKGFDDSVGRNPQPSHFELPTYQKWISAASKLYEVAIDGKEEDLGSPTGELTSKILSSIKVLEGFLDIDTKFSENRCQKALPMAHSAYQSNLPHNYTMTVHKNQLAQALRVYSQHARGPAFHKYAMQLHEDCYKFWSNGHQLCEERSLTDQHCVHKFHSLPKSGEKPEADRNPPVLYHNSRARSTGACNCGRKQAPRDDPFDIKAANYDFYQLLEEKCCGKLDHINFPVFEPSTPDPAPAKNESSPAPPDSDADKLKEKEPQTQGESTSLSLALSLGQSTDSLGTYPADPQAGGDNPEVHGQVEVKTEKRPNFVDRQASTVEYLPGMLHSNCPKGLLPKFSSWSLVKLGPAKSYNFHTGLDQQGFIPGTNYLMPWDIVIRTRAEDEGDLDTNSWPAPNKAIPGKRSAVVMGRGRRRDDIARAFVGFEYEDSRGRRFMCSGPDKVMKVMGSGPKESALKALNSDMPLYILSSSQGRGLKPHYAQLMRLFVVVPDAPLQIILMPQVQPGPPPCPVFYPEKQEITLPPDGLWVLRFPYAYVTERGPCFPPKENVQLMSYKVLRGVLKAVTQ

SEQ ID NO: 63837 - protein, 974 aa, Homo sapiens
MAGPVSLRDLLMGASAWMGSESPGGSPTEGGGSAAGGPEPPWREDEICVVGIFGKTALRLNSEKFSLVNTVCDRQVFPLFRHQDPGDPGPGIRTEAGAVGEAGGAEDPGAAAGGSVRGSGAVAEGNRTEAGSQDYSLLQAYYSQESKVLYLLLTSICDNSQLLRACRALQSGEAGGGLSLPHAEAHEFWKHQEKLQCLSLLYLFSVCHILLLVHPTCSFDITYDRVFRALDGLRQKVLPLLKTAIKDCPVGKDWKLNCRPCPPRLLFLFQLNGALKVEPPRNQDPAHPDKPKKHSPKRRLQHALEDQIYRIFRKSRVLTNQSINCLFTVPANQAFVYIVPGSQEEDPVGMLLDQLRSHCTVKDPESLLVPAPLSGPRRYQVMRQHSRQQLSFHIDSSSSSSSGQLVDFTLREFLWQHVELVLSKKGFDDSVGRNPQPSHFELPTYQKWISAASKLYEVAIDGKEEDLGSPTGELTSKILSSIKVLEGFLDIDTKFSENRCQKALPMAHSAYQSNLPHNYTMTVHKNQLAQALRVYSQHARGPAFHKYAMQLHEDCYKFWSNGHQLCEERSLTDQHCVHKFHSLPKSGEKPEADRNPPVLYHNSRARSTGACNCGRKQAPRDDPFDIKAANYDFYQLLEEKCCGKLDHINFPVFEPSTPDPAPAKNESSPAPPDSDADKLKEKEPQTQGESTSLSLALSLGQSTDSLGTYPADPQAGGDNPEVHGQVEVKTEKRPNFVDRQASTVEYLPGMLHSNCPKGLLPKFSSWSLVKLGPAKSYNFHTGLDQQGFIPGTNYLMPWDIVIRTRAEDEGDLDTNSWPAPNKAIPGKRSAVVMGRGRRRDDIARAFVGFEYEDSRGRRFMCSGPDKVMKVMGSGPKESALKALNSDMPLYILSSSQGRGLKPHYAQLMRLFVVVPDAPLQIILMPQVQPGPPPCPVFYPEKQEITLPPDGLWVLRFPYAYLREDLVSPLRKMCS

SEQ ID NO: 63838 - protein, 520 aa, Homo sapiens
MSESGHSQPGLYGIERRRRWKEPGSGGPQNLSGPGGRERDYIAPWERERRDASEETSTSVMQKTPIILSKPPAERSKQPPPPTAPAAPPAPAPLEKPIVLMKPREEGKGPVAVTGASTPEGTAPPPPAAPAPPKGEKEGQRPTQPVYQIQNRGMGTAAPAAMDPVVGQAKLLPPERMKHSIKLVDDQMNWCDSAIEYLLDQTDVLVVGVLGLQGTGKSMVMSLLSANTPEEDQRTYVFRAQSAEMKERGGNQTSGIDFFITQERIVFLDTQPILSPSILDHLINNDRKLPPEYNLPHTYVEMQSLQIAAFLFTVCHVVIVVQDWFTDLSLYRFLQTAEMVKPSTPSPSHESSSSSGSDEGTEYYPHLVFLQNKARREDFCPRKLRQMHLMIDQLMAHSHLRYKGTLSMLQCNVFPGLPPDFLDSEVNLFLVPFMDSEAESENPPRAGPGSSPLFSLLPGYRGHPSFQSLVSKLRSQVMSMARPQLSHTILTEKNWFHYAARIWDGVRKSSALAEYSRLLA

SEQ ID NO: 63839 - protein, 913 aa, Homo sapiens
MADEALAGLDEGALRKLLEVTADLAERRRIRSAIRELQRQELEREEEALASKRFRAERQDNKENWLHSQQREAEQRAALARLAGQLESMNDVEELTALLRSAGEYEERKLIRAAIRRVRAQEIEAATLAGRLYSGRPNSGSREDSKGLAAHRLEQCEVPEREEQEQQAEVSKPTPTPEGTSQDVTTVTLLLRAPPGSTSSSPASPSSSPTPASPEPPLEPAEAQCLTAEVPGSPEPPPSPPKTTSPEPQESPTLPSTEGQVVNKLLSGPKETPAAQSPTRGPSDTKRADVAGPRPCQRSLSVLSPRQPAQNRESTPLASGPSSFQRAGSVRDRVHKFTSDSPMAARLQDGTPQAALSPLPRKAPGPLPHQHHPCLLLQRLLLSGPDTSSRFSKEQRGVAQPLAQLRSCPQEEGPRGRGLAARPLENRAGGPVARSEEPGAPLPVAVGTAEPGGSMKTTFTIEIKDGRGQASTGRVLLPTGNQRAELTLGLRAPPTLLSTSSGGKSTITRVNSPGTLARLGSVTHVTSFSHAPPSSRGGCSIKMEAEPAEPLAAAVEAANGAEQTRVNKAPEGRSPLSAEELMTIEDEGVLDKMLDQSTDFEERKLIRAALRELRQRKRDQRDKERERRLQEARGRPGEGRGNTATETTTRHSQRAADGSAVSTVTKTERLVHSNDGTRTARTTTVESSFVRRSENGSGSTMMQTKTFSSSSSSKKMGSIFDREDQASPRAGSLAALEKRQAEKKKELMKAQSLPKTSASQARKAMIEKLEKEGAAGSPGGPRAAVQRSTSFGVPNANSIKQMLLDWCRAKTRGYEHVDIQNFSSSWSDGMAFCALVHNFFPEAFDYGQLSPQNRRQNFEVAFSSAETHADCPQLLDTEDMVRLREPDWKCVYTYIQEFYRCLVQKGLVKTKKS

SEQ ID NO: 63840 - protein, 915 aa, Homo sapiens
MADEALAGLDEGALRKLLEVTADLAERRRIRSAIRELQRQELEREEEALASKRFRAERQDNKENWLHSQQREAEQRAALARLAGQLESMNDVEELTALLRSAGEYEERKLIRAAIRRVRAQEIEAATLAGRLYSGRPNSGSREDSKGLAAHRLEQCEVPEREEQEQQAEVSKPTPTPEGTSQDVTTVTLLLRAPPGSTSSSPASPSSSPTPASPEPPLEPAEAQCLTAEVPGSPEPPPSPPKTTSPEPQESPTLPSTEGQVVNKLLSGPKETPAAQSPTRGPSDTKRADVAGPRPCQRSLSVLSPRQPAQNRESTPLASGPSSFQRAGSVRDRVHKFTSDSPMAARLQDGTPQAALSPLTPARLLGPSLTSTTPASSSSGSSSRGPSDTSSRFSKEQRGVAQPLAQLRSCPQEEGPRGRGLAARPLENRAGGPVARSEEPGAPLPVAVGTAEPGGSMKTTFTIEIKDGRGQASTGRVLLPTGNQRAELTLGLRAPPTLLSTSSGGKSTITRVNSPGTLARLGSVTHVTSFSHAPPSSRGGCSIKMEAEPAEPLAAAVEAANGAEQTRVNKAPEGRSPLSAEELMTIEDEGVLDKMLDQSTDFEERKLIRAALRELRQRKRDQRDKERERRLQEARGRPGEGRGNTATETTTRHSQRAADGSAVSTVTKTERLVHSNDGTRTARTTTVESSFVRRSENGSGSTMMQTKTFSSSSSSKKMGSIFDREDQASPRAGSLAALEKRQAEKKKELMKAQSLPKTSASQARKAMIEKLEKEGAAGSPGGPRAAVQRSTSFGVPNANSIKQMLLDWCRAKTRGYEHVDIQNFSSSWSDGMAFCALVHNFFPEAFDYGQLSPQNRRQNFEVAFSSAETHADCPQLLDTEDMVRLREPDWKCVYTYIQEFYRCLVQKGLVKTKKS

SEQ ID NO: 63841 - protein, 917 aa, Homo sapiens
MADEALAGLDEGALRKLLEVTADLAERRRIRSAIRELQRQELEREEEALASKRFRAERQDNKENWLHSQQREAEQRAALARLAGQLESMNDVEELTALLRSAGEYEERKLIRAAIRRVRAQEIEAATLAGRLYSGRPNSGSREDSKGLAAHRLEQCEVPEREEQEQQAEVSKPTPTPEGTSQDVTTVTLLLRAPPGSTSSSPASPSSSPTPASPEPPLEPAEAQCLTAEVPGSPEPPPSPPKTTSPEPQESPTLPSTEGQVVNKLLSGPKETPAAQSPTRGPSDTKRADVAGPRPCQRSLSVLSPRQPAQNRESTPLASGPSSFQRAGSVRDRVHKFTSDSPMAARLQDGTPQAALSPLTPARLLGPSLTSTTPASSSSGSSSRGPSDTSSRFSKEQRGVAQPLAQLRSCPQEEGPRGRGLAARPLENRAGGPVARSEEPGAPLPVAVGTAEPGGSMKTTFTIEIKDGRGQASTGRVLLPTGNQRAELTLGLRAPPTLLSTSSGGKSTITRVNSPGTLARLGSVTHVTSFSHAPPSSRGGCSIKMEAEPAEPLAAAVEAANGAEQTRVNKAPEGRSPLSAEELMTIEDEGVLDKMLDQSTDFEERKLIRAALRELRQRKRDQRDKERERRLQEARGRPGEGRGNTATETTTRHSQRAADGSAVSTVTKTERLVHSNDGTRTARTTTVESSFVRRSENGSGSTMMQTKTFSSSSSSKKMGSIFDREDQASPRAGSLAALEKRQAEKKKELMKAQSLPKTSASQARKAMIEKLEKEGAAGSPGGPRAAVQRSTSFGVPNANSIKQMLLDWCRAKTRGYEHVDIQNFSSSWSDGMAFCALVHNFFPEAFDYGQLSPQNRRQNFEVAFSSAEMLVDCVPLVEVDDMMIMGKKPDPKCVFTYVQSLYNHLRRHELRLRGKNV

SEQ ID NO: 63842 - protein, 295 aa, Homo sapiens
MEAEPAEPLAAAVEAANGAEQTRVNKAPEGRSPLSAEELMTIEDEGVLDKMLDQSTDFEERKLIRAALRELRQRKRDGSGSTMMQTKTFSSSSSSKKMGSIFDREDQASPRAGSLAALEKRQAEKKKELMKAQSLPKTSASQARKAMIEKLEKEGAAGSPGGPRAAVQRSTSFGVPNANSIKQMLLDWCRAKTRGYEHVDIQNFSSSWSDGMAFCALVHNFFPEAFDYGQLSPQNRRQNFEVAFSSAETHADCPQLLDTEDMVRLREPDWKCVYTYIQEFYRCLVQKGLVKTKKS

SEQ ID NO: 63843 - protein, 938 aa, Homo sapiens
MTCLSHPLQLEVTADLAERRRIRSAIRELQRQELEREEEALASKRFRAERQDNKENWLHSQQREAEQRAALARLAGQLESMNDVEELTALLRSAGEYEERKLIRAAIRRVRAQEIEAATLAGRLYSGRPNSGSREDSKGLAAHRLEQCEVPEREEQEQQAEVSKPTPTPEGTSQDVTTVTLLLRAPPGSTSSSPASPSSSPTPASPEPPLEPAEAQCLTAEVPGSPEPPPSPPKTTSPEPQESPTLPSTEGQVVNKLLSGPKETPAAQSPTRGPSDTKRADVAGPRPCQRSLSVLSPRQPAQNRESTPLASGPSSFQRAGSVRDRVHKFTSDSPMAARLQDGTPQAALSPLTPARLLGPSLTSTTPASSSSGSSSRGPSDTSSRFSKEQRGVAQPLAQLRSCPQEEGPRGRGLAARPLENRAGGPVARSEEPGAPLPVAVGTAEPGGSMKTTFTIEIKDGRGQASTGRVLLPTGNQRAELTLGLRAPPTLLSTSSGGKSTITRVNSPGTLARLGSVTHVTSFSHAPPSSRGGCSIKAAEDAGTPVAHPPAFSTRRRSSTGTTRSTSLMEAEPAEPLAAAVEAANGAEQTRVNKAPEGRSPLSAEELMTIEDEGVLDKMLDQSTDFEERKLIRAALRELRQRKRDQRDKERERRLQEARGRPGEGRGNTATETTTRHSQRAADGSAVSTVTKTERLVHSNDGTRTARTTTVESSFVRRSENGSGSTMMQTKTFSSSSSSKKMGSIFDREDQASPRAGSLAALEKRQAEKKKELMKAQSLPKTSASQARKAMIEKLEKEGAAGSPGGPRAAVQRSTSFGVPNANSIKQMLLDWCRAKTRGYEHVDIQNFSSSWSDGMAFCALVHNFFPEAFDYGQLSPQNRRQNFEVAFSSAETHADCPQLLDTEDMVRLREPDWKCVYTYIQEFYRCLVQKGLVKTKKS

SEQ ID NO: 63844 - protein, 37 aa, Homo sapiens
MADEALAGLDEGALRKLLEVTADLAERRRIRSAIREL

SEQ ID NO: 63845 - protein, 940 aa, Homo sapiens
MADEALAGLDEGALRKLLEVTADLAERRRIRSAIRELQRQELEREEEALASKRFRAERQDNKENWLHSQQREAEQRAALARLAGQLESMNDVEELTALLRSAGEYEERKLIRAAIRRVRAQEIEAATLAGRLYSGRPNSGSREDSKGLAAHRLEQCEVPEREEQEQQAEVSKPTPTPEGTSQDVTTVTLLLRAPPGSTSSSPASPSSSPTPASPEPPLEPAEAQCLTAEVPGSPEPPPSPPKTTSPEPQESPTLPSTEGQVVNKLLSGPKETPAAQSPTRGPSDTKRADVAGPRPCQRSLSVLSPRQPAQNRESTPLASGPSSFQRAGSVRDRVHKFTSDSPMAARLQDGTPQAALSPLTPARLLGPSLTSTTPASSSSGSSSRGPSDTSSRFSKEQRGVAQPLAQLRSCPQEEGPRGRGLAARPLENRAGGPVARSEEPGAPLPVAVGTAEPGGSMKTTFTIEIKDGRGQASTGRVLLPTGNQRAELTLGLRAPPTLLSTSSGGKSTITRVNSPGTLARLGSVTHVTSFSHAPPSSRGGCSIKMEAEPAEPLAAAVEAANGAEQTRVNKAPEGRSPLSAEELMTIEDEGVLDKMLDQSTDFEERKLIRAALRELRQRKRDQRDKERERRLQEARGRPGEGRGNTATETTTRHSQRAADGSAVSTVTKTERLVHSNDGTRTARTTTVESSFVRRSENGSGSTMMQTKTFSSSSSSKKMGSIFDREDQASPRAGSLAALEKRQAEKKKELMKAQSLPKTSASQARKAMIEKLEKEGAAGSPGGPRAAVQRSTSFGVPNANSIKQMLLDWCRAKTRGYEHVDIQNFSSSWSDGMAFCALVHNFFPEAFDYGQLSPQNRRQNFEVAFSSAETHADCPQLLDTEDMVRLREPDWKMLVDCVPLVEVDDMMIMGKKPDPKCVFTYVQSLYNHLRRHELRLRGKNV

SEQ ID NO: 63846 - protein, 457 aa, Homo sapiens
MEQKEGKLSEDGTTVSPAADNPEMSGGGAPAEETKGTAGKAINEGPPTESGKQEKAPAEDGMSAELQGEANGLDEVKVESQREAGGKEDAEAELKKEDGEKEETTVGSQEMTGRKEETKSEPKEAEEKESTLASEKQKAEEKEAKPESGQKADANDRDKPEPKATVEEEDAKTASQEETVVEDEAKAEPKEPDGKEEAKHGAKEEADEPGSPSEEQEQDVEKEPEGGAGVIPSSPEEWPESPTGEGHNLSTDGLGPDCVASGQTSPSASESSPSDVPQSPPESPSSGEKKEKAPERRVSAPARPRGPRAQNRKAIVDKFGGAASGPTALFRNTKAAGAAIGGVKNMLLEWCRAMTKKYEHVDIQNFSSSWSSGMAFCALIHKFFPDAFDYAELDPAKRRHNFTLAFSTAEKLADCAQLLDVDDMVRLAVPDSKCVYTYIQELYRSLVQKGLVKTKKK

SEQ ID NO: 63847 - protein, 512 aa, Homo sapiens
MLPGAVGESDCSAEAREKMEQKEGKLSEDGTTVSPAADNPEMSGGGAPAEETKGTAGKAINEGPPTESGKQEKAPAEDGMSAELQGEANGLDEVKVESQREAGGKEDAEAELKKEDGEKEETTVGSQEMTGRKEETKSEPKEAEEKESTLASEKQKAEEKEAKPESGQKADANDRDKPEPKATVEEEDAKTASQEETGQRKECSTEPKEKATDEEAKAESQKAVVEDEAKAEPKEPDGKEEAKHGAKEEADAKEEAEDAEEAEPGSPSEEQEQDVEKEPEGGAGVIPSSPEEWPESPTGEGHNLSTDGLGPDCVASGQTSPSASESSPSDVPQSPPESPSSGEKKEKAPERRVSAPARPRGPRAQNRKAIVDKFGGAASGPTALFRNTKAAGAAIGGVKNMLLEWCRAMTKKYEHVDIQNFSSSWSSGMAFCALIHKFFPDAFDYAELDPAKRRHNFTLAFSTAEKLADCAQLLDVDDMVRLAVPDSKCVYTYIQELYRSLVQKGLVKTKKK

SEQ ID NO: 63848 - protein, 494 aa, Homo sapiens
MEQKEGKLSEDGTTVSPAADNPEMSGGGAPAEETKGTAGKAINEGPPTESGKQEKAPAEDGMSAELQGEANGLDEVKVESQREAGGKEDAEAELKKEDGEKEETTVGSQEMTGRKEETKSEPKEAEEKESTLASEKQKAEEKEAKPESGQKADANDRDKPEPKATVEEEDAKTASQEETGQRKECSTEPKEKATDEEAKAESQKAVVEDEAKAEPKEPDGKEEAKHGAKEEADAKEEAEDAEEAEPGSPSEEQEQDVEKEPEGGAGVIPSSPEEWPESPTGEGHNLSTDGLGPDCVASGQTSPSASESSPSDVPQSPPESPSSGEKKEKAPERRVSAPARPRGPRAQNRKAIVDKFGGAASGPTALFRNTKAAGAAIGGVKNMLLEWCRAMTKKYEHVDIQNFSSSWSSGMAFCALIHKFFPDAFDYAELDPAKRRHNFTLAFSTAEKLADCAQLLDVDDMVRLAVPDSKCVYTYIQELYRSLVQKGLVKTKKK

SEQ ID NO: 63849 - protein, 103 aa, Homo sapiens
MSEEKPKEGVKTENDHINLKVAGQDGSVVQFKIKRHTPLSKLMKAYCERQGLSMRQIRFRFDGQPINETDTPAQLEMEDEDTIDVFQQQTGGVPESSLAGHSF

SEQ ID NO: 63850 - protein, 141 aa, Homo sapiens
MSEEKPKEGVKTENDHINLKVAGQDGSVVQFKIKRHTPLSKLMKAYCERQVRHLAPPQSLPVCALVLCVPGIPRARASRGWTQMQLPEGLSMRQIRFRFDGQPINETDTPAQLEMEDEDTIDVFQQQTGGVPESSLAGHSF

SEQ ID NO: 63851 - protein, 95 aa, Homo sapiens
MANEKPTEEVKTENNNHINLKVAGQDGSVVQFKIKRQTPLSKLMKAYCEPRGLSVKQIRFRFGGQPISGTDKPAQLEMEDEDTIDVFQQPTGGVY

SEQ ID NO: 63852 - protein, 136 aa, Homo sapiens
MAGAGSAAVSGAGTPVAGPTGRDLFAEGLLEFLRPAVQQLDSHVHAVRESQVELREQIDNLATELCRINEDQKVALDLDPYVKKLLNARRRVVLVNNILQNAQERLRRLNHSVAKETARRRAMLDSGIYPPGSPGK

SEQ ID NO: 63853 - protein, 765 aa, Homo sapiens
MAGFKRGYDGKIAGLYDLDKTLGRGHFAVVKLARHVFTGEKVAVKVIDKTKLDTLATGHLFQEVRCMKLVQHPNIVRLYEVIDTQTKLYLILELGDGGDMFDYIMKHEEGLNEDLAKKYFAQIVHAISYCHKLHVVHRDLKPENVVFFEKQGLVKLTDFGFSNKFQPGKKLTTSCGSLAYSAPEILLGDEYDAPAVDIWSLGVILFMLVCGQPPFQEANDSETLTMIMDCKYTVPSHVSKECKDLITRMLQRDPKRRASLEEIENHPWLQGVDPSPATKYNIPLVSYKNLSEEEHNSIIQRMVLGDIADRDAIVEALETNRYNHITATYFLLAERILREKQEKEIQTRSASPSNIKAQFRQSWPTKIDVPQDLEDDLTATPLSHATVPQSPARAADSVLNGHRSKGLCDSAKKDDLPELAGPALSTVPPASLKPTASGRKCLFRVEEDEEEDEEDKKPMSLSTQVVLRRKPSVTNRLTSRKSAPVLNQIFEEGESDDEFDMDENLPPKLSRLKMNIASPGTVHKRYHRRKSQGRGSSCSSSETSDDDSESRRRLDKDSGFTYSWHRRDSSEGPPGSEGDGGGQSKPSNASGGVDKASPSENNAGGGSPSSGSGGNPTNTSGTTRRCAGPSNSMQLASRSAGELVESLKLMSLCLGSQLHGSTKYIIDPQNGLSFSSVKVQEKSTWKMCISSTGNAGQVPAVGGIKFFSDHMADTTTELERIKSKNLKNNVLQLPLCEKTISVNIQRNPKEGLLCASSPASCCHVI

SEQ ID NO: 63854 - protein, 765 aa, Homo sapiens; identical to SEQ ID NO: 63853

SEQ ID NO: 63855 - protein, 765 aa, Homo sapiens; identical to SEQ ID NO: 63853

SEQ ID NO: 63856 - protein, 3230 aa, Homo sapiens
MQSSPSPAHPQLPVLQTQMVSDGMTGSNPVSPASSSSPASSGAGGISPQHIAQDSSLDGPPGPPDGATVPLEGFSLSQAADLANKGPKWEKSHAEIAEQAKHEAEIETRIAELRKEGFWSLKRLPKVPEPPRPKGHWDYLCEEMQWLSADFAQERRWKRGVARKVVRMVIRHHEEQRQKEERARREEQAKLRRIASTMAKDVRQFWSNVEKVVQFKQQSRLEEKRKKALDLHLDFIVGQTEKYSDLLSQSLNQPLTSSKAGSSPCLGSSSAASSPPPPASRLDDEDGDFQPQEDEEEDDEETIEVEEQQEGNDAEAQRREIELLRREGELPLEELLRSLPPQLLEGPSSPSQTPSSHDSDTRDGPEEGAEEEPPQVLEIKPPPSAVTQRNKQPWHPDEDDEEFTANEEEAEDEEDTIAAEEQLEGEVDHAMELSELAREGELSMEELLQQYAGAYAPGSGSSEDEDEDEVDANSSDCEPEGPVEAEEPPQEDSSSQSDSVEDRSEDEEDEHSEEEETSGSSASEESESEESEDAQSQSQADEEEEDDDFGVEYLLARDEEQSEADAGSGPPTPGPTTLGPKKEITDIAAAAESLQPKGYTLATTQVKTPIPLLLRGQLREYQHIGLDWLVTMYEKKLNGILADEMGLGKTIQTISLLAHLACEKGNWGPHLIIVPTSVMLNWEMELKRWCPSFKILTYYGAQKERKLKRQGWTKPNAFHVCITSYKLVLQDHQAFRRKNWRYLILDEAQNIKNFKSQRWQSLLNFNSQRRLLLTGTPLQNSLMELWSLMHFLMPHVFQSHREFKEWFSNPLTGMIEGSQEYNEGLVKRLHKVLRPFLLRRVKVDVEKQMPKKYEHVIRCRLSKRQRCLYDDFMAQTTTKETLATGHFMSVINILMQLRKVCNHPNLFDPRPVTSPFITPGICFSTASLVLRATDVHPLQRIDMGRFDLIGLEGRVSRYEADTFLPRHRLSRRVLLEVATAPDPPPRPKPVKMKVNRMLQPVPKQEGRTVVVVNNPRAPLGPVPVRPPPGPELSAQPTPGPVPQVLPASLMVSASPAGPPLIPASRPPGPVLLPPLQPNSGSLPQVLPSPLGVLSGTSRPPTPTLSLKPTPPAPVRLSPAPPPGSSSLLKPLTVPPGYTFPPAAATTTSTTTATATTTAVPAPTPAPQRLILSPDMQARLPSGEVVSIGQLASLAQRPVANAGGSKPLTFQIQGNKLTLTGAQVRQLAVGQPRPLQRNVVHLVSAGGQHHLISQPAHVALIQAVAPTPGPTPVSVLPSSTPSTTPAPTGLSLPLAANQVPPTMVNNTGVVKIVVRQAPRDGLTPVPPLAPAPRPPSSGLPAVLNPRPTLTPGRLPTPTLGTARAPMPTPTLVRPLLKLVHSPSPEVSASAPGAAPLTISSPLHVPSSLPGPASSPMPIPNSSPLASPVSSTVSVPLSSSLPISVPTTLPAPASAPLTIPISAPLTVSASGPALLTSVTPPLAPVVPAAPGPPSLAPSGASPSASALTLGLATAPSLSSSQTPGHPLLLAPTSSHVPGLNSTVAPACSPVLVPASALASPFPSAPNPAPAQASLLAPASSASQALATPLAPMAAPQTAILAPSPAPPLAPLPVLAPSPGAAPVLASSQTPVPVMAPSSTPGTSLASASPVPAPTPVLAPSSTQTMLPAPVPSPLPSPASTQTLALAPALAPTLGGSSPSQTLSLGTGNPQGPFPTQTLSLTPASSLVPTPAQTLSLAPGPPLGPTQTLSLAPAPPLAPASPVGPAPAHTLTLAPASSSASLLAPASVQTLTLSPAPVPTLGPAAAQTLALAPASTQSPASQASSLVVSASGAAPLPVTMVSRLPVSKDEPDTLTLRSGPPSPPSTATSFGGPRPRRQPPPPPRSPFYLDSLEEKRKRQRSERLERIFQLSEAHGALAPVYGTEVLDFCTLPQPVASPIGPRSPGPSHPTFWTYTEAAHRAVLFPQQRLDQLSEIIERFIFVMPPVEAPPPSLHACHPPPWLAPRQAAFQEQLASELWPRARPLHRIVCNMRTQFPDLRLIQYDCGKLQTLAVLLRQLKAEGHRVLIFTQMTRMLDVLEQFLTYHGHLYLRLDGSTRVEQRQALMERFNADKRIFCFILSTRSGGVGVNLTGADTVVFYDSDWNPTMDAQAQDRCHRIGQTRDVHIYRLISERTVEENILKKANQKRMLGDMAIEGGNFTTAYFKQQTIRELFDMPLEEPSSSSVPSAPEEEEETVASKQTHILEQALCRAEDEEDIRAATQAKAEQVAELAEFNENDGFPAGEGEEAGRPGAEDEEMSRAEQEIAALVEQLTPIERYAMKFLEASLEEVSREELKQAEEQVEAARKDLDQAKEEVFRLPQEEEEGPGAGDESSCGTGGGTHRRSKKAKAPERPGTRVSERLRGARAETQGANHTPVISAHQTRSTTTPPRCSPARERVPRPAPRPRPTPASAPAAIPALVPVPVSAPVPISAPNPITILPVHILPSPPPPSQIPPCSSPACTPPPACTPPPAHTPPPAQTCLVTPSSPLLLGPPSVPISASVTNLPLGLRPEAELCAQALASPESLELASVASSETSSLSLVPPKDLLPVAVEILPVSEKNLSLTPSAPSLTLEAGSIPNGQEQEAPDSAEGTTLTVLPEGEELPLCVSESNGLELPPSAASDEPLQEPLEADRTSEELTEAKTPTSSPEKPQELVTAEVAAPSTSSSATSSPEGPSPARPPRRRTSADVEIRGQGTGRPGQPPGPKVLRKLPGRLVTVVEEKELVRRRRQQRGAASTLVPGVSETSASPGSPSVRSMSGPESSPPIGGPCEAAPSSSLPTPPQQPFIARRHIELGVTGGGSPENGDGALLAITPPAVKRRRGRPPKKNRSPADAGRGVDEAPSSTLKGKTNGADPVPGPETLIVADPVLEPQLIPGPQPLGPQPVHRPNPLLSPVEKRRRGRPPKARDLPIPGTISSAGDGNSESRTQPPPHPSPLTPLPPLLVCPTATVANTVTTVTISTSPPKRKRGRPPKNPPSPRPSQLPVLDRDSTSVLESCGLGRRRQPQGQGESEGSSSDEDGSRPLTRLARLRLEAEGMRGRKSGGSMVVAVIQDDLDLADSGPGGLELTPPVVSLTPKLRSTRLRPGSLVPPLETEKLPRKRAGAPVGGSPGLAKRGRLQPPSPLGPEGSVEESEAEASGEEEEGDGTPRRRPGPRRLVGTTNQGDQRILRSSAPPSLAGPAVSHRGRKAKT

SEQ ID NO: 63857 - protein, 3072 aa, Homo sapiens
MQSSPSPAHPQLPVLQTQMVSDGMTGSNPVSPASSSSPASSGAGGISPQHIAQDSSLDGPPGPPDGATVPLEGFSLSQAADLANKGPKWEKSHAEIAEQAKHEAEIETRIAELRKEGFWSLKRLPKVPEPPRPKGHWDYLCEEMQWLSADFAQERRWKRGVARKVVRMVIRHHEEQRQKEERARREEQAKLRRIASTMAKDVRQFWSNVEKVVQFKQQSRLEEKRKKALDLHLDFIVGQTEKYSDLLSQSLNQPLTSSKAGSSPCLGSSSAASSPPPPASRLDDEDGDFQPQEDEEEDDEETIEVEEQQEGNDAEAQRREIELLRREGELPLEELLRSLPPQLLEGPSSPSQTPSSHDSDTRDGPEEGAEEEPPQVLEIKPPPSAVTQRNKQPWHPDEDDEEFTANEEEAEDEEDTIAAEEQLEGEVDHAMELSELAREGELSMEELLQQYAGAYAPGSGSSEDEDEDEVDANSSDCEPEGPVEAEEPPQEDSSSQSDSVEDRSEDEEDEHSEEEETSGSSASEESESEESEDAQSQSQADEEEEDDDFGVEYLLARDEEQSEADAGSGPPTPGPTTLGPKKEITDIAAAAESLQPKGYTLATTQVKTPIPLLLRGQLREYQHIGLDWLVTMYEKKLNGILADEMGLGKTIQTISLLAHLACEKGNWGPHLIIVPTSVMLNWEMELKRWCPSFKILTYYGAQKERKLKRQGWTKPNAFHVCITSYKLVLQDHQAFRRKNWRYLILDEAQNIKNFKSQRWQSLLNFNSQRRLLLTGTPLQNSLMELWSLMHFLMPHVFQSHREFKEWFSNPLTGMIEGSQEYNEGLVKRLHKVLRPFLLRRVKVDVEKQMPKKYEHVIRCRLSKRQRCLYDDFMAQTTTKETLATGHFMSVINILMQLRKVCNHPNLFDPRPVTSPFITPGICFSTASLVLRATDVHPLQRIDMGRFDLIGLEGRVSRYEADTFLPRHRLSRRVLLEVATAPDPPPRPKPVKMKVNRMLQPVPKQEGRTVVVVNNPRAPLGPVPVRPPPGPELSAQPTPGPVPQVLPASLMVSASPAGPPLIPASRPPGPVLLPPLQPNSGSLPQAGEVVSIGQLASLAQRPVANAGGSKPLTFQIQGNKLTLTGAQVRQLAVGQPRPLQMPPTMVNNTGVVKIVVRQAPRDGLTPVPPLAPAPRPPSSGLPAVLNPRPTLTPGRLPTPTLGTARAPMPTPTLVRPLLKLVHSPSPEVSASAPGAAPLTISSPLHVPSSLPGPASSPMPIPNSSPLASPVSSTVSVPLSSSLPISVPTTLPAPASAPLTIPISAPLTVSASGPALLTSVTPPLAPVVPAAPGPPSLAPSGASPSASALTLGLATAPSLSSSQTPGHPLLLAPTSSHVPGLNSTVAPACSPVLVPASALASPFPSAPNPAPAQASLLAPASSASQALATPLAPMAAPQTAILAPSPAPPLAPLPVLAPSPGAAPVLASSQTPVPVMAPSSTPGTSLASASPVPAPTPVLAPSSTQTMLPAPVPSPLPSPASTQTLALAPALAPTLGGSSPSQTLSLGTGNPQGPFPTQTLSLTPASSLVPTPAQTLSLAPGPPLGPTQTLSLAPAPPLAPASPVGPAPAHTLTLAPASSSASLLAPASVQTLTLSPAPVPTLGPAAAQTLALAPASTQSPASQASSLVVSASGAAPLPVTMVSRLPVSKDEPDTLTLRSGPPSPPSTATSFGGPRPRRQPPPPPRSPFYLDSLEEKRKRQRSERLERIFQLSEAHGALAPVYGTEVLDFCTLPQPVASPIGPRSPGPSHPTFWTYTEAAHRAVLFPQQRLDQLSEIIERFIFVMPPVEAPPPSLHACHPPPWLAPRQAAFQEQLASELWPRARPLHRIVCNMRTQFPDLRLIQYDCGKLQTLAVLLRQLKAEGHRVLIFTQMTRMLDVLEQFLTYHGHLYLRLDGSTRVEQRQALMERFNADKRIFCFILSTRSGGVGVNLTGADTVVFYDSDWNPTMDAQAQDRCHRIGQTRDVHIYRLISERTVEENILKKANQKRMLGDMAIEGGNFTTAYFKQQTIRELFDMPLEEPSSSSVPSAPEEEEETVASKQTHILEQALCRAEDEEDIRAATQAKAEQVAELAEFNENDGFPAGEGEEAGRPGAEDEEMSRAEQEIAALVEQLTPIERYAMKFLEASLEEVSREELKQAEEQVEAARKDLDQAKEEVFRLPQEEEEGPGAGDESSCGTGGGTHRRSKKAKAPERPGTRVSERLRGARAETQGANHTPVISAHQTRSTTTPPRCSPARERVPRPAPRPRPTPASAPAAIPALVPVPVSAPVPISAPNPITILPVHILPSPPPPSQIPPCSSPACTPPPACTPPPAHTPPPAQTCLVTPSSPLLLGPPSVPISASVTNLPLGLRPEAELCAQALASPESLELASVASSETSSLSLVPPKDLLPVAVEILPVSEKNLSLTPSAPSLTLEAGSIPNGQEQEAPDSAEGTTLTVLPEGEELPLCVSESNGLELPPSAASDEPLQEPLEADRTSEELTEAKTPTSSPEKPQELVTAEVAAPSTSSSATSSPEGPSPARPPRRRTSADVEIRGQGTGRPGQPPGPKVLRKLPGRLVTVVEEKELVRRRRQQRGAASTLVPGVSETSASPGSPSVRSMSGPESSPPIGGPCEAAPSSSLPTPPQQPFIARRHIELGVTGGGSPENGDGALLAITPPAVKRRRGRPPKKNRSPADAGRGVDEAPSSTLKGKTNGADPVPGPETLIVADPVLEPQLIPGPQPLGPQPVHRPNPLLSPVEKRRRGRPPKARDLPIPGTISSAGDGNSESRTQPPPHPSPLTPLPPLLVCPTATVANTVTTVTISTSPPKRKRGRPPKNPPSPRPSQLPVLDRDSTSVLESCGLGRRRQPQGQGESEGSSSDEDGSRPLTRLARLRLEAEGMRGRKSGGSMVVAVIQDDLDLADSGPGGLELTPPVVSLTPKLRSTRLRPGSLVPPLETEKLPRKRAGAPVGGSPGLAKRGRLQPPSPLGPEGSVEESEAEASGEEEEGDGTPRRRPGPRRLVGTTNQGDQRILRSSAPPSLAGPAVSHRGRKAKT

SEQ ID NO: 63858 - protein, 3168 aa, Homo sapiens
MQSSPSPAHPQLPVLQTQMVSDGMTGSNPVSPASSSSPASSGAGGISPQHIAQDSSLDGPPGPPDGATVPLEGFSLSQAADLANKGPKWEKSHAEIAEQAKHEAEIETRIAELRKEGFWSLKRLPKVPEPPRPKGHWDYLCEEMQWLSADFAQERRWKRGVARKVVRMVIRHHEEQRQKEERARREEQAKLRRIASTMAKDVRQFWSNVEKVVQFKQQSRLEEKRKKALDLHLDFIVGQTEKYSDLLSQSLNQPLTSSKAGSSPCLGSSSAASSPPPPASRLDDEDGDFQPQEDEEEDDEETIEVEEQQEGNDAEAQRREIELLRREGELPLEELLRSLPPQLLEGPSSPSQTPSSHDSDTRDGPEEGAEEEPPQVLEIKPPPSAVTQRNKQPWHPDEDDEEFTANEEEAEDEEDTIAAEEQLEGEVDHAMELSELAREGELSMEELLQQYAGAYAPGSGSSEDEDEDEVDANSSDCEPEGPVEAEEPPQEDSSSQSDSVEDRSEDEEDEHSEEEETSGSSASEESESEESEDAQSQSQADEEEEDDDFGVEYLLARDEEQSEADAGSGPPTPGPTTLGPKKEITDIAAAAESLQPKGYTLATTQVKTPIPLLLRGQLREYQHIGLDWLVTMYEKKLNGILADEMGLGKTIQTISLLAHLACEKGNWGPHLIIVPTSVMLNWEMELKRWCPSFKILTYYGAQKERKLKRQGWTKPNAFHVCITSYKLVLQDHQAFRRKNWRYLILDEAQNIKNFKSQRWQSLLNFNSQRRLLLTGTPLQNSLMELWSLMHFLMPHVFQSHREFKEWFSNPLTGMIEGSQEYNEGLVKRLHKVLRPFLLRRVKVDVEKQMPKKYEHVIRCRLSKRQRCLYDDFMAQTTTKETLATGHFMSVINILMQLRKVCNHPNLFDPRPVTSPFITPGICFSTASLVLRATDVHPLQRIDMGRFDLIGLEGRVSRYEADTFLPRHRLSRRVLLEVATAPDPPPRPKPVKMKVNRMLQPVPKQEGRTVVVVNNPRAPLGPVPVRPPPGPELSAQPTPGPVPQVLPASLMVSASPAGPPLIPASRPPGPVLLPPLQPNSGSLPQVLPSPLGVLSGTSRPPTPTLSLKPTPPAPVRLSPAPPPGSSSLLKPLTVPPGYTFPPAAATTTSTTTATATTTAVPAPTPAPQRLILSPDMQARLPSGEVVSIGQLASLAQRPVANAGGSKPLTFQIQGNKLTLTGAQVRQLAVGQPRPLQMPPTMVNNTGVVKIVVRQAPRDGLTPVPPLAPAPRPPSSGLPAVLNPRPTLTPGRLPTPTLGTARAPMPTPTLVRPLLKLVHSPSPEVSASAPGAAPLTISSPLHVPSSLPGPASSPMPIPNSSPLASPVSSTVSVPLSSSLPISVPTTLPAPASAPLTIPISAPLTVSASGPALLTSVTPPLAPVVPAAPGPPSLAPSGASPSASALTLGLATAPSLSSSQTPGHPLLLAPTSSHVPGLNSTVAPACSPVLVPASALASPFPSAPNPAPAQASLLAPASSASQALATPLAPMAAPQTAILAPSPAPPLAPLPVLAPSPGAAPVLASSQTPVPVMAPSSTPGTSLASASPVPAPTPVLAPSSTQTMLPAPVPSPLPSPASTQTLALAPALAPTLGGSSPSQTLSLGTGNPQGPFPTQTLSLTPASSLVPTPAQTLSLAPGPPLGPTQTLSLAPAPPLAPASPVGPAPAHTLTLAPASSSASLLAPASVQTLTLSPAPVPTLGPAAAQTLALAPASTQSPASQASSLVVSASGAAPLPVTMVSRLPVSKDEPDTLTLRSGPPSPPSTATSFGGPRPRRQPPPPPRSPFYLDSLEEKRKRQRSERLERIFQLSEAHGALAPVYGTEVLDFCTLPQPVASPIGPRSPGPSHPTFWTYTEAAHRAVLFPQQRLDQLSEIIERFIFVMPPVEAPPPSLHACHPPPWLAPRQAAFQEQLASELWPRARPLHRIVCNMRTQFPDLRLIQYDCGKLQTLAVLLRQLKAEGHRVLIFTQMTRMLDVLEQFLTYHGHLYLRLDGSTRVEQRQALMERFNADKRIFCFILSTRSGGVGVNLTGADTVVFYDSDWNPTMDAQAQDRCHRIGQTRDVHIYRLISERTVEENILKKANQKRMLGDMAIEGGNFTTAYFKQQTIRELFDMPLEEPSSSSVPSAPEEEEETVASKQTHILEQALCRAEDEEDIRAATQAKAEQVAELAEFNENDGFPAGEGEEAGRPGAEDEEMSRAEQEIAALVEQLTPIERYAMKFLEASLEEVSREELKQAEEQVEAARKDLDQAKEEVFRLPQEEEEGPGAGDESSCGTGGGTHRRSKKAKAPERPGTRVSERLRGARAETQGANHTPVISAHQTRSTTTPPRCSPARERVPRPAPRPRPTPASAPAAIPALVPVPVSAPVPISAPNPITILPVHILPSPPPPSQIPPCSSPACTPPPACTPPPAHTPPPAQTCLVTPSSPLLLGPPSVPISASVTNLPLGLRPEAELCAQALASPESLELASVASSETSSLSLVPPKDLLPVAVEILPVSEKNLSLTPSAPSLTLEAGSIPNGQEQEAPDSAEGTTLTVLPEGEELPLCVSESNGLELPPSAASDEPLQEPLEADRTSEELTEAKTPTSSPEKPQELVTAEVAAPSTSSSATSSPEGPSPARPPRRRTSADVEIRGQGTGRPGQPPGPKVLRKLPGRLVTVVEEKELVRRRRQQRGAASTLVPGVSETSASPGSPSVRSMSGPESSPPIGGPCEAAPSSSLPTPPQQPFIARRHIELGVTGGGSPENGDGALLAITPPAVKRRRGRPPKKNRSPADAGRGVDEAPSSTLKGKTNGADPVPGPETLIVADPVLEPQLIPGPQPLGPQPVHRPNPLLSPVEKRRRGRPPKARDLPIPGTISSAGDGNSESRTQPPPHPSPLTPLPPLLVCPTATVANTVTTVTISTSPPKRKRGRPPKNPPSPRPSQLPVLDRDSTSVLESCGLGRRRQPQGQGESEGSSSDEDGSRPLTRLARLRLEAEGMRGRKSGGSMVVAVIQDDLDLADSGPGGLELTPPVVSLTPKLRSTRLRPGSLVPPLETEKLPRKRAGAPVGGSPGLAKRGRLQPPSPLGPEGSVEESEAEASGEEEEGDGTPRRRPGPRRLVGTTNQGDQRILRSSAPPSLAGPAVSHRGRKAKT

SEQ ID NO: 63859 - protein, 59 aa, Homo sapiens
MQSSPSPAHPQLPVLQTQMVSDGMTGSNPVSPASSSSPASSGAGGISPQHIAQDSSLDG

SEQ ID NO: 63860 - protein, 257 aa, Homo sapiens
MHRRGVGAGAIAKKKLAEAKYKERGTVLAEDQLAQMSKQLDMFKTNLEEFASKHKQEIRKNPEFRVQFQDMCATIGVDPLASGKGFWSEMLGVGDFYYELGVQIIEVCLALKHRNGGLITLEELHQQVLKGRGKFAQDVSQDDLIRAIKKLKALGTGFGIIPVGGTYLIQSVPAELNMDHTVVLQLAENGYVTVSEIKASLKWETERARQVLEHLLKEGLAWLDLQAPGEAHYWLPALFTDLYSQEITAEEAREALP

SEQ ID NO: 63861 - protein, 258 aa, Homo sapiens
MHRRGVGAGAIAKKKLAEAKYKERGTVLAEDQLAQMSKQLDMFKTNLEEFASKHKQEIRKNPEFRVQFQDMCATIGVDPLASGKGFWSEMLGVGDFYYELGVQIIEVCLALKHRNGGLITLEELHQQVLKGRGKFAQDVSQDDLIRAIKKLKALGTGFGIIPVGGTYLIQSVPAELNMDHTVVLQLAEKNGYVTVSEIKASLKWETERARQVLEHLLKEGLAWLDLQAPGEAHYWLPALFTDLYSQEITAEEAREALP

SEQ ID NO: 63862 - protein, 536 aa, Homo sapiens
MSSSLGKEKDSKEKDPKVPSAKEREKEAKASGGFGKESKEKEPKTKGKDAKDGKKDSSAAQPGVAFSVDNTIKRPNPAPGTRKKSSNAEVIKELNKCREENSMRLDLSKRSIHILPSSIKELTQLTELYLYSNKLQSLPAEVGCLVNLMTLALSENSLTSLPDSLDNLKKLRMLDLRHNKLREIPSVVYRLDSLTTLYLRFNRITTVEKDIKNLSKLSMLSIRENKIKQLPAEIGNLSSLSRLGLRYNRLSAIPRSLAKCSALEELNLENNNISTLPESLLSSLVKLNSLTLARNCFQLYPVGGPSQFSTIYSLNMEHNRINKIPFGIFSRAKVLSKLNMKDNQLTSLPLDFGTWTSMVELNLATNQLTKIPEDVSGLVSLEVLILSNNLLKKLPHGLGNLRKLRELDLEENKLESLPNEIAYLKDLQKLVLTNNQLTTLPRGIGHLTNLTHLGLGENLLTHLPEEIGTLENLEELYLNDNPNLHSLPFELALCSKLSIMSIENCPLSHLPPQIVAGGPSFIIQFLKMQGPYRAMV

SEQ ID NO: 63863 - protein, 582 aa, Homo sapiens
MSSSLGKEKDSKEKDPKVPSAKEREKEAKASGGFGKESKEKEPKTKGKDAKDGKKDSSAAQPGVAFSVDNTIKRPNPAPGTRKKSSNAEVIKELNKCREENSMRLDLSKRSIHILPSSIKELTQLTELYLYSNKLQSLPAEVGCLVNLMTLALSENSLTSLPDSLDNLKKLRMLDLRHNKLREIPSVVYRLDSLTTLYLRFNRITTVEKDIKNLSKLSMLSIRENKIKQLPAEIGELCNLITLDVAHNQLEHLPKEIGNCTQITNLDLQHNELLDLPDTIGNLSSLSRLGLRYNRLSAIPRSLAKCSALEELNLENNNISTLPESLLSSLVKLNSLTLARNCFQLYPVGGPSQFSTIYSLNMEHNRINKIPFGIFSRAKVLSKLNMKDNQLTSLPLDFGTWTSMVELNLATNQLTKIPEDVSGLVSLEVLILSNNLLKKLPHGLGNLRKLRELDLEENKLESLPNEIAYLKDLQKLVLTNNQLTTLPRGIGHLTNLTHLGLGENLLTHLPEEIGTLENLEELYLNDNPNLHSLPFELALCSKLSIMSIENCPLSHLPPQIVAGGPSFIIQFLKMQGPYRAMV

SEQ ID NO: 63864 - protein, 372 aa, Homo sapiens
LDNLKKLRMLDLRHNKLREIPSVVYRLDSLTTLYLRFNRITTVEKDIKNLSKLSMLSIRENKIKQLPAEIGNLSSLSRLGLRYNRLSAIPRSLAKCSALEELNLENNNISTLPESLLSSLVKLNSLTLARNCFQLYPVGGPSQFSTIYSLNMEHNRINKIPFGIFSRAKVLSKLNMKDNQLTSLPLDFGTWTSMVELNLATNQLTKIPEDVSGLVSLEVLILSNNLLKKLPHGLGNLRKLRELDLEENKLESLPNEIAYLKDLQKLVLTNNQLTTLPRGIGHLTNLTHLGLGENLLTHLPEEIGTLENLEELYLNDNPNLHSLPFELALCSKLSIMSIENCPLSHLPPQIVAGGPSFIIQFLKMQGPYRAMV

SEQ ID NO: 63865 - protein, 195 aa, Homo sapiens
MLRDGRFACAICPHRPVLDTLAMLTAHRAGKKHLSSLQLFYGKKQPGKERKQNPKHQNELRREETKAEAPLLTQTRLITQSALHRAPHYNSCCRRKYRPEAPGPSVSLSPMPPSEVKLQSGKISREPEPAAGPQAEESATVSAPAPMSPTRRRALDHYLTLRSSGWIPDGRGRWVKDENVEFDSDEEEPPDLPLD

SEQ ID NO: 63866 - protein, 230 aa, Homo sapiens
MSFKREGDDWSQLNVLKKRRVGDLLASYIPEDEALMLRDGRFACAICPHRPVLDTLAMLTAHRAGKKHLSSLQLFYGKKQPGKERKQNPKHQNELRREETKAEAPLLTQTRLITQSALHRAPHYNSCCRRKYRPEAPGPSVSLSPMPPSEVKLQSGKISREPEPAAGPQAEESATVSAPAPMSPTRRRALDHYLTLRSSGWIPDGRGRWVKDENVEFDSDEEEPPDLPLD

SEQ ID NO: 63867 - protein, 669 aa, Homo sapiens
MEGNKLEEQDSSPPQSTPGLMKGNKREEQGLGPEPAAPQQPTAEEEALIEFHRSYRELFEFFCNNTTIHGAIRLVCSQHNRMKTAFWAVLWLCTFGMMYWQFGLLFGEYFSYPVSLNINLNSDKLVFPAVTICTLNPYRYPEIKEELEELDRITEQTLFDLYKYSSFTTLVAGSRSRRDLRGTLPHPLQRLRVPPPPHGARRARSVASSLRDNNPQVDWKDWKIGFQLCNQNKSDCFYQTYSSGVDAVREWYRFHYINILSRLPETLPSLEEDTLGNFIFACRFNQVSCNQANYSHFHHPMYGNCYTFNDKNNSNLWMSSMPGINNGLSLMLRAEQNDFIPLLSTVTGARVMVHGQDEPAFMDDGGFNLRPGVETSISMRKETLDRLGGDYGDCTKNGSDVPVENLYPSKYTQQVCIHSCFQESMIKECGCAYIFYPRPQNVEYCDYRKHSSWGYCYYKLQVDFSSDHLGCFTKCRKPCSVTSYQLSAGYSRWPSVTSQEWVFQMLSRQNNYTVNNKRNGVAKVNIFFKELNYKTNSESPSVTMVTLLSNLGSQWSLWFGSSVLSVVEMAELVFDLLVIMFLMLLRRFRSRYWSPGRGGRGAQEVASTLASSPPSHFCPHPMSLSLSQPGPAPSPALTAPPPAYATLGPRPSPGGSAGASSSTCPLGGP

SEQ ID NO: 63868 - protein, 691 aa, Homo sapiens
MEGNKLEEQDSSPPQSTPGLMKGNKREEQGLGPEPAAPQQPTAEEEALIEFHRSYRELFEFFCNNTTIHGAIRLVCSQHNRMKTAFWAVLWLCTFGMMYWQFGLLFGEYFSYPVSLNINLNSDKLVFPAVTICTLNPYRYPEIKEELEELDRITEQTLFDLYKYSSFTTLVAGSRSRRDLRGTLPHPLQRLRVPPPPHGARRARSVASSLRDNNPQVDWKDWKIGFQLCNQNKSDCFYQTYSSGVDAVREWYRFHYINILSRLPETLPSLEEDTLGNFIFACRFNQVSCNQANYSHFHHPMYGNCYTFNDKNNSNLWMSSMPGINNGLSLMLRAEQNDFIPLLSTVTGARVMVHGQDEPAFMDDGGFNLRPGVETSISMRKETLDRLGGDYGDCTKNGSDVPVENLYPSKYTQQVCIHSCFQESMIKECGCAYIFYPRPQNVEYCDYRKHSSWGQVRSLTPVIPALWEAEAGRSRGYCYYKLQVDFSSDHLGCFTKCRKPCSVTSYQLSAGYSRWPSVTSQEWVFQMLSRQNNYTVNNKRNGVAKVNIFFKELNYKTNSESPSVTMVTLLSNLGSQWSLWFGSSVLSVVEMAELVFDLLVIMFLMLLRRFRSRYWSPGRGGRGAQEVASTLASSPPSHFCPHPMSLSLSQPGPAPSPALTAPPPAYATLGPRPSPGGSAGASSSTCPLGGP

SEQ ID NO: 63869 - protein, 685 aa, Homo sapiens
MLLHINPAYLFKLLHGFPPWIMPTDGNLGDKNFQMGKPGHREGATMHVKKYLLKGLHRLQKGPGYTYKELLVWYCDNTNTHGPKRIICEGPKKKAMWFLLTLLFAALVCWQWGIFIRTYLSWEVSVSLSVGFKTMDFPAVTICNASPFKYSKIKHLLKDLDELMEAVLERILAPELSHANATRNLNFSIWNHTPLVLIDERNPHHPMVLDLFGDNHNGLTSSSASEKICNAHGCKMAMRLCSLNRTQCTFRNFTSATQALTEWYILQATNIFAQVPQQELVEMSYPGEQMILACLFGAEPCNYRNFTSIFYPHYGNCYIFNWGMTEKALPSANPGTEFGLKLILDIGQEDYVPFLASTAGVRLMLHEQRSYPFIRDEGIYAMSGTETSIGVLVDKLQRMGEPYSPCTVNGSEVPVQNFYSDYNTTYSIQACLRSCFQDHMIRNCNCGHYLYPLPRGEKYCNNRDFPDWAHCYSDLQMSVAQRETCIGMCKESCNDTQYKMTISMADWPSEASEDWIFHVLSQERDQSTNITLSRKGIVKLNIYFQEFNYRTIEESAANNIVWLLSNLGGQFGFWMGGSVLCLIEFGEIIIDFVWITIIKLVALAKSLRQRRAQASYAGPPPTVAELVEAHTNFGFQPDTAPRSPNTGPYPSEQALPIPGTPPPNYDSLRLQPLDVIESDSEGDAI

SEQ ID NO: 63870 - protein, 640 aa, Homo sapiens
MHVKKYLLKGLHRLQKGPGYTYKELLVWYCDNTNTHGPKRIICEGPKKKAMWFLLTLLFAALVCWQWGIFIRTYLSWEVSVSLSVGFKTMDFPAVTICNASPFKYSKIKHLLKDLDELMEAVLERILAPELSHANATRNLNFSIWNHTPLVLIDERNPHHPMVLDLFGDNHNGLTSSSASEKICNAHGCKMAMRLCSLNRTQCTFRNFTSATQALTEWYILQATNIFAQVPQQELVEMSYPGEQMILACLFGAEPCNYRNFTSIFYPHYGNCYIFNWGMTEKALPSANPGTEFGLKLILDIGQEDYVPFLASTAGVRLMLHEQRSYPFIRDEGIYAMSGTETSIGVLVDKLQRMGEPYSPCTVNGSEVPVQNFYSDYNTTYSIQACLRSCFQDHMIRNCNCGHYLYPLPRGEKYCNNRDFPDWAHCYSDLQMSVAQRETCIGMCKESCNDTQYKMTISMADWPSEASEDWIFHVLSQERDQSTNITLSRKGIVKLNIYFQEFNYRTIEESAANNIVWLLSNLGGQFGFWMGGSVLCLIEFGEIIIDFVWITIIKLVALAKSLRQRRAQASYAGPPPTVAELVEAHTNFGFQPDTAPRSPNTGPYPSEQALPIPGTPPPNYDSLRLQPLDVIESDSEGDAI

SEQ ID NO: 63871 - protein, 704 aa, Homo sapiens
MAFLSRTSPVAAASFQSRQEARGSILLQSCQLPPQWLSTEAWTGEWKQPHGGALTSRSPGPVAPQRPCHLKGWQHRPTQHNAACKQGQAAAQTPPRPGPPSAPPPPPKEGHQEGLVELPASFRELLTFFCTNATIHGAIRLVCSRGNRLKTTSWGLLSLGALVALCWQLGLLFERHWHRPVLMAVSVHSERKLLPLVTLCDGNPRRPSPVLRHLELLDEFARENIDSLYNVNLSKGRAALSATVPRHEPPFHLDREIRLQRLSHSGSRVRVGFRLCNSTGGDCFYRGYTSGVAAVQDWYHFHYVDILALLPAAWEDSHGSQDGHFVLSCSYDGLDCQARQFRTFHHPTYGSCYTVDGVWTAQRPGITHGVGLVLRVEQQPHLPLLSTLAGIRVMVHGRNHTPFLGHHSFSVRPGTEATISIREDEVHRLGSPYGHCTAGGEGVEVELLHNTSYTRQACLVSCFQQLMVETCSCGYYLHPLPAGAEYCSSARHPAWGHCFYRLYQDLETHRLPCTSRCPRPCRESAFKLSTGTSRWPSAKSAGWTLATLGEQGLPHQSHRQRSSLAKINIVYQELNYRSVEEAPVYSVPQLLSAMGSLCSLWFGASVLSLLELLELLLDASALTLVLGGRRLRRAWFSWPRASPASGASSIKPEASQMPPPAGGTSDDPEPSGPHLPRVMLPGVLAGVSAEESWAGPQPLETLDT

SEQ ID NO: 63872 - protein, 638 aa, Homo sapiens
MAEHRSMDGRMEAATRGGSHLQAAAQTPPRPGPPSAPPPPPKEGHQEGLVELPASFRELLTFFCTNATIHGAIRLVCSRGNRLKTTSWGLLSLGALVALCWQLGLLFERHWHRPVLMAVSVHSERKLLPLVTLCDGNPRRPSPVLRHLELLDEFARENIDSLYNVNLSKGRAALSATVPRHEPPFHLDREIRLQRLSHSGSRVRVGFRLCNSTGGDCFYRGYTSGVAAVQDWYHFHYVDILALLPAAWEDSHGSQDGHFVLSCSYDGLDCQARQFRTFHHPTYGSCYTVDGVWTAQRPGITHGVGLVLRVEQQPHLPLLSTLAGIRVMVHGRNHTPFLGHHSFSVRPGTEATISIREDEVHRLGSPYGHCTAGGEGVEVELLHNTSYTRQACLVSCFQQLMVETCSCGYYLHPLPAGAEYCSSARHPAWGHCFYRLYQDLETHRLPCTSRCPRPCRESAFKLSTGTSRWPSAKSAGWTLATLGEQGLPHQSHRQRSSLAKINIVYQELNYRSVEEAPVYSVPQLLSAMGSLCSLWFGASVLSLLELLELLLDASALTLVLGGRRLRRAWFSWPRASPASGASSIKPEASQMPPPAGGTSDDPEPSGPHLPRVMLPGVLAGVSAEESWAGPQPLETLDT

SEQ ID NO: 63873 - protein, 308 aa, Homo sapiens
  VARIANT 1: note = MOD_RES - Any amino acid
XATARAATAFTEATRQAWRLSRTGTTSTMWISWPCCPRHGRTATGARTATSSSPAVTMAWTARPDSSGPSTTPPTAAATRSMASGQLSAPASPTVGASPWPVRGQGCRSGGLTPALGLPGVGLVLRVEQQPHLPLLSTLAGIRVMVHGRNHTPFLGHHSFSVRPGTEATISIREDEVHRLGSPYGHCTAGGEGVEVELLHNTSYTRQACLVSCFQQLMVETCSCGYYLHPLPAGAEYCSSARHPAWGHCFYRLYQDLETHRLPCTSRCPRPCRESAFKLSTGTSRWPSAKSAGWTLATLGEQGLPHQS

SEQ ID NO: 63874 - protein, 669 aa, Homo sapiens
MAEHRSMDGRMEAATRGGSHLQIAWACGSPEALPPEGMAAQTHSAQRCLQTGPGCSPDAPQPGPPSAPPPPPKEGHQEGLVELPASFRELLTFFCTNATIHGAIRLVCSRGNRLKTTSWGLLSLGALVALCWQLGLLFERHWHRPVLMAVSVHSERKLLPLVTLCDGNPRRPSPVLRHLELLDEFARENIDSLYNVNLSKGRAALSATVPRHEPPFHLDREIRLQRLSHSGSRVRVGFRLCNSTGGDCFYRGYTSGVAAVQDWYHFHYVDILALLPAAWEDSHGSQDGHFVLSCSYDGLDCQARQFRTFHHPTYGSCYTVDGVWTAQRPGITHGVGLVLRVEQQPHLPLLSTLAGIRVMVHGRNHTPFLGHHSFSVRPGTEATISIREDEVHRLGSPYGHCTAGGEGVEVELLHNTSYTRQACLVSCFQQLMVETCSCGYYLHPLPAGAEYCSSARHPAWGHCFYRLYQDLETHRLPCTSRCPRPCRESAFKLSTGTSRWPSAKSAGWTLATLGEQGLPHQSHRQRSSLAKINIVYQELNYRSVEEAPVYSVPQLLSAMGSLCSLWFGASVLSLLELLELLLDASALTLVLGGRRLRRAWFSWPRASPASGASSIKPEASQMPPPAGGTSDDPEPSGPHLPRVMLPGVLAGVSAEESWAGPQPLETLDT

SEQ ID NO: 63875 - protein, 802 aa, Homo sapiens
MRAVLSQKTTPLPRYLWPGHLSGPRRLTWSWCSDHRTPTCRELGSPHPTPCTGPARGWPRRGGGPCGFTSAGHVLCGYPLCLLSGPIQGCGTGLGDSSMAFLSRTSPVAAASFQSRQEARGSILLQSCQLPPQWLSTEAWTGEWKQPHGGALTSRSPGPVAPQRPCHLKGWQHRPTQHNAACKQGQAAAQTPPRPGPPSAPPPPPKEGHQEGLVELPASFRELLTFFCTNATIHGAIRLVCSRGNRLKTTSWGLLSLGALVALCWQLGLLFERHWHRPVLMAVSVHSERKLLPLVTLCDGNPRRPSPVLRHLELLDEFARENIDSLYNVNLSKGRAALSATVPRHEPPFHLDREIRLQRLSHSGSRVRVGFRLCNSTGGDCFYRGYTSGVAAVQDWYHFHYVDILALLPAAWEDSHGSQDGHFVLSCSYDGLDCQARQFRTFHHPTYGSCYTVDGVWTAQRPGITHGVGLVLRVEQQPHLPLLSTLAGIRVMVHGRNHTPFLGHHSFSVRPGTEATISIREDEVHRLGSPYGHCTAGGEGVEVELLHNTSYTRQACLVSCFQQLMVETCSCGYYLHPLPAGAEYCSSARHPAWGHCFYRLYQDLETHRLPCTSRCPRPCRESAFKLSTGTSRWPSAKSAGWTLATLGEQGLPHQSHRQRSSLAKINIVYQELNYRSVEEAPVYSVPQLLSAMGSLCSLWFGASVLSLLELLELLLDASALTLVLGGRRLRRAWFSWPRASPASGASSIKPEASQMPPPAGGTSDDPEPSGPHLPRVMLPGVLAGVSAEESWAGPQPLETLDT

SEQ ID NO: 63876 - protein, 638 aa, Homo sapiens; identical to SEQ ID NO: 63872

SEQ ID NO: 63877 - protein, 649 aa, Homo sapiens
MAPGEKIKAKIKKNLPVTGPQAPTIKELMRWYCLNTNTHGCRRIVVSRGRLRRLLWIGFTLTAVALILWQCALLVFSFYTVSVSIKVHFRKLDFPAVTICNINPYKYSTVRHLLADLEQETREALKSLYGFPESRKRREAESWNSVSEGKQPRFSHRIPLLIFDQDEKGKARDFFTGRKRKVGGSIIHKASNVMHIESKQVVGFQLCSNDTSDCATYTFSSGINAIQEWYKLHYMNIMAQVPLEKKINMSYSAEELLVTCFFDGVSCDARNFTLFHHPMHGNCYTFNNRENETILSTSMGGSEYGLQVILYINEEEYNPFLVSSTGAKVIIHRQDEYPFVEDVGTEIETAMVTSIGMHLTESFKLSEPYSQCTEDGSDVPIRNIYNAAYSLQICLHSCFQTKMVEKCGCAQYSQPLPPAANYCNYQQHPNWMYCYYQLHRAFVQEELGCQSVCKEACSFKEWTLTTSLAQWPSVVSEKWLLPVLTWDQGRQVNKKLNKTDLAKLLIFYKDLNQRSIMESPANSIEMLLSNFGGQLGLWMSCSVVCVIEIIEVFFIDFFSIIARRQWQKAKEWWAWKQAPPCPEAPRSPQGQDNPALDIDDDLPTFNSALHLPPALGTQVPGTPPPKYNTLRLERAFSNQLTDTQMLDEL

SEQ ID NO: 63878 - protein, 1980 aa, Homo sapiens
MAARLLAPPGPDSFKPFTPESLANIERRIAESKLKKPPKADGSHREDDEDSKPKPNSDLEAGKSLPFIYGDIPQGLVAVPLEDFDPYYLTQKTFVVLNRGKTLFRFSATPALYILSPFNLIRRIAIKILIHSVFSMIIMCTILTNCVFMTFSNPPDWSKNVEYTFTGIYTFESLVKIIARGFCIDGFTFLRDPWNWLDFSVIMMAYITEFVNLGNVSALRTFRVLRALKTISVIPGLKTIVGALIQSVKKLSDVMILTVFCLSVFALIGLQLFMGNLRNKCVVWPINFNESYLENGTKGFDWEEYINNKTNFYTVPGMLEPLLCGNSSDAGQCPEGYQCMKAGRNPNYGYTSFDTFSWAFLALFRLMTQDYWENLYQLTLRAAGKTYMIFFVLVIFVGSFYLVNLILAVVAMAYEEQNQATLEEAEQKEAEFKAMLEQLKKQQEEAQAAAMATSAGTVSEDAIEEEGEEGGGSPRSSSEISKLSSKSAKERRNRRKKRKQKELSEGEEKGDPEKVFKSESEDGMRRKAFRLPDNRIGRKFSIMNQSLLSIPGSPFLSRHNSKSSIFSFRGPGRFRDPGSENEFADDEHSTVEESEGRRDSLFIPIRARERRSSYSGYSGYSQGSRSSRIFPSLRRSVKRNSTVDCNGVVSLIGGPGSHIGGRLLPEATTEVEIKKKGPGSLLVSMDQLASYGRKDRINSIMSVVTNTLVEELEESQRKCPPCWYKFANTFLIWECHPYWIKLKEIVNLIVMDPFVDLAITICIVLNTLFMAMEHHPMTPQFEHVLAVGNLVFTGIFTAEMFLKLIAMDPYYYFQEGWNIFDGFIVSLSLMELSLADVEGLSVLRSFRLLRVFKLAKSWPTLNMLIKIIGNSVGALGNLTLVLAIIVFIFAVVGMQLFGKSYKECVCKINQDCELPRWHMHDFFHSFLIVFRVLCGEWIETMWDCMEVAGQAMCLIVFMMVMVIGNLVVLNLFLALLLSSFSADNLAATDDDGEMNNLQISVIRIKKGVAWTKLKVHAFMQAHFKQREADEVKPLDELYEKKANCIANHTGADIHRNGDFQKNGNGTTSGIGSSVEKYIIDEDHMSFINNPNLTVRVPIAVGESDFENLNTEDVSSESDPEGSKDKLDDTSSSEGSTIDIKPEVEEVPVEQPEEYLDPDACFTEGCVQRFKCCQVNIEEGLGKSWWILRKTCFLIVEHNWFETFIIFMILLSSGALAFEDIYIEQRKTIRTILEYADKVFTYIFILEMLLKWTAYGFVKFFTNAWCWLDFLIVAVSLVSLIANALGYSELGAIKSLRTLRALRPLRALSRFEGMRVVVNALVGAIPSIMNVLLVCLIFWLIFSIMGVNLFAGKYHYCFNETSEIRFEIEDVNNKTECEKLMEGNNTEIRWKNVKINFDNVGAGYLALLQVATFKGWMDIMYAAVDSRKPDEQPKYEDNIYMYIYFVIFIIFGSFFTLNLFIGVIIDNFNQQKKKFGGQDIFMTEEQKKYYNAMKKLGSKKPQKPIPRPLNKIQGIVFDFVTQQAFDIVIMMLICLNMVTMMVETDTQSKQMENILYWINLVFVIFFTCECVLKMFALRHYYFTIGWNIFDFVVVILSIVGMFLADIIEKYFVSPTLFRVIRLARIGRILRLIKGAKGIRTLLFALMMSLPALFNIGLLLFLVMFIFSIFGMSNFAYVKHEAGIDDMFNFETFGNSMICLFQITTSAGWDGLLLPILNRPPDCSLDKEHPGSGFKGDCGNPSVGIFFFVSYIIISFLIVVNMYIAIILENFSVATEESADPLSEDDFETFYEIWEKFDPDATQFIEYCKLADFADALEHPLRVPKPNTIELIAMDLPMVSGDRIHCLDILFAFTKRVLGDSGELDILRQQMEERFVASNPSKVSYEPITTTLRRKQEEVSAVVLQRAYRGHLARRGFICKKTTSNKLENGGTHREKKESTPSTASLPSYDSVTKPEKEKQQRAEEGRRERAKRQKEVRESKC

SEQ ID NO: 63879 - protein, 1557 aa, Homo sapiens
MAARLLAPPGPDSFKPFTPESLANIERRIAESKLKKPPKADGSHREDDEDSKPKPNSDLEAGKSLPFIYGDIPQGLVAVPLEDFDPYYLTQKTFVVLNRGKTLFRFSATPALYILSPFNLIRRIAIKILIHSVFSMIIMCTILTNCVFMTFSNPPDWSKNVEYTFTGIYTFESLVKIIARGFCIDGFTFLRDPWNWLDFSVIMMAYITEFVNLGNVSALRTFRVLRALKTISVIPGLKTIVGALIQSVKKLSDVMILTVFCLSVFALIGLQLFMGNLRNKCVVWPINFNESYLENGTKGFDWEEYINNKTNFYTVPGMLEPLLCGNSSDAGQCPEGYQCMKAGRNPNYGYTSFDTFSWAFLALFRLMTQDYWENLYQLTLRAAGKTYMIFFVLVIFVGSFYLVNLILAVVAMAYEEQNQATLEEAEQKEAEFKAMLEQLKKQQEEAQAAAMATSAGTVSEDAIEEEGEEGGGSPRSSSEISKLSSKSAKERRNRRKKRKQKELSEGEEKGDPEKVFKSESEDGMRRKAFRLPDNRIGRKFSIMNQSLLSIPGSPFLSRHNSKSSIFSFRGPGRFRDPGSENEFADDEHSTVEESEGRRDSLFIPIRARERRSSYSGYSGYSQGSRSSRIFPSLRRSVKRNSTVDCNGVVSLIGGPGSHIGGRLLPEATTEVEIKKKGPGSLLVSMDQLASYGRKDRINSIMSVVTNTLVEELEESQRKCPPCWYKFANTFLIWECHPYWIKLKEIVNLIVMDPFVDLAITICIVLNTLFMAMEHHPMTPQFEHVLAVGNLVFTGIFTAEMFLKLIAMDPYYYFQEGWNIFDGFIVSLSLMELSLADVEGLSVLRSFRLLRVFKLAKSWPTLNMLIKIIGNSVGALGNLTLVLAIIVFIFAVVGMQLFGKSYKECVCKINQDCELPRWHMHDFFHSFLIVFRVLCGEWIETMWDCMEVAGQAMCLIVFMMVMVIGNLVVLNLFLALLLSSFSADNLAATDDDGEMNNLQISVIRIKKGVAWTKLKVHAFMQAHFKQREADEVKPLDELYEKKANCIANHTGADIHRNGDFQKNGNGTTSGIGSSVEKYIIDEDHMSFINNPNLTVRVPIAVGESDFENLNTEDVSSESDPEGSKDKLDDTSSSEGSTIDIKPEVEEVPVEQPEEYLDPDACFTEGCVQRFKCCQVNIEEGLGKSWWILRKTCFLIVEHNWFETFIIFMILLSSGALAFEDIYIEQRKTIRTILEYADKVFTYIFILEMLLKWTAYGFVKFFTNAWCWLDFLIVAVVVNALVGAIPSIMNVLLVCLIFWLIFSIMGVNLFAGKYHYCFNETSEIRFEIEDVNNKTECEKLMEGNNTEIRWKNVKINFDNVGAGYLALLQVATFKGWMDIMYAAVDSRKPDEQPKYEDNIYMYIYFVIFIIFGSFFTLNLFIGVIIDNFNQQKKKFGGQDIFMTEEQKKYYNAMKKLGSKKPQKPIPRPLNKIQGIVFDFVTQQAFDIVIMMLICLNMVTMMVETDTQSKQMENILYWINLVFVIFFTCECVLKMFALRHYYFTIGWNIFDFVVVILSIV

SEQ ID NO: 63880 - protein, 1195 aa, Homo sapiens
FLSPQTFVVLNRGKTLFRFSATPALYILSPFNLIRRIAIKILIHSLFSMIIMCTILTNCVFMTFSNPPDWSKNVEYTFTGIYTFESLVKIIARGFCIDGFTFLRDPWNWLDFSVIMMAYITEFVNLGNVSALRTFRVLRALKTISVIPGLKTIVGALIQSVKKLSDVMILTVFCLSVFALIGLQLFMGNLRNKCVVWPINFNESYLENGTKGFDWEEYINNKTNFYTVPGMLEPLLCGNSSDAGQCPEGYQCMKAGRNPNYGYTSFDTFSWAFLALFRLMTQDYWENLYQLTLRAAGKTYMIFFVLVIFVGSFYLVNLILAVVAMAYEEQNQATLEEAEQKEAEFKAMLEQLKKQQEEAQAAAMATSAGTVSEDAIEEEGEEGGGSPRSSSEISKLSSKSAKERRNRRKKRKQKELSEGEEKGDPEKVFKSESEDGMRRKAFRLPDNRIGRKFSIMNQSLLSIPGSPFLSRHNSKSSIFSFRGPGRFRDPGSENEFADDEHSTVEESEGRRDSLFIPIRARERRSSYSGYSGYSQGSRSSRIFPSLRRSVKRNSTVDCNGVVSLIGGPGSHIGGRLLPEATTEVEIKKKGPGSLLVSMDQLASYGRKDRINSIMSVVTNTLVEELEESQRKCPPCWYKFANTFLIWECHPYWIKLKEIVNLIVMDPFVDLAITICIVLNTLFMAMEHHPMTPQFEHVLAVGNLVFTGIFTAEMFLKLIAMDPYYYFQEGWNIFDGFIVSLSLMELSLADVEGLSVLRSFRLLRVFKLAKSWPTLNMLIKIIGNSVGALGNLTLVLAIIVFIFAVVGMQLFGKSYKECVCKINQDCELPRWHMHDFFHSFLIVFRVLCGEWIETMWDCMEVAGQAMCLIVFMMVMVIGNLVVLNLFLALLLSSFSADNLAATDDDGEMNNLQISVIRIKKGVAWTKLKVHAFMQAHFKQREADEVKPLDELYEKKANCIANHTGADIHRNGDFQKNGNGTTSGIGSSVEKYIIDEDHMSFINNPNLTVRVPIAVGESDFENLNTEDVSSESDPEGSKDKLDDTSSSEGSTIDIKPEVEEVPVEQPEEYLDPDACFTEGCVQRFKCCQVNIEEGLGKSWWILRKTCFLIVEHNWFETFIIFMILLSSGALAFEDIYIEQRKTIRTILEYADKVFTYIFILEMLLKWTAYGFVKFFTNAWCWLDFLIVAVPLNLSGLI

SEQ ID NO: 63881 - protein, 1939 aa, Homo sapiens
MAARLLAPPGPDSFKPFTPESLANIERRIAESKLKKPPKADGSHREDDEDSKPKPNSDLEAGKSLPFIYGDIPQGLVAVPLEDFDPYYLTQKTFVVLNRGKTLFRFSATPALYILSPFNLIRRIAIKILIHSVFSMIIMCTILTNCVFMTFSNPPDWSKNVEYTFTGIYTFESLVKIIARGFCIDGFTFLRDPWNWLDFSVIMMAYITEFVNLGNVSALRTFRVLRALKTISVIPGLKTIVGALIQSVKKLSDVMILTVFCLSVFALIGLQLFMGNLRNKCVVWPINFNESYLENGTKGFDWEEYINNKTNFYTVPGMLEPLLCGNSSDAGQCPEGYQCMKAGRNPNYGYTSFDTFSWAFLALFRLMTQDYWENLYQLTLRAAGKTYMIFFVLVIFVGSFYLVNLILAVVAMAYEEQNQATLEEAEQKEAEFKAMLEQLKKQQEEAQAAAMATSAGTVSEDAIEEEGEEGGGSPRSSSEISKLSSKSAKERRNRRKKRKQKELSEGEEKGDPEKVFKSESEDGMRRKAFRLPDNRIGRKFSIMNQSLLSIPGSPFLSRHNSKSSIFSFRGPGRFRDPGSENEFADDEHSTVEESEGRRDSLFIPIRARERRSSYSGYSGYSQGSRSSRIFPSLRRSVKRNSTVDCNGVVSLIGGPGSHIGGRLLPEATTEVEIKKKGPGSLLVSMDQLASYGRKDRINSIMSVVTNTLVEELEESQRKCPPCWYKFANTFLIWECHPYWIKLKEIVNLIVMDPFVDLAITICIVLNTLFMAMEHHPMTPQFEHVLAVGNLVFTGIFTAEMFLKLIAMDPYYYFQEGWNIFDGFIVSLSLMELSLADVEGLSVLRSFRLLRVFKLAKSWPTLNMLIKIIGNSVGALGNLTLVLAIIVFIFAVVGMQLFGKSYKECVCKINQDCELPRWHMHDFFHSFLIVFRVLCGEWIETMWDCMEVAGQAMCLIVFMMVMVIGNLVVLNLFLALLLSSFSADNLAATDDDGEMNNLQISVIRIKKGVAWTKLKVHAFMQAHFKQREADEVKPLDELYEKKANCIANHTGADIHRNGDFQKNGNGTTSGIGSSVEKYIIDEDHMSFINNPNLTVRVPIAVGESDFENLNTEDVSSESDPEGSKDKLDDTSSSEGSTIDIKPEVEEVPVEQPEEYLDPDACFTEGCVQRFKCCQVNIEEGLGKSWWILRKTCFLIVEHNWFETFIIFMILLSSGALAFEDIYIEQRKTIRTILEYADKVFTYIFILEMLLKWTAYGFVKFFTNAWCWLDFLIVAVVVNALVGAIPSIMNVLLVCLIFWLIFSIMGVNLFAGKYHYCFNETSEIRFEIEDVNNKTECEKLMEGNNTEIRWKNVKINFDNVGAGYLALLQVATFKGWMDIMYAAVDSRKPDEQPKYEDNIYMYIYFVIFIIFGSFFTLNLFIGVIIDNFNQQKKKFGGQDIFMTEEQKKYYNAMKKLGSKKPQKPIPRPLNKIQGIVFDFVTQQAFDIVIMMLICLNMVTMMVETDTQSKQMENILYWINLVFVIFFTCECVLKMFALRHYYFTIGWNIFDFVVVILSIVGMFLADIIEKYFVSPTLFRVIRLARIGRILRLIKGAKGIRTLLFALMMSLPALFNIGLLLFLVMFIFSIFGMSNFAYVKHEAGIDDMFNFETFGNSMICLFQITTSAGWDGLLLPILNRPPDCSLDKEHPGSGFKGDCGNPSVGIFFFVSYIIISFLIVVNMYIAIILENFSVATEESADPLSEDDFETFYEIWEKFDPDATQFIEYCKLADFADALEHPLRVPKPNTIELIAMDLPMVSGDRIHCLDILFAFTKRVLGDSGELDILRQQMEERFVASNPSKVSYEPITTTLRRKQEEVSAVVLQRAYRGHLARRGFICKKTTSNKLENGGTHREKKESTPSTASLPSYDSVTKPEKEKQQRAEEGRRERAKRQKEVRESKC

SEQ ID NO: 63882 - protein, 972 aa, Homo sapiens
MAARLLAPPGPDSFKPFTPESLANIERRIAESKLKKPPKADGSHREDDEDSKPKPNSDLEAGKSLPFIYGDIPQGLVAVPLEDFDPYYLTQKTFVVLNRGKTLFRFSATPALYILSPFNLIRRIAIKILIHSVFSMIIMCTILTNCVFMTFSNPPDWSKNVEYTFTGIYTFESLVKIIARGFCIDGFTFLRDPWNWLDFSVIMMAYVTEFVDLGNVSALRTFRVLRALKTISVIPGLKTIVGALIQSVKKLSDVMILTVFCLSVFALIGLQLFMGNLRNKCVVWPINFNESYLENGTKGFDWEEYINNKTNFYTVPGMLEPLLCGNSSDAGQCPEGYQCMKAGRNPNYGYTSFDTFSWAFLALFRLMTQDYWENLYQLTLRAAGKTYMIFFVLVIFVGSFYLVNLILAVVAMAYEEQNQATLEEAEQKEAEFKAMLEQLKKQQEEAQAAAMATSAGTVSEDAIEEEGEEGGGSPRSSSEISKLSSKSAKERRNRRKKRKQKELSEGEEKGDPEKVFKSESEDGMRRKAFRLPDNRIGRKFSIMNQSLLSIPGSPFLSRHNSKSSIFSFRGPGRFRDPGSENEFADDEHSTVEESEGRRDSLFIPIRARERRSSYSGYSGYSQGSRSSRIFPSLRRSVKRNSTVDCNGVVSLIGGPGSHIGGRLLPEATTEVEIKKKGPGSLLVSMDQLASYGRKDRINSIMSVVTNTLVEELEESQRKCPPCWYKFANTFLIWECHPYWIKLKEIVNLIVMDPFVDLAITICIVLNTLFMAMEHHPMTPQFEHVLAVGNLVFTGIFTAEMFLKLIAMDPYYYFQEGWNIFDGFIVSLSLMELSLADVEGLSVLRSFRLLRVFKLAKSWPTLNMLIKIIGNSVGALGNLTLVLAIIVFIFAVVGMQLFGKSYKECVCKINQDCELPRWHMHDFFHSFLIVFRVLCGEWIETMWDCMEVAGQAMCLIVFMMVMVIGNLVVSTNL

SEQ ID NO: 63883 - protein, 2009 aa, Homo sapiens
MEQTVLVPPGPDSFNFFTRESLAAIERRIAEEKAKNPKPDKKDDDENGPKPNSDLEAGKNLPFIYGDIPPEMVSEPLEDLDPYYINKKTFIVLNKGKAIFRFSATSALYILTPFNPLRKIAIKILVHSLFSMLIMCTILTNCVFMTMSNPPDWTKNVEYTFTGIYTFESLIKIIARGFCLEDFTFLRDPWNWLDFTVITFAYVTEFVDLGNVSALRTFRVLRALKTISVIPGLKTIVGALIQSVKKLSDVMILTVFCLSVFALIGLQLFMGNLRNKCIQWPPTNASLEEHSIEKNITVNYNGTLINETVFEFDWKSYIQDSRYHYFLEGFLDALLCGNSSDAGQCPEGYMCVKAGRNPNYGYTSFDTFSWAFLSLFRLMTQDFWENLYQLTLRAAGKTYMIFFVLVIFLGSFYLINLILAVVAMAYEEQNQATLEEAEQKEAEFQQMIEQLKKQQEAAQQAATATASEHSREPSAAGRLSDSSSEASKLSSKSAKERRNRRKKRKQKEQSGGEEKDEDEFQKSESEDSIRRKGFRFSIEGNRLTYEKRYSSPHQSLLSIRGSLFSPRRNSRTSLFSFRGRAKDVGSENDFADDEHSTFEDNESRRDSLFVPRRHGERRNSNLSQTSRSSRMLAVFPANGKMHSTVDCNGVVSLVGGPSVPTSPVGQLLPEVIIDKPATDDNGTTTETEMRKRRSSSFHVSMDFLEDPSQRQRAMSIASILTNTVEELEESRQKCPPCWYKFSNIFLIWDCSPYWLKVKHVVNLVVMDPFVDLAITICIVLNTLFMAMEHYPMTDHFNNVLTVGNLVFTGIFTAEMFLKIIAMDPYYYFQEGWNIFDGFIVTLSLVELGLANVEGLSVLRSFRLLRVFKLAKSWPTLNMLIKIIGNSVGALGNLTLVLAIIVFIFAVVGMQLFGKSYKDCVCKIASDCQLPRWHMNDFFHSFLIVFRVLCGEWIETMWDCMEVAGQAMCLTVFMMVMVIGNLVVLNLFLALLLSSFSADNLAATDDDNEMNNLQIAVDRMHKGVAYVKRKIYEFIQQSFIRKQKILDEIKPLDDLNNKKDSCMSNHTAEIGKDLDYLKDVNGTTSGIGTGSSVEKYIIDESDYMSFINNPSLTVTVPIAVGESDFENLNTEDFSSESDLEESKEKLNESSSSSEGSTVDIGAPVEEQPVVEPEETLEPEACFTEGCVQRFKCCQINVEEGRGKQWWNLRRTCFRIVEHNWFETFIVFMILLSSGALAFEDIYIDQRKTIKTMLEYADKVFTYIFILEMLLKWVAYGYQTYFTNAWCWLDFLIVDVSLVSLTANALGYSELGAIKSLRTLRALRPLRALSRFEGMRVVVNALLGAIPSIMNVLLVCLIFWLIFSIMGVNLFAGKFYHCINTTTGDRFDIEDVNNHTDCLKLIERNETARWKNVKVNFDNVGFGYLSLLQVATFKGWMDIMYAAVDSRNVELQPKYEESLYMYLYFVIFIIFGSFFTLNLFIGVIIDNFNQQKKKFGGQDIFMTEEQKKYYNAMKKLGSKKPQKPIPRPGNKFQGMVFDFVTRQVFDISIMILICLNMVTMMVETDDQSEYVTTILSRINLVFIVLFTGECVLKLISLRHYYFTIGWNIFDFVVVILSIVGMFLAELIEKYFVSPTLFRVIRLARIGRILRLIKGAKGIRTLLFALMMSLPALFNIGLLLFLVMFIYAIFGMSNFAYVKREVGIDDMFNFETFGNSMICLFQITTSAGWDGLLAPILNSKPPDCDPNKVNPGSSVKGDCGNPSVGIFFFVSYIIISFLVVVNMYIAVILENFSVATEESAEPLSEDDFEMFYEVWEKFDPDATQFMEFEKLSQFAAALEPPLNLPQPNKLQLIAMDLPMVSGDRIHCLDILFAFTKRVLGESGEMDALRIQMEERFMASNPSKVSYQPITTTLKRKQEEVSAVIIQRAYRRHLLKRTVKQASFTYNKNKIKGGANLLIKEDMIIDRINENSITEKTDLTMSTAACPPSYDRVTKPIVEKHEQEGKDEKAKGK

SEQ ID NO: 63884 - protein, 1998 aa, Homo sapiens
MEQTVLVPPGPDSFNFFTRESLAAIERRIAEEKAKNPKPDKKDDDENGPKPNSDLEAGKNLPFIYGDIPPEMVSEPLEDLDPYYINKKTFIVLNKGKAIFRFSATSALYILTPFNPLRKIAIKILVHSLFSMLIMCTILTNCVFMTMSNPPDWTKNVEYTFTGIYTFESLIKIIARGFCLEDFTFLRDPWNWLDFTVITFAYVTEFVDLGNVSALRTFRVLRALKTISVIPGLKTIVGALIQSVKKLSDVMILTVFCLSVFALIGLQLFMGNLRNKCIQWPPTNASLEEHSIEKNITVNYNGTLINETVFEFDWKSYIQDSRYHYFLEGFLDALLCGNSSDAGQCPEGYMCVKAGRNPNYGYTSFDTFSWAFLSLFRLMTQDFWENLYQLTLRAAGKTYMIFFVLVIFLGSFYLINLILAVVAMAYEEQNQATLEEAEQKEAEFQQMIEQLKKQQEAAQQAATATASEHSREPSAAGRLSDSSSEASKLSSKSAKERRNRRKKRKQKEQSGGEEKDEDEFQKSESEDSIRRKGFRFSIEGNRLTYEKRYSSPHQSLLSIRGSLFSPRRNSRTSLFSFRGRAKDVGSENDFADDEHSTFEDNESRRDSLFVPRRHGERRNSNLSQTSRSSRMLAVFPANGKMHSTVDCNGVVSLVGGPSVPTSPVGQLLPEGTTTETEMRKRRSSSFHVSMDFLEDPSQRQRAMSIASILTNTVEELEESRQKCPPCWYKFSNIFLIWDCSPYWLKVKHVVNLVVMDPFVDLAITICIVLNTLFMAMEHYPMTDHFNNVLTVGNLVFTGIFTAEMFLKIIAMDPYYYFQEGWNIFDGFIVTLSLVELGLANVEGLSVLRSFRLLRVFKLAKSWPTLNMLIKIIGNSVGALGNLTLVLAIIVFIFAVVGMQLFGKSYKDCVCKIASDCQLPRWHMNDFFHSFLIVFRVLCGEWIETMWDCMEVAGQAMCLTVFMMVMVIGNLVVLNLFLALLLSSFSADNLAATDDDNEMNNLQIAVDRMHKGVAYVKRKIYEFIQQSFIRKQKILDEIKPLDDLNNKKDSCMSNHTAEIGKDLDYLKDVNGTTSGIGTGSSVEKYIIDESDYMSFINNPSLTVTVPIAVGESDFENLNTEDFSSESDLEESKEKLNESSSSSEGSTVDIGAPVEEQPVVEPEETLEPEACFTEGCVQRFKCCQINVEEGRGKQWWNLRRTCFRIVEHNWFETFIVFMILLSSGALAFEDIYIDQRKTIKTMLEYADKVFTYIFILEMLLKWVAYGYQTYFTNAWCWLDFLIVDVSLVSLTANALGYSELGAIKSLRTLRALRPLRALSRFEGMRVVVNALLGAIPSIMNVLLVCLIFWLIFSIMGVNLFAGKFYHCINTTTGDRFDIEDVNNHTDCLKLIERNETARWKNVKVNFDNVGFGYLSLLQVATFKGWMDIMYAAVDSRNVELQPKYEESLYMYLYFVIFIIFGSFFTLNLFIGVIIDNFNQQKKKFGGQDIFMTEEQKKYYNAMKKLGSKKPQKPIPRPGNKFQGMVFDFVTRQVFDISIMILICLNMVTMMVETDDQSEYVTTILSRINLVFIVLFTGECVLKLISLRHYYFTIGWNIFDFVVVILSIVGMFLAELIEKYFVSPTLFRVIRLARIGRILRLIKGAKGIRTLLFALMMSLPALFNIGLLLFLVMFIYAIFGMSNFAYVKREVGIDDMFNFETFGNSMICLFQITTSAGWDGLLAPILNSKPPDCDPNKVNPGSSVKGDCGNPSVGIFFFVSYIIISFLVVVNMYIAVILENFSVATEESAEPLSEDDFEMFYEVWEKFDPDATQFMEFEKLSQFAAALEPPLNLPQPNKLQLIAMDLPMVSGDRIHCLDILFAFTKRVLGESGEMDALRIQMEERFMASNPSKVSYQPITTTLKRKQEEVSAVIIQRAYRRHLLKRTVKQASFTYNKNKIKGGANLLIKEDMIIDRINENSITEKTDLTMSTAACPPSYDRVTKPIVEKHEQEGKDEKAKGK

SEQ ID NO: 63885 - protein, 1981 aa, Homo sapiens
MEQTVLVPPGPDSFNFFTRESLAAIERRIAEEKAKNPKPDKKDDDENGPKPNSDLEAGKNLPFIYGDIPPEMVSEPLEDLDPYYINKKTFIVLNKGKAIFRFSATSALYILTPFNPLRKIAIKILVHSLFSMLIMCTILTNCVFMTMSNPPDWTKNVEYTFTGIYTFESLIKIIARGFCLEDFTFLRDPWNWLDFTVITFAYVTEFVDLGNVSALRTFRVLRALKTISVIPGLKTIVGALIQSVKKLSDVMILTVFCLSVFALIGLQLFMGNLRNKCIQWPPTNASLEEHSIEKNITVNYNGTLINETVFEFDWKSYIQDSRYHYFLEGFLDALLCGNSSDAGQCPEGYMCVKAGRNPNYGYTSFDTFSWAFLSLFRLMTQDFWENLYQLTLRAAGKTYMIFFVLVIFLGSFYLINLILAVVAMAYEEQNQATLEEAEQKEAEFQQMIEQLKKQQEAAQQAATATASEHSREPSAAGRLSDSSSEASKLSSKSAKERRNRRKKRKQKEQSGGEEKDEDEFQKSESEDSIRRKGFRFSIEGNRLTYEKRYSSPHQSLLSIRGSLFSPRRNSRTSLFSFRGRAKDVGSENDFADDEHSTFEDNESRRDSLFVPRRHGERRNSNLSQTSRSSRMLAVFPANGKMHSTVDCNGVVSLGTTTETEMRKRRSSSFHVSMDFLEDPSQRQRAMSIASILTNTVEELEESRQKCPPCWYKFSNIFLIWDCSPYWLKVKHVVNLVVMDPFVDLAITICIVLNTLFMAMEHYPMTDHFNNVLTVGNLVFTGIFTAEMFLKIIAMDPYYYFQEGWNIFDGFIVTLSLVELGLANVEGLSVLRSFRLLRVFKLAKSWPTLNMLIKIIGNSVGALGNLTLVLAIIVFIFAVVGMQLFGKSYKDCVCKIASDCQLPRWHMNDFFHSFLIVFRVLCGEWIETMWDCMEVAGQAMCLTVFMMVMVIGNLVVLNLFLALLLSSFSADNLAATDDDNEMNNLQIAVDRMHKGVAYVKRKIYEFIQQSFIRKQKILDEIKPLDDLNNKKDSCMSNHTAEIGKDLDYLKDVNGTTSGIGTGSSVEKYIIDESDYMSFINNPSLTVTVPIAVGESDFENLNTEDFSSESDLEESKEKLNESSSSSEGSTVDIGAPVEEQPVVEPEETLEPEACFTEGCVQRFKCCQINVEEGRGKQWWNLRRTCFRIVEHNWFETFIVFMILLSSGALAFEDIYIDQRKTIKTMLEYADKVFTYIFILEMLLKWVAYGYQTYFTNAWCWLDFLIVDVSLVSLTANALGYSELGAIKSLRTLRALRPLRALSRFEGMRVVVNALLGAIPSIMNVLLVCLIFWLIFSIMGVNLFAGKFYHCINTTTGDRFDIEDVNNHTDCLKLIERNETARWKNVKVNFDNVGFGYLSLLQVATFKGWMDIMYAAVDSRNVELQPKYEESLYMYLYFVIFIIFGSFFTLNLFIGVIIDNFNQQKKKFGGQDIFMTEEQKKYYNAMKKLGSKKPQKPIPRPGNKFQGMVFDFVTRQVFDISIMILICLNMVTMMVETDDQSEYVTTILSRINLVFIVLFTGECVLKLISLRHYYFTIGWNIFDFVVVILSIVGMFLAELIEKYFVSPTLFRVIRLARIGRILRLIKGAKGIRTLLFALMMSLPALFNIGLLLFLVMFIYAIFGMSNFAYVKREVGIDDMFNFETFGNSMICLFQITTSAGWDGLLAPILNSKPPDCDPNKVNPGSSVKGDCGNPSVGIFFFVSYIIISFLVVVNMYIAVILENFSVATEESAEPLSEDDFEMFYEVWEKFDPDATQFMEFEKLSQFAAALEPPLNLPQPNKLQLIAMDLPMVSGDRIHCLDILFAFTKRVLGESGEMDALRIQMEERFMASNPSKVSYQPITTTLKRKQEEVSAVIIQRAYRRHLLKRTVKQASFTYNKNKIKGGANLLIKEDMIIDRINENSITEKTDLTMSTAACPPSYDRVTKPIVEKHEQEGKDEKAKGK

SEQ ID NO: 63886 - protein, 2009 aa, Homo sapiens; identical to SEQ ID NO: 63883

SEQ ID NO: 63887 - protein, 218 aa, Homo sapiens
MGRLLALVVGAALVSSACGGCVEVDSETEAVYGMTFKILCISCKRRSETNAETFTEWTFRQKGTEEFVKILRYENEVLQLEEDERFEGRVVWNGSRGTKDLQDLSIFITNVTYNHSGDYECHVYRLLFFENYEHNTSVVKKIHIEVVDKANRDMASIVSEIMMYVLIVVLTIWLVAEMIYCYKKIAAATETAAQENASEYLAITSESKENCTGVQVAE

SEQ ID NO: 63888 - protein, 268 aa, Homo sapiens
MGRLLALVVGAALVSSACGGCVEVDSETEAVYGMTFKILCISCKRRSETNAETFTEWTFRQKGTEEFVKILRYENEVLQLEEDERFEGRVVWNGSRGTKDLQDLSIFITNVTYNHSGDYECHVYRLLFFENYEHNTSVVKKIHIEVVDKGESGAACPFTVTHRRARWRDRWQAVDRTGWLCAWPANRPQQRAEGEGSSPSCPLQLWPLFLSSPRRGQSMPVPHRRSGYRTQLCHLCCMTSGRCLLSLSQRVVLGLPGIIIRCVSRGVV

SEQ ID NO: 63889 - protein, 2005 aa, Homo sapiens
MAQSVLVPPGPDSFRFFTRESLAAIEQRIAEEKAKRPKQERKDEDDENGPKPNSDLEAGKSLPFIYGDIPPEMVSVPLEDLDPYYINKKTFIVLNKGKAISRFSATPALYILTPFNPIRKLAIKILVHSLFNMLIMCTILTNCVFMTMSNPPDWTKNVEYTFTGIYTFESLIKILARGFCLEDFTFLRDPWNWLDFTVITFAYVTEFVDLGNVSALRTFRVLRALKTISVIPGLKTIVGALIQSVKKLSDVMILTVFCLSVFALIGLQLFMGNLRNKCLQWPPDNSSFEINITSFFNNSLDGNGTTFNRTVSIFNWDEYIEDKSHFYFLEGQNDALLCGNSSDAGQCPEGYICVKAGRNPNYGYTSFDTFSWAFLSLFRLMTQDFWENLYQLTLRAAGKTYMIFFVLVIFLGSFYLINLILAVVAMAYEEQNQATLEEAEQKEAEFQQMLEQLKKQQEEAQAAAAAASAESRDFSGAGGIGVFSESSSVASKLSSKSEKELKNRRKKKKQKEQSGEEEKNDRVRKSESEDSIRRKGFRFSLEGSRLTYEKRFSSPHQSLLSIRGSLFSPRRNSRASLFSFRGRAKDIGSENDFADDEHSTFEDNDSRRDSLFVPHRHGERRHSNVSQASRASRVLPILPMNGKMHSAVDCNGVVSLVGGPSTLTSAGQLLPEGTTTETEIRKRRSSSYHVSMDLLEDPTSRQRAMSIASILTNTMEELEESRQKCPPCWYKFANMCLIWDCCKPWLKVKHLVNLVVMDPFVDLAITICIVLNTLFMAMEHYPMTEQFSSVLSVGNLVFTGIFTAEMFLKIIAMDPYYYFQEGWNIFDGFIVSLSLMELGLANVEGLSVLRSFRLLRVFKLAKSWPTLNMLIKIIGNSVGALGNLTLVLAIIVFIFAVVGMQLFGKSYKECVCKISNDCELPRWHMHDFFHSFLIVFRVLCGEWIETMWDCMEVAGQTMCLTVFMMVMVIGNLVVLNLFLALLLSSFSSDNLAATDDDNEMNNLQIAVGRMQKGIDFVKRKIREFIQKAFVRKQKALDEIKPLEDLNNKKDSCISNHTTIEIGKDLNYLKDGNGTTSGIGSSVEKYVVDESDYMSFINNPSLTVTVPIAVGESDFENLNTEEFSSESDMEESKEKLNATSSSEGSTVDIGAPAEGEQPEVEPEESLEPEACFTEDCVRKFKCCQISIEEGKGKLWWNLRKTCYKIVEHNWFETFIVFMILLSSGALAFEDIYIEQRKTIKTMLEYADKVFTYIFILEMLLKWVAYGFQVYFTNAWCWLDFLIVDVSLVSLTANALGYSELGAIKSLRTLRALRPLRALSRFEGMRVVVNALLGAIPSIMNVLLVCLIFWLIFSIMGVNLFAGKFYHCINYTTGEMFDVSVVNNYSECKALIESNQTARWKNVKVNFDNVGLGYLSLLQVATFKGWMDIMYAAVDSRNVELQPKYEDNLYMYLYFVIFIIFGSFFTLNLFIGVIIDNFNQQKKKFGGQDIFMTEEQKKYYNAMKKLGSKKPQKPIPRPANKFQGMVFDFVTKQVFDISIMILICLNMVTMMVETDDQSQEMTNILYWINLVFIVLFTGECVLKLISLRYYYFTIGWNIFDFVVVILSIVGMFLAELIEKYFVSPTLFRVIRLARIGRILRLIKGAKGIRTLLFALMMSLPALFNIGLLLFLVMFIYAIFGMSNFAYVKREVGIDDMFNFETFGNSMICLFQITTSAGWDGLLAPILNSGPPDCDPDKDHPGSSVKGDCGNPSVGIFFFVSYIIISFLVVVNMYIAVILENFSVATEESAEPLSEDDFEMFYEVWEKFDPDATQFIEFAKLSDFADALDPPLLIAKPNKVQLIAMDLPMVSGDRIHCLDILFAFTKRVLGESGEMDALRIQMEERFMASNPSKVSYEPITTTLKRKQEEVSAIIIQRAYRRYLLKQKVKKVSSIYKKDKGKECDGTPIKEDTLIDKLNENSTPEKTDMTPSTTSPPSYDSVTKPEKEKFEKDKSEKEDKGKDIRESKK

SEQ ID NO: 63890 - protein, 2005 aa, Homo sapiens
MAQSVLVPPGPDSFRFFTRESLAAIEQRIAEEKAKRPKQERKDEDDENGPKPNSDLEAGKSLPFIYGDIPPEMVSVPLEDLDPYYINKKTFIVLNKGKAISRFSATPALYILTPFNPIRKLAIKILVHSLFNMLIMCTILTNCVFMTMSNPPDWTKNVEYTFTGIYTFESLIKILARGFCLEDFTFLRDPWNWLDFTVITFAYVTEFVNLGNVSALRTFRVLRALKTISVIPGLKTIVGALIQSVKKLSDVMILTVFCLSVFALIGLQLFMGNLRNKCLQWPPDNSSFEINITSFFNNSLDGNGTTFNRTVSIFNWDEYIEDKSHFYFLEGQNDALLCGNSSDAGQCPEGYICVKAGRNPNYGYTSFDTFSWAFLSLFRLMTQDFWENLYQLTLRAAGKTYMIFFVLVIFLGSFYLINLILAVVAMAYEEQNQATLEEAEQKEAEFQQMLEQLKKQQEEAQAAAAAASAESRDFSGAGGIGVFSESSSVASKLSSKSEKELKNRRKKKKQKEQSGEEEKNDRVRKSESEDSIRRKGFRFSLEGSRLTYEKRFSSPHQSLLSIRGSLFSPRRNSRASLFSFRGRAKDIGSENDFADDEHSTFEDNDSRRDSLFVPHRHGERRHSNVSQASRASRVLPILPMNGKMHSAVDCNGVVSLVGGPSTLTSAGQLLPEGTTTETEIRKRRSSSYHVSMDLLEDPTSRQRAMSIASILTNTMEELEESRQKCPPCWYKFANMCLIWDCCKPWLKVKHLVNLVVMDPFVDLAITICIVLNTLFMAMEHYPMTEQFSSVLSVGNLVFTGIFTAEMFLKIIAMDPYYYFQEGWNIFDGFIVSLSLMELGLANVEGLSVLRSFRLLRVFKLAKSWPTLNMLIKIIGNSVGALGNLTLVLAIIVFIFAVVGMQLFGKSYKECVCKISNDCELPRWHMHDFFHSFLIVFRVLCGEWIETMWDCMEVAGQTMCLTVFMMVMVIGNLVVLNLFLALLLSSFSSDNLAATDDDNEMNNLQIAVGRMQKGIDFVKRKIREFIQKAFVRKQKALDEIKPLEDLNNKKDSCISNHTTIEIGKDLNYLKDGNGTTSGIGSSVEKYVVDESDYMSFINNPSLTVTVPIAVGESDFENLNTEEFSSESDMEESKEKLNATSSSEGSTVDIGAPAEGEQPEVEPEESLEPEACFTEDCVRKFKCCQISIEEGKGKLWWNLRKTCYKIVEHNWFETFIVFMILLSSGALAFEDIYIEQRKTIKTMLEYADKVFTYIFILEMLLKWVAYGFQVYFTNAWCWLDFLIVDVSLVSLTANALGYSELGAIKSLRTLRALRPLRALSRFEGMRVVVNALLGAIPSIMNVLLVCLIFWLIFSIMGVNLFAGKFYHCINYTTGEMFDVSVVNNYSECKALIESNQTARWKNVKVNFDNVGLGYLSLLQVATFKGWMDIMYAAVDSRNVELQPKYEDNLYMYLYFVIFIIFGSFFTLNLFIGVIIDNFNQQKKKFGGQDIFMTEEQKKYYNAMKKLGSKKPQKPIPRPANKFQGMVFDFVTKQVFDISIMILICLNMVTMMVETDDQSQEMTNILYWINLVFIVLFTGECVLKLISLRYYYFTIGWNIFDFVVVILSIVGMFLAELIEKYFVSPTLFRVIRLARIGRILRLIKGAKGIRTLLFALMMSLPALFNIGLLLFLVMFIYAIFGMSNFAYVKREVGIDDMFNFETFGNSMICLFQITTSAGWDGLLAPILNSGPPDCDPDKDHPGSSVKGDCGNPSVGIFFFVSYIIISFLVVVNMYIAVILENFSVATEESAEPLSEDDFEMFYEVWEKFDPDATQFIEFAKLSDFADALDPPLLIAKPNKVQLIAMDLPMVSGDRIHCLDILFAFTKRVLGESGEMDALRIQMEERFMASNPSKVSYEPITTTLKRKQEEVSAIIIQRAYRRYLLKQKVKKVSSIYKKDKGKECDGTPIKEDTLIDKLNENSTPEKTDMTPSTTSPPSYDSVTKPEKEKFEKDKSEKEDKGKDIRESKK

SEQ ID NO: 63891 - protein, 2005 aa, Homo sapiens; identical to SEQ ID NO: 63890

SEQ ID NO: 63892 - protein, 2005 aa, Homo sapiens; identical to SEQ ID NO: 63889

SEQ ID NO: 63893 - protein, 503 aa, Homo sapiens
MAQSVLVPPGPDSFRFFTRESLAAIEQRIAEEKAKRPKQERKDEDDENGPKPNSDLEAGKSLPFIYGDIPPEMVSVPLEDLDPYYINKKTFIVLNKGKAISRFSATPALYILTPFNPIRKLAIKILVHSLFNMLIMCTILTNCVFMTMSNPPDWTKNVEYTFTGIYTFESLIKILARGFCLEDFTFLRDPWNWLDFTVITFAYVTEFVDLGNVSALRTFRVLRALKTISVIPGLKTIVGALIQSVKKLSDVMILTVFCLSVFALIGLQLFMGNLRNKCLQWPPDNSSFEINITSFFNNSLDGNGTTFNRTVSIFNWDEYIEDKSHFYFLEGQNDALLCGNSSDAGQCPEGYICVKAGRNPNYGYTSFDTFSWAFLSLFRLMTQDFWENLYQLTLRAAGKTYMIFFVLVIFLGSFYLINLILAVVAMAYEEQNQATLEEAEQKEAEFQQMLEQLKKQQEEAQAAAAAASAESRDFSGAGGIGVFSESSSVASKLSSKSEKELKN

SEQ ID NO: 63894 - protein, 215 aa, Homo sapiens
MHRDAWLPRPAFSLTGLSLFFSLVPPGRSMEVTVPATLNVLNGSDARLPCTFNSCYTVNHKQFSLNWTYQECNNCSEEMFLQFRMKIINLKLERFQDRVEFSGNPSKYDVSVMLRNVQPEDEGIYNCYIMNPPDRHRGHGKIHLQVLMEEPPERDSTVAVIVGASVGGFLAVVILVLMVVKCVRRKKEQKLSTDDLKTEEEGKTDGEGNPDDGAK

SEQ ID NO: 63895 - protein, 2000 aa, Homo sapiens
MAQALLVPPGPESFRLFTRESLAAIEKRAAEEKAKKPKKEQDNDDENKPKPNSDLEAGKNLPFIYGDIPPEMVSEPLEDLDPYYINKKTFIVMNKGKAIFRFSATSALYILTPLNPVRKIAIKILVHSLFSMLIMCTILTNCVFMTLSNPPDWTKNVEYTFTGIYTFESLIKILARGFCLEDFTFLRDPWNWLDFSVIVMAYVTEFVDLGNVSALRTFRVLRALKTISVIPGLKTIVGALIQSVKKLSDVMILTVFCLSVFALIGLQLFMGNLRNKCLQWPPSDSAFETNTTSYFNGTMDSNGTFVNVTMSTFNWKDYIGDDSHFYVLDGQKDPLLCGNGSDAGQCPEGYICVKAGRNPNYGYTSFDTFSWAFLSLFRLMTQDYWENLYQLTLRAAGKTYMIFFVLVIFLGSFYLVNLILAVVAMAYEEQNQATLEEAEQKEAEFQQMLEQLKKQQEEAQAVAAASAASRDFSGIGGLGELLESSSEASKLSSKSAKEWRNRRKKRRQREHLEGNNKGERDSFPKSESEDSVKRSSFLFSMDGNRLTSDKKFCSPHQSLLSIRGSLFSPRRNSKTSIFSFRGRAKDVGSENDFADDEHSTFEDSESRRDSLFVPHRHGERRNSNVSQASMSSRMVPGLPANGKMHSTVDCNGVVSLVGGPSALTSPTGQLPPEGTTTETEVRKRRLSSYQISMEMLEDSSGRQRAVSIASILTNTMEELEESRQKCPPCWYRFANVFLIWDCCDAWLKVKHLVNLIVMDPFVDLAITICIVLNTLFMAMEHYPMTEQFSSVLTVGNLVFTGIFTAEMVLKIIAMDPYYYFQEGWNIFDGIIVSLSLMELGLSNVEGLSVLRSFRLLRVFKLAKSWPTLNMLIKIIGNSVGALGNLTLVLAIIVFIFAVVGMQLFGKSYKECVCKINDDCTLPRWHMNDFFHSFLIVFRVLCGEWIETMWDCMEVAGQTMCLIVFMLVMVIGNLVVLNLFLALLLSSFSSDNLAATDDDNEMNNLQIAVGRMQKGIDYVKNKMRECFQKAFFRKPKVIEIHEGNKIDSCMSNNTGIEISKELNYLRDGNGTTSGVGTGSSVEKYVIDENDYMSFINNPSLTVTVPIAVGESDFENLNTEEFSSESELEESKEKLNATSSSEGSTVDVVLPREGEQAETEPEEDLKPEACFTEGCIKKFPFCQVSTEEGKGKIWWNLRKTCYSIVEHNWFETFIVFMILLSSGALAFEDIYIEQRKTIKTMLEYADKVFTYIFILEMLLKWVAYGFQTYFTNAWCWLDFLIVDVSLVSLVANALGYSELGAIKSLRTLRALRPLRALSRFEGMRVVVNALVGAIPSIMNVLLVCLIFWLIFSIMGVNLFAGKFYHCVNMTTGNMFDISDVNNLSDCQALGKQARWKNVKVNFDNVGAGYLALLQVATFKGWMDIMYAAVDSRDVKLQPVYEENLYMYLYFVIFIIFGSFFTLNLFIGVIIDNFNQQKKKFGGQDIFMTEEQKKYYNAMKKLGSKKPQKPIPRPANKFQGMVFDFVTRQVFDISIMILICLNMVTMMVETDDQGKYMTLVLSRINLVFIVLFTGEFVLKLVSLRHYYFTIGWNIFDFVVVILSIVGMFLAEMIEKYFVSPTLFRVIRLARIGRILRLIKGAKGIRTLLFALMMSLPALFNIGLLLFLVMFIYAIFGMSNFAYVKKEAGIDDMFNFETFGNSMICLFQITTSAGWDGLLAPILNSAPPDCDPDTIHPGSSVKGDCGNPSVGIFFFVSYIIISFLVVVNMYIAVILENFSVATEESAEPLSEDDFEMFYEVWEKFDPDATQFIEFSKLSDFAAALDPPLLIAKPNKVQLIAMDLPMVSGDRIHCLDILFAFTKRVLGESGEMDALRIQMEDRFMASNPSKVSYEPITTTLKRKQEEVSAAIIQRNFRCYLLKQRLKNISSNYNKEAIKGRIDLPIKQDMIIDKLNGNSTPEKTDGSSSTTSPPSYDSVTKPDKEKFEKDKPEKESKGKEVRENQK

SEQ ID NO: 63896 - protein, 2000 aa, Homo sapiens
MAQALLVPPGPESFRLFTRESLAAIEKRAAEEKAKKPKKEQDNDDENKPKPNSDLEAGKNLPFIYGDIPPEMVSEPLEDLDPYYINKKTFIVMNKGKAIFRFSATSALYILTPLNPVRKIAIKILVHSLFSMLIMCTILTNCVFMTLSNPPDWTKNVEYTFTGIYTFESLIKILARGFCLEDFTFLRDPWNWLDFSVIVMAYVTEFVSLGNVSALRTFRVLRALKTISVIPGLKTIVGALIQSVKKLSDVMILTVFCLSVFALIGLQLFMGNLRNKCLQWPPSDSAFETNTTSYFNGTMDSNGTFVNVTMSTFNWKDYIGDDSHFYVLDGQKDPLLCGNGSDAGQCPEGYICVKAGRNPNYGYTSFDTFSWAFLSLFRLMTQDYWENLYQLTLRAAGKTYMIFFVLVIFLGSFYLVNLILAVVAMAYEEQNQATLEEAEQKEAEFQQMLEQLKKQQEEAQAVAAASAASRDFSGIGGLGELLESSSEASKLSSKSAKEWRNRRKKRRQREHLEGNNKGERDSFPKSESEDSVKRSSFLFSMDGNRLTSDKKFCSPHQSLLSIRGSLFSPRRNSKTSIFSFRGRAKDVGSENDFADDEHSTFEDSESRRDSLFVPHRHGERRNSNVSQASMSSRMVPGLPANGKMHSTVDCNGVVSLVGGPSALTSPTGQLPPEGTTTETEVRKRRLSSYQISMEMLEDSSGRQRAVSIASILTNTMEELEESRQKCPPCWYRFANVFLIWDCCDAWLKVKHLVNLIVMDPFVDLAITICIVLNTLFMAMEHYPMTEQFSSVLTVGNLVFTGIFTAEMVLKIIAMDPYYYFQEGWNIFDGIIVSLSLMELGLSNVEGLSVLRSFRLLRVFKLAKSWPTLNMLIKIIGNSVGALGNLTLVLAIIVFIFAVVGMQLFGKSYKECVCKINDDCTLPRWHMNDFFHSFLIVFRVLCGEWIETMWDCMEVAGQTMCLIVFMLVMVIGNLVVLNLFLALLLSSFSSDNLAATDDDNEMNNLQIAVGRMQKGIDYVKNKMRECFQKAFFRKPKVIEIHEGNKIDSCMSNNTGIEISKELNYLRDGNGTTSGVGTGSSVEKYVIDENDYMSFINNPSLTVTVPIAVGESDFENLNTEEFSSESELEESKEKLNATSSSEGSTVDVVLPREGEQAETEPEEDLKPEACFTEGCIKKFPFCQVSTEEGKGKIWWNLRKTCYSIVEHNWFETFIVFMILLSSGALAFEDIYIEQRKTIKTMLEYADKVFTYIFILEMLLKWVAYGFQTYFTNAWCWLDFLIVDVSLVSLVANALGYSELGAIKSLRTLRALRPLRALSRFEGMRVVVNALVGAIPSIMNVLLVCLIFWLIFSIMGVNLFAGKFYHCVNMTTGNMFDISDVNNLSDCQALGKQARWKNVKVNFDNVGAGYLALLQVATFKGWMDIMYAAVDSRDVKLQPVYEENLYMYLYFVIFIIFGSFFTLNLFIGVIIDNFNQQKKKFGGQDIFMTEEQKKYYNAMKKLGSKKPQKPIPRPANKFQGMVFDFVTRQVFDISIMILICLNMVTMMVETDDQGKYMTLVLSRINLVFIVLFTGEFVLKLVSLRHYYFTIGWNIFDFVVVILSIVGMFLAEMIEKYFVSPTLFRVIRLARIGRILRLIKGAKGIRTLLFALMMSLPALFNIGLLLFLVMFIYAIFGMSNFAYVKKEAGIDDMFNFETFGNSMICLFQITTSAGWDGLLAPILNSAPPDCDPDTIHPGSSVKGDCGNPSVGIFFFVSYIIISFLVVVNMYIAVILENFSVATEESAEPLSEDDFEMFYEVWEKFDPDATQFIEFSKLSDFAAALDPPLLIAKPNKVQLIAMDLPMVSGDRIHCLDILFAFTKRVLGESGEMDALRIQMEDRFMASNPSKVSYEPITTTLKRKQEEVSAAIIQRNFRCYLLKQRLKNISSNYNKEAIKGRIDLPIKQDMIIDKLNGNSTPEKTDGSSSTTSPPSYDSVTKPDKEKFEKDKPEKESKGKEVRENQK

SEQ ID NO: 63897 - protein, 1951 aa, Homo sapiens
MAQALLVPPGPESFRLFTRESLAAIEKRAAEEKAKKPKKEQDNDDENKPKPNSDLEAGKNLPFIYGDIPPEMVSEPLEDLDPYYINKKTFIVMNKGKAIFRFSATSALYILTPLNPVRKIAIKILVHSLFSMLIMCTILTNCVFMTLSNPPDWTKNVEYTFTGIYTFESLIKILARGFCLEDFTFLRDPWNWLDFSVIVMAYVTEFVSLGNVSALRTFRVLRALKTISVIPGLKTIVGALIQSVKKLSDVMILTVFCLSVFALIGLQLFMGNLRNKCLQWPPSDSAFETNTTSYFNGTMDSNGTFVNVTMSTFNWKDYIGDDSHFYVLDGQKDPLLCGNGSDAGQCPEGYICVKAGRNPNYGYTSFDTFSWAFLSLFRLMTQDYWENLYQLTLRAAGKTYMIFFVLVIFLGSFYLVNLILAVVAMAYEEQNQATLEEAEQKEAEFQQMLEQLKKQQEEAQAVAAASAASRDFSGIGGLGELLESSSEASKLSSKSAKEWRNRRKKRRQREHLEGNNKGERDSFPKSESEDSVKRSSFLFSMDGNRLTSDKKFCSPHQSLLSIRGSLFSPRRNSKTSIFSFRGRAKDVGSENDFADDEHSTFEDSESRRDSLFVPHRHGERRNSNGTTTETEVRKRRLSSYQISMEMLEDSSGRQRAVSIASILTNTMEELEESRQKCPPCWYRFANVFLIWDCCDAWLKVKHLVNLIVMDPFVDLAITICIVLNTLFMAMEHYPMTEQFSSVLTVGNLVFTGIFTAEMVLKIIAMDPYYYFQEGWNIFDGIIVSLSLMELGLSNVEGLSVLRSFRLLRVFKLAKSWPTLNMLIKIIGNSVGALGNLTLVLAIIVFIFAVVGMQLFGKSYKECVCKINDDCTLPRWHMNDFFHSFLIVFRVLCGEWIETMWDCMEVAGQTMCLIVFMLVMVIGNLVVLNLFLALLLSSFSSDNLAATDDDNEMNNLQIAVGRMQKGIDYVKNKMRECFQKAFFRKPKVIEIHEGNKIDSCMSNNTGIEISKELNYLRDGNGTTSGVGTGSSVEKYVIDENDYMSFINNPSLTVTVPIAVGESDFENLNTEEFSSESELEESKEKLNATSSSEGSTVDVVLPREGEQAETEPEEDLKPEACFTEGCIKKFPFCQVSTEEGKGKIWWNLRKTCYSIVEHNWFETFIVFMILLSSGALAFEDIYIEQRKTIKTMLEYADKVFTYIFILEMLLKWVAYGFQTYFTNAWCWLDFLIVDVSLVSLVANALGYSELGAIKSLRTLRALRPLRALSRFEGMRVVVNALVGAIPSIMNVLLVCLIFWLIFSIMGVNLFAGKFYHCVNMTTGNMFDISDVNNLSDCQALGKQARWKNVKVNFDNVGAGYLALLQVATFKGWMDIMYAAVDSRDVKLQPVYEENLYMYLYFVIFIIFGSFFTLNLFIGVIIDNFNQQKKKFGGQDIFMTEEQKKYYNAMKKLGSKKPQKPIPRPANKFQGMVFDFVTRQVFDISIMILICLNMVTMMVETDDQGKYMTLVLSRINLVFIVLFTGEFVLKLVSLRHYYFTIGWNIFDFVVVILSIVGMFLAEMIEKYFVSPTLFRVIRLARIGRILRLIKGAKGIRTLLFALMMSLPALFNIGLLLFLVMFIYAIFGMSNFAYVKKEAGIDDMFNFETFGNSMICLFQITTSAGWDGLLAPILNSAPPDCDPDTIHPGSSVKGDCGNPSVGIFFFVSYIIISFLVVVNMYIAVILENFSVATEESAEPLSEDDFEMFYEVWEKFDPDATQFIEFSKLSDFAAALDPPLLIAKPNKVQLIAMDLPMVSGDRIHCLDILFAFTKRVLGESGEMDALRIQMEDRFMASNPSKVSYEPITTTLKRKQEEVSAAIIQRNFRCYLLKQRLKNISSNYNKEAIKGRIDLPIKQDMIIDKLNGNSTPEKTDGSSSTTSPPSYDSVTKPDKEKFEKDKPEKESKGKEVRENQK

SEQ ID NO: 63898 - protein, 1364 aa, Homo sapiens
MAQALLVPPGPESFRLFTRESLAAIEKRAAEEKAKKPKKEQDNDDENKPKPNSDLEAGKNLPFIYGDIPPEMVSEPLEDLDPYYINKKTFIVMNKGKAIFRFSATSALYILTPLNPVRKIAIKILVHSLFSMLIMCTILTNCVFMTLSNPPDWTKNVEYTFTGIYTFESLIKILARGFCLEDFTFLRDPWNWLDFSVIVMAYVTEFVDLGNVSALRTFRVLRALKTISVIPGLKTIVGALIQSVKKLSDVMILTVFCLSVFALIGLQLFMGNLRNKCLQWPPSDSAFETNTTSYFNGTMDSNGTFVNVTMSTFNWKDYIGDDSHFYVLDGQKDPLLCGNGSDAGQCPEGYICVKAGRNPNYGYTSFDTFSWAFLSLFRLMTQDYWENLYQLTLRAAGKTYMIFFVLVIFLGSFYLVNLILAVVAMAYEEQNQATLEEAEQKEAEFQQMLEQLKKQQEEAQAVAAASAASRDFSGIGGLGELLESSSEASKLSSKSAKEWRNRRKKRRQREHLEGNNKGERDSFPKSESEDSVKRSSFLFSMDGNRLTSDKKFCSPHQSLLSIRGSLFSPRRNSKTSIFSFRGRAKDVGSENDFADDEHSTFEDSESRRDSLFVPHRHGERRNSNGTTTETEVRKRRLSSYQISMEMLEDSSGRQRAVSIASILTNTMEELEESRQKCPPCWYRFANVFLIWDCCDAWLKVKHLVNLIVMDPFVDLAITICIVLNTLFMAMEHYPMTEQFSSVLTVGNLVFTGIFTAEMVLKIIAMDPYYYFQEGWNIFDGIIVSLSLMELGLSNVEGLSVLRSFRLLRVFKLAKSWPTLNMLIKIIGNSVGALGNLTLVLAIIVFIFAVVGMQLFGKSYKECVCKINDDCTLPRWHMNDFFHSFLIVFRVLCGEWIETMWDCMEVAGQTMCLIVFMLVMVIGNLVVLNLFLALLLSSFSSDNLAATDDDNEMNNLQIAVGRMQKGIDYVKNKMRECFQKAFFRKPKVIEIHEGNKIDSCMSNNTGIEISKELNYLRDGNGTTSGVGTGSSVEKYVIDENDYMSFINNPSLTVTVPIAVGESDFENLNTEEFSSESELEESKEKLNATSSSEGSTVDVVLPREGEQAETEPEEDLKPEACFTEGCIKKFPFCQVSTEEGKGKIWWNLRKTCYSIVEHNWFETFIVFMILLSSGALAFEDIYIEQRKTIKTMLEYADKVFTYIFILEMLLKWVAYGFQTYFTNAWCWLDFLIVDVSLVSLVANALGYSELGAIKSLRTLRALRPLRALSRFEGMRVVVNALVGAIPSIMNVLLVCLIFWLIFSIMGVNLFAGKFYHCVNMTTGNMFDISDVNNLSDCQALGKQARWKNVKVNFDNVGAGYLALLQV

SEQ ID NO: 63899 - protein, 200 aa, Homo sapiens
MAQALLVPPGPESFRLFTRESLAAIEKRAAEEKAKKPKKEQDNDDENKPKPNSDLEAGKNLPFIYGDIPPEMVSEPLEDLDPYYINKKTFIVMNKGKAIFRFSATSALYILTPLNPVRKIAIKILVHSLFSMLIMCTILTNCVFMTLSNPPDWTKNVEYTFTGIYTFESLIKILARGFCLEDFTFLRDPWNWLDFSVIVM

SEQ ID NO: 63900 - protein, 483 aa, Homo sapiens
MVFDFVTRQVFDISIMILICLNMVTMMVETDDQGKYMTLVLSRINLVFIVLFTGEFVLKLVSLRHYYFTIGWNIFDFVVVILSIVGMFLAEMIEKYFVSPTLFRVIRLARIGRILRLIKGAKGIRTLLFALMMSLPALFNIGLLLFLVMFIYAIFGMSNFAYVKKEAGIDDMFNFETFGNSMICLFQITTSAGWDGLLAPILNSAPPDCDPDTIHPGSSVKGDCGNPSVGIFFFVSYIIISFLVVVNMYIAVILENFSVATEESAEPLSEDDFEMFYEVWEKFDPDATQFIEFSKLSDFAAALDPPLLIAKPNKVQLIAMDLPMVSGDRIHCLDILFAFTKRVLGESGEMDALRIQMEDRFMASNPSKVSYEPITTTLKRKQEEVSAAIIQRNFRCYLLKQRLKNISSNYNKEAIKGRIDLPIKQDMIIDKLNGNSTPEKTDGSSSTTSPPSYDSVTKPDKEKFEKDKPEKESKGKEVRENQK

SEQ ID NO: 63901 - protein, 215 aa, Homo sapiens
MPAFNRLFPLASLVLIYWVSVCFPVCVEVPSETEAVQGNPMKLRCISCMKREEVEATTVVEWFYRPEGGKDFLIYEYRNGHQEVESPFQGRLQWNGSKDLQDVSITVLNVTLNDSGLYTCNVSREFEFEAHRPFVKTTRLIPLRVTEEAGEDFTSVVSEIMMYILLVFLTLWLLIEMIYCYRKVSKAEEAAQENASDYLAIPSENKENSAVPVEE

SEQ ID NO: 63902 - protein, 215 aa, Homo sapiens; identical to SEQ ID NO: 63901

SEQ ID NO: 63903 - protein, 141 aa, Homo sapiens
MPAFNRLFPLASLVLIYWVSVCFPVCVEVPSETEAVQGNPMKLRCISCMKREEVEATTVVEWFYRPEGGKDFLIYEYRNGHQEVESPFQGRLQWNGSKDLQDVSITVLNVTLNDSGLYTCNVSREFEFEAHRPFVKTTRLI

SEQ ID NO: 63904 - protein, 215 aa, Homo sapiens; identical to SEQ ID NO: 63901

SEQ ID NO: 63905 - protein, 1836 aa, Homo sapiens
MARPSLCTLVPLGPECLRPFTRESLAAIEQRAVEEEARLQRNKQMEIEEPERKPRSDLEAGKNLPMIYGDPPPEVIGIPLEDLDPYYSNKKTFIVLNKGKAIFRFSATPALYLLSPFSVVRRGAIKVLIHALFSMFIMITILTNCVFMTMSDPPPWSKNVEYTFTGIYTFESLIKILARGFCVDDFTFLRDPWNWLDFSVIMMAYLTEFVDLGNISALRTFRVLRALKTITVIPGLKTIVGALIQSVKKLSDVMILTVFCLSVFALVGLQLFMGNLRQKCVRWPPPFNDTNTTWYSNDTWYGNDTWYGNEMWYGNDSWYANDTWNSHASWATNDTFDWDAYISDEGNFYFLEGSNDALLCGNSSDAGHCPEGYECIKTGRNPNYGYTSYDTFSWAFLALFRLMTQDYWENLFQLTLRAAGKTYMIFFVVIIFLGSFYLINLILAVVAMAYAEQNEATLAEDKEKEEEFQQMLEKFKKHQEELEKAKAAQALEGGEADGDPAHGKDCNGSLDTSQGEKGAPRQSSSGDSGISDAMEELEEAHQKCPPWWYKCAHKVLIWNCCAPWLKFKNIIHLIVMDPFVDLGITICIVLNTLFMAMEHYPMTEHFDNVLTVGNLVFTGIFTAEMVLKLIAMDPYEYFQQGWNIFDSIIVTLSLVELGLANVQGLSVLRSFRLLRVFKLAKSWPTLNMLIKIIGNSVGALGNLTLVLAIIVFIFAVVGMQLFGKSYKECVCKIALDCNLPRWHMHDFFHSFLIVFRILCGEWIETMWDCMEVAGQAMCLTVFLMVMVIGNLVVLNLFLALLLSSFSADSLAASDEDGEMNNLQIAIGRIKLGIGFAKAFLLGLLHGKILSPKDIMLSLGEADGAGEAGEAGETAPEDEKKEPPEEDLKKDNHILNHMGLADGPPSSLELDHLNFINNPYLTIQVPIASEESDLEMPTEEETDTFSEPEDSKKPPQPLYDGNSSVCSTADYKPPEEDPEEQAEENPEGEQPEECFTEACVQRWPCLYVDISQGRGKKWWTLRRACFKIVEHNWFETFIVFMILLSSGALAFEDIYIEQRRVIRTILEYADKVFTYIFIMEMLLKWVAYGFKVYFTNAWCWLDFLIVDVSIISLVANWLGYSELGPIKSLRTLRALRPLRALSRFEGMRVVVNALLGAIPSIMNVLLVCLIFWLIFSIMGVNLFAGKFYYCINTTTSERFDISEVNNKSECESLMHTGQVRWLNVKVNYDNVGLGYLSLLQVATFKGWMDIMYAAVDSREKEEQPQYEVNLYMYLYFVIFIIFGSFFTLNLFIGVIIDNFNQQKKKLGGKDIFMTEEQKKYYNAMKKLGSKKPQKPIPRPQNKIQGMVYDLVTKQAFDITIMILICLNMVTMMVETDNQSQLKVDILYNINMIFIIIFTGECVLKMLALRQYYFTVGWNIFDFVVVILSIVGLALSDLIQKYFVSPTLFRVIRLARIGRVLRLIRGAKGIRTLLFALMMSLPALFNIGLLLFLVMFIYSIFGMSNFAYVKKESGIDDMFNFETFGNSIICLFEITTSAGWDGLLNPILNSGPPDCDPNLENPGTSVKGDCGNPSIGICFFCSYIIISFLIVVNMYIAIILENFNVATEESSEPLGEDDFEMFYETWEKFDPDATQFIAYSRLSDFVDTLQEPLRIAKPNKIKLITLDLPMVPGDKIHCLDILFALTKEVLGDSGEMDALKQTMEEKFMAANPSKVSYEPITTTLKRKHEEVCAIKIQRAYRRHLLQRSMKQASYMYRHSHDGSGDDAPEKEGLLANTMSKMYGHENGNSSSPSPEEKGEAGDAGPTMGLMPISPSDTAWPPAPPPGQTVRPGVKESLV

SEQ ID NO: 63906 - protein, 228 aa, Homo sapiens
MPGAGDGGKAPARWLGTGLLGLFLLPVTLSLEVSVGKATDIYAVNGTEILLPCTFSSCFGFEDLHFRWTYNSSDAFKILIEGTVKNEKSDPKVTLKDDDRITLVGSTKEKMNNISIVLRDLEFSDTGKYTCHVKNPKENNLQHHATIFLQVVDRLEEVDNTVTLIILAVVGGVIGLLILILLIKKLIIFILKKTREKKKECLVSSSGNDNTENGLPGSKAEEKPPSKV

SEQ ID NO: 63907 - protein, 94 aa, Homo sapiens
MPGAGDGGKAPARWLGTGLLVEEVDNTVTLIILAVVGGVIGLLILILLIKKLIIFILKKTREKKKECLVSSSGNDNTENGLPGSKAEEKPPSKV

SEQ ID NO: 63908 - protein, 1989 aa, Homo sapiens
MAMLPPPGPQSFVHFTKQSLALIEQRIAERKSKEPKEEKKDDDEEAPKPSSDLEAGKQLPFIYGDIPPGMVSEPLEDLDPYYADKKTFIVLNKGKTIFRFNATPALYMLSPFSPLRRISIKILVHSTLFSMLIMCTILTNCIFMTMNNPPDWTKNVEYTFTGIYTFESLVKILARGFCVGEFTFLRDPWNWLDFVVIVFAYLTEFVNLGNVSALRTFRVLRALKTISVIPGLKTIVGALIQSVKKLSDVMILTVFCLSVFALIGLQLFMGNLKHKCFRNSLENNETLESIMNTLESEEDFRKYFYYLEGSKDALLCGFSTDSGQCPEGYTCVKIGRNPDYGYTSFDTFSWAFLALFRLMTQDYWENLYQQTLRAAGKTYMIFFVVVIFLGSFYLINLILAVVAMAYEEQNQANIEEAKQKELEFQQMLDRLKKEQEEAEAIAAAAAEYTSIRRSRIMGLSESSSETSKLSSKSAKERRNRRKKKNQKKLSSGEEKGDAEKLSKSESEDSIRRKSFHLGVEGHRRAHEKRLSTPNQSPLSIRGSLFSARRSSRTSLFSFKGRGRDIGSETEFADDEHSIFGDNESRRGSLFVPHRPQERRSSNISQASRSPPMLPVNGKMHSAVDCNGVVSLVDGRSALMLPNGQLLPEVIIDKATSDDSGTTNQIHKKRRCSSYLLSEDMLNDPNLRQRAMSRASILTNTVEELEESRQKCPPWWYRFAHKFLIWNCSPYWIKFKKCIYFIVMDPFVDLAITICIVLNTLFMAMEHHPMTEEFKNVLAIGNLVFTGIFAAEMVLKLIAMDPYEYFQVGWNIFDSLIVTLSLVELFLADVEGLSVLRSFRLLRVFKLAKSWPTLNMLIKIIGNSVGALGNLTLVLAIIVFIFAVVGMQLFGKSYKECVCKINDDCTLPRWHMNDFFHSFLIVFRVLCGEWIETMWDCMEVAGQAMCLIVYMMVMVIGNLVVLNLFLALLLSSFSSDNLTAIEEDPDANNLQIAVTRIKKGINYVKQTLREFILKAFSKKPKISREIRQAEDLNTKKENYISNHTLAEMSKGHNFLKEKDKISGFGSSVDKHLMEDSDGQSFIHNPSLTVTVPIAPGESDLENMNAEELSSDSDSEYSKVRLNRSSSSECSTVDNPLPGEGEEAEAEPMNSDEPEACFTDGCVWRFSCCQVNIESGKGKIWWNIRKTCYKIVEHSWFESFIVLMILLSSGALAFEDIYIERKKTIKIILEYADKIFTYIFILEMLLKWIAYGYKTYFTNAWCWLDFLIVDVSLVTLVANTLGYSDLGPIKSLRTLRALRPLRALSRFEGMRVVVNALIGAIPSIMNVLLVCLIFWLIFSIMGVNLFAGKFYECINTTDGSRFPASQVPNRSECFALMNVSQNVRWKNLKVNFDNVGLGYLSLLQVATFKGWTIIMYAAVDSVNVDKQPKYEYSLYMYIYFVVFIIFGSFFTLNLFIGVIIDNFNQQKKKLGGQDIFMTEEQKKYYNAMKKLGSKKPQKPIPRPGNKIQGCIFDLVTNQAFDISIMVLICLNMVTMMVEKEGQSQHMTEVLYWINVVFIILFTGECVLKLISLRHYYFTVGWNIFDFVVVIISIVGMFLADLIETYFVSPTLFRVIRLARIGRILRLVKGAKGIRTLLFALMMSLPALFNIGLLLFLVMFIYAIFGMSNFAYVKKEDGINDMFNFETFGNSMICLFQITTSAGWDGLLAPILNSKPPDCDPKKVHPGSSVEGDCGNPSVGIFYFVSYIIISFLVVVNMYIAVILENFSVATEESTEPLSEDDFEMFYEVWEKFDPDATQFIEFSKLSDFAAALDPPLLIAKPNKVQLIAMDLPMVSGDRIHCLDILFAFTKRVLGESGEMDSLRSQMEERFMSANPSKVSYEPITTTLKRKQEDVSATVIQRAYRRYRLRQNVKNISSIYIKDGDRDDDLLNKKDMAFDNVNENSSPEKTDATSSTTSPPSYDSVTKPDKEKYEQDRTEKEDKGKDSKESKK

SEQ ID NO: 63909 - protein, 1989 aa, Homo sapiens
MAMLPPPGPQSFVHFTKQSLALIEQRIAERKSKEPKEEKKDDDEEAPKPSSDLEAGKQLPFIYGDIPPGMVSEPLEDLDPYYADKKTFIVLNKGKTIFRFNATPALYMLSPFSPLRRISIKILVHSTLFSMLIMCTILTNCIFMTMNNPPDWTKNVEYTFTGIYTFESLVKILARGFCVGEFTFLRDPWNWLDFVVIVFAYVTEFVDLGNVSALRTFRVLRALKTISVIPGLKTIVGALIQSVKKLSDVMILTVFCLSVFALIGLQLFMGNLKHKCFRNSLENNETLESIMNTLESEEDFRKYFYYLEGSKDALLCGFSTDSGQCPEGYTCVKIGRNPDYGYTSFDTFSWAFLALFRLMTQDYWENLYQQTLRAAGKTYMIFFVVVIFLGSFYLINLILAVVAMAYEEQNQANIEEAKQKELEFQQMLDRLKKEQEEAEAIAAAAAEYTSIRRSRIMGLSESSSETSKLSSKSAKERRNRRKKKNQKKLSSGEEKGDAEKLSKSESEDSIRRKSFHLGVEGHRRAHEKRLSTPNQSPLSIRGSLFSARRSSRTSLFSFKGRGRDIGSETEFADDEHSIFGDNESRRGSLFVPHRPQERRSSNISQASRSPPMLPVNGKMHSAVDCNGVVSLVDGRSALMLPNGQLLPEVIIDKATSDDSGTTNQIHKKRRCSSYLLSEDMLNDPNLRQRAMSRASILTNTVEELEESRQKCPPWWYRFAHKFLIWNCSPYWIKFKKCIYFIVMDPFVDLAITICIVLNTLFMAMEHHPMTEEFKNVLAIGNLVFTGIFAAEMVLKLIAMDPYEYFQVGWNIFDSLIVTLSLVELFLADVEGLSVLRSFRLLRVFKLAKSWPTLNMLIKIIGNSVGALGNLTLVLAIIVFIFAVVGMQLFGKSYKECVCKINDDCTLPRWHMNDFFHSFLIVFRVLCGEWIETMWDCMEVAGQAMCLIVYMMVMVIGNLVVLNLFLALLLSSFSSDNLTAIEEDPDANNLQIAVTRIKKGINYVKQTLREFILKAFSKKPKISREIRQAEDLNTKKENYISNHTLAEMSKGHNFLKEKDKISGFGSSVDKHLMEDSDGQSFIHNPSLTVTVPIAPGESDLENMNAEELSSDSDSEYSKVRLNRSSSSECSTVDNPLPGEGEEAEAEPMNSDEPEACFTDGCVWRFSCCQVNIESGKGKIWWNIRKTCYKIVEHSWFESFIVLMILLSSGALAFEDIYIERKKTIKIILEYADKIFTYIFILEMLLKWIAYGYKTYFTNAWCWLDFLIVDVSLVTLVANTLGYSDLGPIKSLRTLRALRPLRALSRFEGMRVVVNALIGAIPSIMNVLLVCLIFWLIFSIMGVNLFAGKFYECINTTDGSRFPASQVPNRSECFALMNVSQNVRWKNLKVNFDNVGLGYLSLLQVATFKGWTIIMYAAVDSVNVDKQPKYEYSLYMYIYFVVFIIFGSFFTLNLFIGVIIDNFNQQKKKLGGQDIFMTEEQKKYYNAMKKLGSKKPQKPIPRPGNKIQGCIFDLVTNQAFDISIMVLICLNMVTMMVEKEGQSQHMTEVLYWINVVFIILFTGECVLKLISLRHYYFTVGWNIFDFVVVIISIVGMFLADLIETYFVSPTLFRVIRLARIGRILRLVKGAKGIRTLLFALMMSLPALFNIGLLLFLVMFIYAIFGMSNFAYVKKEDGINDMFNFETFGNSMICLFQITTSAGWDGLLAPILNSKPPDCDPKKVHPGSSVEGDCGNPSVGIFYFVSYIIISFLVVVNMYIAVILENFSVATEESTEPLSEDDFEMFYEVWEKFDPDATQFIEFSKLSDFAAALDPPLLIAKPNKVQLIAMDLPMVSGDRIHCLDILFAFTKRVLGESGEMDSLRSQMEERFMSANPSKVSYEPITTTLKRKQEDVSATVIQRAYRRYRLRQNVKNISSIYIKDGDRDDDLLNKKDMAFDNVNENSSPEKTDATSSTTSPPSYDSVTKPDKEKYEQDRTEKEDKGKDSKESKK

SEQ ID NO: 63910 - protein, 1988 aa, Homo sapiens
MAMLPPPGPQSFVHFTKQSLALIEQRIAERKSKEPKEEKKDDDEEAPKPSSDLEAGKQLPFIYGDIPPGMVSEPLEDLDPYYADKKTFIVLNKGKTIFRFNATPALYMLSPFSPLRRISIKILVHSLFSMLIMCTILTNCIFMTMNNPPDWTKNVEYTFTGIYTFESLVKILARGFCVGEFTFLRDPWNWLDFVVIVFAYLTEFVNLGNVSALRTFRVLRALKTISVIPGLKTIVGALIQSVKKLSDVMILTVFCLSVFALIGLQLFMGNLKHKCFRNSLENNETLESIMNTLESEEDFRKYFYYLEGSKDALLCGFSTDSGQCPEGYTCVKIGRNPDYGYTSFDTFSWAFLALFRLMTQDYWENLYQQTLRAAGKTYMIFFVVVIFLGSFYLINLILAVVAMAYEEQNQANIEEAKQKELEFQQMLDRLKKEQEEAEAIAAAAAEYTSIRRSRIMGLSESSSETSKLSSKSAKERRNRRKKKNQKKLSSGEEKGDAEKLSKSESEDSIRRKSFHLGVEGHRRAHEKRLSTPNQSPLSIRGSLFSARRSSRTSLFSFKGRGRDIGSETEFADDEHSIFGDNESRRGSLFVPHRPQERRSSNISQASRSPPMLPVNGKMHSAVDCNGVVSLVDGRSALMLPNGQLLPEVIIDKATSDDSGTTNQIHKKRRCSSYLLSEDMLNDPNLRQRAMSRASILTNTVEELEESRQKCPPWWYRFAHKFLIWNCSPYWIKFKKCIYFIVMDPFVDLAITICIVLNTLFMAMEHHPMTEEFKNVLAIGNLVFTGIFAAEMVLKLIAMDPYEYFQVGWNIFDSLIVTLSLVELFLADVEGLSVLRSFRLLRVFKLAKSWPTLNMLIKIIGNSVGALGNLTLVLAIIVFIFAVVGMQLFGKSYKECVCKINDDCTLPRWHMNDFFHSFLIVFRVLCGEWIETMWDCMEVAGQAMCLIVYMMVMVIGNLVVLNLFLALLLSSFSSDNLTAIEEDPDANNLQIAVTRIKKGINYVKQTLREFILKAFSKKPKISREIRQAEDLNTKKENYISNHTLAEMSKGHNFLKEKDKISGFGSSVDKHLMEDSDGQSFIHNPSLTVTVPIAPGESDLENMNAEELSSDSDSEYSKVRLNRSSSSECSTVDNPLPGEGEEAEAEPMNSDEPEACFTDGCVWRFSCCQVNIESGKGKIWWNIRKTCYKIVEHSWFESFIVLMILLSSGALAFEDIYIERKKTIKIILEYADKIFTYIFILEMLLKWIAYGYKTYFTNAWCWLDFLIVDVSLVTLVANTLGYSDLGPIKSLRTLRALRPLRALSRFEGMRVVVNALIGAIPSIMNVLLVCLIFWLIFSIMGVNLFAGKFYECINTTDGSRFPASQVPNRSECFALMNVSQNVRWKNLKVNFDNVGLGYLSLLQVATFKGWTIIMYAAVDSVNVDKQPKYEYSLYMYIYFVVFIIFGSFFTLNLFIGVIIDNFNQQKKKLGGQDIFMTEEQKKYYNAMKKLGSKKPQKPIPRPGNKIQGCIFDLVTNQAFDISIMVLICLNMVTMMVEKEGQSQHMTEVLYWINVVFIILFTGECVLKLISLRHYYFTVGWNIFDFVVVIISIVGMFLADLIETYFVSPTLFRVIRLARIGRILRLVKGAKGIRTLLFALMMSLPALFNIGLLLFLVMFIYAIFGMSNFAYVKKEDGINDMFNFETFGNSMICLFQITTSAGWDGLLAPILNSKPPDCDPKKVHPGSSVEGDCGNPSVGIFYFVSYIIISFLVVVNMYIAVILENFSVATEESTEPLSEDDFEMFYEVWEKFDPDATQFIEFSKLSDFAAALDPPLLIAKPNKVQLIAMDLPMVSGDRIHCLDILFAFTKRVLGESGEMDSLRSQMEERFMSANPSKVSYEPITTTLKRKQEDVSATVIQRAYRRYRLRQNVKNISSIYIKDGDRDDDLLNKKDMAFDNVNENSSPEKTDATSSTTSPPSYDSVTKPDKEKYEQDRTEKEDKGKDSKESKK

SEQ ID NO: 63911 - protein, 1977 aa, Homo sapiens
MAMLPPPGPQSFVHFTKQSLALIEQRIAERKSKEPKEEKKDDDEEAPKPSSDLEAGKQLPFIYGDIPPGMVSEPLEDLDPYYADKKTFIVLNKGKTIFRFNATPALYMLSPFSPLRRISIKILVHSLFSMLIMCTILTNCIFMTMNNPPDWTKNVEYTFTGIYTFESLVKILARGFCVGEFTFLRDPWNWLDFVVIVFAYLTEFVNLGNVSALRTFRVLRALKTISVIPGLKTIVGALIQSVKKLSDVMILTVFCLSVFALIGLQLFMGNLKHKCFRNSLENNETLESIMNTLESEEDFRKYFYYLEGSKDALLCGFSTDSGQCPEGYTCVKIGRNPDYGYTSFDTFSWAFLALFRLMTQDYWENLYQQTLRAAGKTYMIFFVVVIFLGSFYLINLILAVVAMAYEEQNQANIEEAKQKELEFQQMLDRLKKEQEEAEAIAAAAAEYTSIRRSRIMGLSESSSETSKLSSKSAKERRNRRKKKNQKKLSSGEEKGDAEKLSKSESEDSIRRKSFHLGVEGHRRAHEKRLSTPNQSPLSIRGSLFSARRSSRTSLFSFKGRGRDIGSETEFADDEHSIFGDNESRRGSLFVPHRPQERRSSNISQASRSPPMLPVNGKMHSAVDCNGVVSLVDGRSALMLPNGQLLPEGTTNQIHKKRRCSSYLLSEDMLNDPNLRQRAMSRASILTNTVEELEESRQKCPPWWYRFAHKFLIWNCSPYWIKFKKCIYFIVMDPFVDLAITICIVLNTLFMAMEHHPMTEEFKNVLAIGNLVFTGIFAAEMVLKLIAMDPYEYFQVGWNIFDSLIVTLSLVELFLADVEGLSVLRSFRLLRVFKLAKSWPTLNMLIKIIGNSVGALGNLTLVLAIIVFIFAVVGMQLFGKSYKECVCKINDDCTLPRWHMNDFFHSFLIVFRVLCGEWIETMWDCMEVAGQAMCLIVYMMVMVIGNLVVLNLFLALLLSSFSSDNLTAIEEDPDANNLQIAVTRIKKGINYVKQTLREFILKAFSKKPKISREIRQAEDLNTKKENYISNHTLAEMSKGHNFLKEKDKISGFGSSVDKHLMEDSDGQSFIHNPSLTVTVPIAPGESDLENMNAEELSSDSDSEYSKVRLNRSSSSECSTVDNPLPGEGEEAEAEPMNSDEPEACFTDGCVWRFSCCQVNIESGKGKIWWNIRKTCYKIVEHSWFESFIVLMILLSSGALAFEDIYIERKKTIKIILEYADKIFTYIFILEMLLKWIAYGYKTYFTNAWCWLDFLIVDVSLVTLVANTLGYSDLGPIKSLRTLRALRPLRALSRFEGMRVVVNALIGAIPSIMNVLLVCLIFWLIFSIMGVNLFAGKFYECINTTDGSRFPASQVPNRSECFALMNVSQNVRWKNLKVNFDNVGLGYLSLLQVATFKGWTIIMYAAVDSVNVDKQPKYEYSLYMYIYFVVFIIFGSFFTLNLFIGVIIDNFNQQKKKLGGQDIFMTEEQKKYYNAMKKLGSKKPQKPIPRPGNKIQGCIFDLVTNQAFDISIMVLICLNMVTMMVEKEGQSQHMTEVLYWINVVFIILFTGECVLKLISLRHYYFTVGWNIFDFVVVIISIVGMFLADLIETYFVSPTLFRVIRLARIGRILRLVKGAKGIRTLLFALMMSLPALFNIGLLLFLVMFIYAIFGMSNFAYVKKEDGINDMFNFETFGNSMICLFQITTSAGWDGLLAPILNSKPPDCDPKKVHPGSSVEGDCGNPSVGIFYFVSYIIISFLVVVNMYIAVILENFSVATEESTEPLSEDDFEMFYEVWEKFDPDATQFIEFSKLSDFAAALDPPLLIAKPNKVQLIAMDLPMVSGDRIHCLDILFAFTKRVLGESGEMDSLRSQMEERFMSANPSKVSYEPITTTLKRKQEDVSATVIQRAYRRYRLRQNVKNISSIYIKDGDRDDDLLNKKDMAFDNVNENSSPEKTDATSSTTSPPSYDSVTKPDKEKYEQDRTEKEDKGKDSKESKK

SEQ ID NO: 63912 - protein, 539 aa, Homo sapiens
ILTNCIFMTMNNPPDWTKNVEYTFTGIYTFESLVKILARGFCVGEFTFLRDPWNWLDFVVIVFAYVTEFVDLGNVSALRTFRVLRALKTISVIPGLKTIVGALIQSVKKLSDVMILTVFCLSVFALIGLQLFMGNLKHKCFRNSLENNETLESIMNTLESEEDFRKYFYYLEGSKDALLCGFSTDSGQCPEGYTCVKIGRNPDYGYTSFDTFSWAFLALFRLMTQDYWENLYQQTLRAAGKTYMIFFVVVIFLGSFYLINLILAVVAMAYEEQNQANIEEAKQKELEFQQMLDRLKKEQEEAEAIAAAAAEYTSIRRSRIMGLSESSSETSKLSSKSAKERRNRRKKKNQKKLSSGEEKGDAEKLSKSESEDSIRRKSFHLGVEGHRRAHEKRLSTPNQSPLSIRGSLFSARRSSRTSLFSFKGRGRDIGSETEFADDEHSIFGDNESRRGSLFVPHRPQERRSSNISQASRSPPMLPVNGKMHSAVDCNGVVSLVDGRSALMLPNGQLLPEVIIDKATSDDSGTTNQIHKKRRCSSYL

SEQ ID NO: 63913 - protein, 65 aa, Homo sapiens
MANFLLPRGTSSFRRFTRESLAAIEKRMAEKQARGSTTLQESREGLPEEEAPRPQLDLQASKKLP

SEQ ID NO: 63914 - protein, 2016 aa, Homo sapiens [sequence omitted]

SEQ ID NO: 63915 - protein, 113 aa, Homo sapiens
MAQHDPPPWTKYVEYVSENIKLGNLSALRTFRVLRALKTISVIPGLKTIVGALIQSVKKLADVMVLTVFCLSVFALIGLQLFMGNLRHKCVRNFTALNGTNGSVEADGLVWES

SEQ ID NO: 63916 - protein, 2016 aa, Homo sapiens
MANFLLPRGTSSFRRFTRESLAAIEKRMAEKQARGSTTLQESREGLPEEEAPRPQLDLQASKKLPDLYGNPPQELIGEPLEDLDPFYSTQKTFIVLNKGKTIFRFSATNALYVLSPFHPIRRAAVKILVHSLFNMLIMCTILTNCVFMAQHDPPPWTKYVEYTFTAIYTFESLVKILARGFCLHAFTFLRDPWNWLDFSVIIMAYVSENIKLGNLSALRTFRVLRALKTISVIPGLKTIVGALIQSVKKLADVMVLTVFCLSVFALIGLQLFMGNLRHKCVRNFTALNGTNGSVEADGLVWESLDLYLSDPENYLLKNGTSDVLLCGNSSDAGTCPEGYRCLKAGENPDHGYTSFDSFAWAFLALFRLMTQDCWERLYQQTLRSAGKIYMIFFMLVIFLGSFYLVNLILAVVAMAYEEQNQATIAETEEKEKRFQEAMEMLKKEHEALTIRGVDTVSRSSLEMSPLAPVNSHERRSKRRKRMSSGTEECGEDRLPKSDSEDGPRAMNHLSLTRGLSRTSMKPRSSRGSIFTFRRRDLGSEADFADDENSTAGESESHHTSLLVPWPLRRTSAQGQPSPGTSAPGHALHGKKNSTVDCNGVVSLLGAGDPEATSPGSHLLRPVMLEHPPDTTTPSEEPGGPQMLTSQAPCVDGFEEPGARQRALSAVSVLTSALEELEESRHKCPPCWNRLAQRYLIWECCPLWMSIKQGVKLVVMDPFTDLTITMCIVLNTLFMALEHYNMTSEFEEMLQVGNLVFTGIFTAEMTFKIIALDPYYYFQQGWNIFDSIIVILSLMELGLSRMSNLSVLRSFRLLRVFKLAKSWPTLNTLIKIIGNSVGALGNLTLVLAIIVFIFAVVGMQLFGKNYSELRDSDSGLLPRWHMMDFFHAFLIIFRILCGEWIETMWDCMEVSGQSLCLLVFLLVMVIGNLVVLNLFLALLLSSFSADNLTAPDEDREMNNLQLALARIQRGLRFVKRTTWDFCCGLLRQRPQKPAALAAQGQLPSCIATPYSPPPPETEKVPPTRKETRFEEGEQPGQGTPGDPEPVCVPIAVAESDTDDQEEDEENSLGTEEESSKQQESQPVSGGPEAPPDSRTWSQVSATASSEAEASASQADWRQQWKAEPQAPGCGETPEDSCSEGSTADMTNTAELLEQIPDLGQDVKDPEDCFTEGCVRRCPCCAVDTTQAPGKVWWRLRKTCYHIVEHSWFETFIIFMILLSSGALAFEDIYLEERKTIKVLLEYADKMFTYVFVLEMLLKWVAYGFKKYFTNAWCWLDFLIVDVSLVSLVANTLGFAEMGPIKSLRTLRALRPLRALSRFEGMRVVVNALVGAIPSIMNVLLVCLIFWLIFSIMGVNLFAGKFGRCINQTEGDLPLNYTIVNNKSQCESLNLTGELYWTKVKVNFDNVGAGYLALLQVATFKGWMDIMYAAVDSRGYEEQPQWEYNLYMYIYFVIFIIFGSFFTLNLFIGVIIDNFNQQKKKLGGQDIFMTEEQKKYYNAMKKLGSKKPQKPIPRPLNKYQGFIFDIVTKQAFDVTIMFLICLNMVTMMVETDDQSPEKINILAKINLLFVAIFTGECIVKLAALRHYYFTNSWNIFDFVVVILSIVGTVLSDIIQKYFFSPTLFRVIRLARIGRILRLIRGAKGIRTLLFALMMSLPALFNIGLLLFLVMFIYSIFGMANFAYVKWEAGIDDMFNFQTFANSMLCLFQITTSAGWDGLLSPILNTGPPYCDPTLPNSNGSRGDCGSPAVGILFFTTYIIISFLIVVNMYIAIILENFSVATEESTEPLSEDDFDMFYEIWEKFDPEATQFIEYSVLSDFADALSEPLRIAKPNQISLINMDLPMVSGDRIHCMDILFAFTKRVLGESGEMDALKIQMEEKFMAANPSKISYEPITTTLRRKHEEVSAMVIQRAFRRHLLQRSLKHASFLFRQQAGSGLSEEDAPEREGLIAYVMSENFSRPLGPPSSSSISSTSFPPSYDSVTRATSDNLQVRGSDYSHSEDLADFPPSPDRDRESIV

SEQ ID NO: 63917 - protein, 1998 aa, Homo sapiens
MANFLLPRGTSSFRRFTRESLAAIEKRMAEKQARGSTTLQESREGLPEEEAPRPQLDLQASKKLPDLYGNPPQELIGEPLEDLDPFYSTQKTFIVLNKGKTIFRFSATNALYVLSPFHPIRRAAVKILVHSLFNMLIMCTILTNCVFMAQHDPPPWTKYVEYTFTAIYTFESLVKILARGFCLHAFTFLRDPWNWLDFSVIIMAYVSENIKLGNLSALRTFRVLRALKTISVIPGLKTIVGALIQSVKKLADVMVLTVFCLSVFALIGLQLFMGNLRHKCVRNFTALNGTNGSVEADGLVWESLDLYLSDPENYLLKNGTSDVLLCGNSSDAGTCPEGYRCLKAGENPDHGYTSFDSFAWAFLALFRLMTQDCWERLYQQTLRSAGKIYMIFFMLVIFLGSFYLVNLILAVVAMAYEEQNQATIAETEEKEKRFQEAMEMLKKEHEALTIRGVDTVSRSSLEMSPLAPVNSHERRSKRRKRMSSGTEECGEDRLPKSDSEDGPRAMNHLSLTRGLSRTSMKPRSSRGSIFTFRRRDLGSEADFADDENSTAGESESHHTSLLVPWPLRRTSAQGQPSPGTSAPGHALHGKKNSTVDCNGVVSLLGAGDPEATSPGSHLLRPVMLEHPPDTTTPSEEPGGPQMLTSQAPCVDGFEEPGARQRALSAVSVLTSALEELEESRHKCPPCWNRLAQRYLIWECCPLWMSIKQGVKLVVMDPFTDLTITMCIVLNTLFMALEHYNMTSEFEEMLQVGNLVFTGIFTAEMTFKIIALDPYYYFQQGWNIFDSIIVILSLMELGLSRMSNLSVLRSFRLLRVFKLAKSWPTLNTLIKIIGNSVGALGNLTLVLAIIVFIFAVVGMQLFGKNYSELRDSDSGLLPRWHMMDFFHAFLIIFRILCGEWIETMWDCMEVSGQSLCLLVFLLVMVIGNLVVLNLFLALLLSSFSADNLTAPDEDREMNNLQLALARIQRGLRFVKRTTWDFCCGLLRQRPQKPAALAAQGQLPSCIATPYSPPPPETEKVPPTRKETRFEEGEQPGQGTPGDPEPVCVPIAVAESDTDDQEEDEENSLGTEEESSKQQESQPVSGGPEAPPDSRTWSQVSATASSEAEASASQADWRQQWKAEPQAPGCGETPEDSCSEGSTADMTNTAELLEQIPDLGQDVKDPEDCFTEGCVRRCPCCAVDTTQAPGKVWWRLRKTCYHIVEHSWFETFIIFMILLSSGALAFEDIYLEERKTIKVLLEYADKMFTYVFVLEMLLKWVAYGFKKYFTNAWCWLDFLIVDVSLVSLVANTLGFAEMGPIKSLRTLRALRPLRALSRFEGMRVVVNALVGAIPSIMNVLLVCLIFWLIFSIMGVNLFAGKFGRCINQTEGDLPLNYTIVNNKSQCESLNLTGELYWTKVKVNFDNVGAGYLALLQVYEEQPQWEYNLYMYIYFVIFIIFGSFFTLNLFIGVIIDNFNQQKKKLGGQDIFMTEEQKKYYNAMKKLGSKKPQKPIPRPLNKYQGFIFDIVTKQAFDVTIMFLICLNMVTMMVETDDQSPEKINILAKINLLFVAIFTGECIVKLAALRHYYFTNSWNIFDFVVVILSIVGTVLSDIIQKYFFSPTLFRVIRLARIGRILRLIRGAKGIRTLLFALMMSLPALFNIGLLLFLVMFIYSIFGMANFAYVKWEAGIDDMFNFQTFANSMLCLFQITTSAGWDGLLSPILNTGPPYCDPTLPNSNGSRGDCGSPAVGILFFTTYIIISFLIVVNMYIAIILENFSVATEESTEPLSEDDFDMFYEIWEKFDPEATQFIEYSVLSDFADALSEPLRIAKPNQISLINMDLPMVSGDRIHCMDILFAFTKRVLGESGEMDALKIQMEEKFMAANPSKISYEPITTTLRRKHEEVSAMVIQRAFRRHLLQRSLKHASFLFRQQAGSGLSEEDAPEREGLIAYVMSENFSRPLGPPSSSSISSTSFPPSYDSVTRATSDNLQVRGSDYSHSEDLADFPPSPDRDRESIV

SEQ ID NO: 63918 - protein, 2015 aa, Homo sapiens [sequence omitted]

SEQ ID NO: 63919 - protein, 1998 aa, Homo sapiens; identical to SEQ ID NO: 63917

SEQ ID NO: 63920 - protein, 2015 aa, Homo sapiens [sequence omitted]

SEQ ID NO: 63921 - protein, 1962 aa, Homo sapiens
MANFLLPRGTSSFRRFTRESLAAIEKRMAEKQARGSTTLQESREGLPEEEAPRPQLDLQASKKLPDLYGNPPQELIGEPLEDLDPFYSTQKTFIVLNKGKTIFRFSATNALYVLSPFHPIRRAAVKILVHSLFNMLIMCTILTNCVFMAQHDPPPWTKYVEYTFTAIYTFESLVKILARGFCLHAFTFLRDPWNWLDFSVIIMAYTTEFVDLGNVSALRTFRVLRALKTISVISGLKTIVGALIQSVKKLADVMVLTVFCLSVFALIGLQLFMGNLRHKCVRNFTALNGTNGSVEADGLVWESLDLYLSDPENYLLKNGTSDVLLCGNSSDAGTCPEGYRCLKAGENPDHGYTSFDSFAWAFLALFRLMTQDCWERLYQQTLRSAGKIYMIFFMLVIFLGSFYLVNLILAVVAMAYEEQNQATIAETEEKEKRFQEAMEMLKKEHEALTIRGVDTVSRSSLEMSPLAPVNSHERRSKRRKRMSSGTEECGEDRLPKSDSEDGPRAMNHLSLTRGLSRTSMKPRSSRGSIFTFRRRDLGSEADFADDENSTAGESESHHTSLLVPWPLRRTSAQGQPSPGTSAPGHALHGKKNSTVDCNGVVSLLGAGDPEATSPGSHLLRPVMLEHPPDTTTPSEEPGGPQMLTSQAPCVDGFEEPGARQRALSAVSVLTSALEELEESRHKCPPCWNRLAQRYLIWECCPLWMSIKQGVKLVVMDPFTDLTITMCIVLNTLFMALEHYNMTSEFEEMLQVGNLVFTGIFTAEMTFKIIALDPYYYFQQGWNIFDSIIVILSLMELGLSRMSNLSVLRSFRLLRVFKLAKSWPTLNTLIKIIGNSVGALGNLTLVLAIIVFIFAVVGMQLFGKNYSELRDSDSGLLPRWHMMDFFHAFLIIFRILCGEWIETMWDCMEVSGQSLCLLVFLLVMVIGNLVVLNLFLALLLSSFSADNLTAPDEDREMNNLQLALARIQRGLRFVKRTTWDFCCGLLRQRPQKPAALAAQGQLPSCIATPYSPPPPETEKVPPTRKETRFEEGEQPGQGTPGDPEPVCVPIAVAESDTDDQEEDEENSLGTEEESSKQTPEDSCSEGSTADMTNTAELLEQIPDLGQDVKDPEDCFTEGCVRRCPCCAVDTTQAPGKVWWRLRKTCYHIVEHSWFETFIIFMILLSSGALAFEDIYLEERKTIKVLLEYADKMFTYVFVLEMLLKWVAYGFKKYFTNAWCWLDFLIVDVSLVSLVANTLGFAEMGPIKSLRTLRALRPLRALSRFEGMRVVVNALVGAIPSIMNVLLVCLIFWLIFSIMGVNLFAGKFGRCINQTEGDLPLNYTIVNNKSQCESLNLTGELYWTKVKVNFDNVGAGYLALLQVATFKGWMDIMYAAVDSRGYEEQPQWEYNLYMYIYFVIFIIFGSFFTLNLFIGVIIDNFNQQKKKLGGQDIFMTEEQKKYYNAMKKLGSKKPQKPIPRPLNKYQGFIFDIVTKQAFDVTIMFLICLNMVTMMVETDDQSPEKINILAKINLLFVAIFTGECIVKLAALRHYYFTNSWNIFDFVVVILSIVGTVLSDIIQKYFFSPTLFRVIRLARIGRILRLIRGAKGIRTLLFALMMSLPALFNIGLLLFLVMFIYSIFGMANFAYVKWEAGIDDMFNFQTFANSMLCLFQITTSAGWDGLLSPILNTGPPYCDPTLPNSNGSRGDCGSPAVGILFFTTYIIISFLIVVNMYIAIILENFSVATEESTEPLSEDDFDMFYEIWEKFDPEATQFIEYSVLSDFADALSEPLRIAKPNQISLINMDLPMVSGDRIHCMDILFAFTKRVLGESGEMDALKIQMEEKFMAANPSKISYEPITTTLRRKHEEVSAMVIQRAFRRHLLQRSLKHASFLFRQQAGSGLSEEDAPEREGLIAYVMSENFSRPLGPPSSSSISSTSFPPSYDSVTRATSDNLQVRGSDYSHSEDLADFPPSPDRDRESIV

SEQ ID NO: 63922 - protein, 1962 aa, Homo sapiens
MANFLLPRGTSSFRRFTRESLAAIEKRMAEKQARGSTTLQESREGLPEEEAPRPQLDLQASKKLPDLYGNPPQELIGEPLEDLDPFYSTQKTFIVLNKGKTIFRFSATNALYVLSPFHPIRRAAVKILVHSLFNMLIMCTILTNCVFMAQHDPPPWTKYVEYTFTAIYTFESLVKILARGFCLHAFTFLRDPWNWLDFSVIIMAYVSENIKLGNLSALRTFRVLRALKTISVIPGLKTIVGALIQSVKKLADVMVLTVFCLSVFALIGLQLFMGNLRHKCVRNFTALNGTNGSVEADGLVWESLDLYLSDPENYLLKNGTSDVLLCGNSSDAGTCPEGYRCLKAGENPDHGYTSFDSFAWAFLALFRLMTQDCWERLYQQTLRSAGKIYMIFFMLVIFLGSFYLVNLILAVVAMAYEEQNQATIAETEEKEKRFQEAMEMLKKEHEALTIRGVDTVSRSSLEMSPLAPVNSHERRSKRRKRMSSGTEECGEDRLPKSDSEDGPRAMNHLSLTRGLSRTSMKPRSSRGSIFTFRRRDLGSEADFADDENSTAGESESHHTSLLVPWPLRRTSAQGQPSPGTSAPGHALHGKKNSTVDCNGVVSLLGAGDPEATSPGSHLLRPVMLEHPPDTTTPSEEPGGPQMLTSQAPCVDGFEEPGARQRALSAVSVLTSALEELEESRHKCPPCWNRLAQRYLIWECCPLWMSIKQGVKLVVMDPFTDLTITMCIVLNTLFMALEHYNMTSEFEEMLQVGNLVFTGIFTAEMTFKIIALDPYYYFQQGWNIFDSIIVILSLMELGLSRMSNLSVLRSFRLLRVFKLAKSWPTLNTLIKIIGNSVGALGNLTLVLAIIVFIFAVVGMQLFGKNYSELRDSDSGLLPRWHMMDFFHAFLIIFRILCGEWIETMWDCMEVSGQSLCLLVFLLVMVIGNLVVLNLFLALLLSSFSADNLTAPDEDREMNNLQLALARIQRGLRFVKRTTWDFCCGLLRQRPQKPAALAAQGQLPSCIATPYSPPPPETEKVPPTRKETRFEEGEQPGQGTPGDPEPVCVPIAVAESDTDDQEEDEENSLGTEEESSKQTPEDSCSEGSTADMTNTAELLEQIPDLGQDVKDPEDCFTEGCVRRCPCCAVDTTQAPGKVWWRLRKTCYHIVEHSWFETFIIFMILLSSGALAFEDIYLEERKTIKVLLEYADKMFTYVFVLEMLLKWVAYGFKKYFTNAWCWLDFLIVDVSLVSLVANTLGFAEMGPIKSLRTLRALRPLRALSRFEGMRVVVNALVGAIPSIMNVLLVCLIFWLIFSIMGVNLFAGKFGRCINQTEGDLPLNYTIVNNKSQCESLNLTGELYWTKVKVNFDNVGAGYLALLQVATFKGWMDIMYAAVDSRGYEEQPQWEYNLYMYIYFVIFIIFGSFFTLNLFIGVIIDNFNQQKKKLGGQDIFMTEEQKKYYNAMKKLGSKKPQKPIPRPLNKYQGFIFDIVTKQAFDVTIMFLICLNMVTMMVETDDQSPEKINILAKINLLFVAIFTGECIVKLAALRHYYFTNSWNIFDFVVVILSIVGTVLSDIIQKYFFSPTLFRVIRLARIGRILRLIRGAKGIRTLLFALMMSLPALFNIGLLLFLVMFIYSIFGMANFAYVKWEAGIDDMFNFQTFANSMLCLFQITTSAGWDGLLSPILNTGPPYCDPTLPNSNGSRGDCGSPAVGILFFTTYIIISFLIVVNMYIAIILENFSVATEESTEPLSEDDFDMFYEIWEKFDPEATQFIEYSVLSDFADALSEPLRIAKPNQISLINMDLPMVSGDRIHCMDILFAFTKRVLGESGEMDALKIQMEEKFMAANPSKISYEPITTTLRRKHEEVSAMVIQRAFRRHLLQRSLKHASFLFRQQAGSGLSEEDAPEREGLIAYVMSENFSRPLGPPSSSSISSTSFPPSYDSVTRATSDNLQVRGSDYSHSEDLADFPPSPDRDRESIV

SEQ ID NO: 63923 - protein, 1962 aa, Homo sapiens; identical to SEQ ID NO: 63922

SEQ ID NO: 63924 - protein, 1983 aa, Homo sapiens
MANFLLPRGTSSFRRFTRESLAAIEKRMAEKQARGSTTLQESREGLPEEEAPRPQLDLQASKKLPDLYGNPPQELIGEPLEDLDPFYSTQKTFIVLNKGKTIFRFSATNALYVLSPFHPIRRAAVKILVHSLFNMLIMCTILTNCVFMAQHDPPPWTKYVEYTFTAIYTFESLVKILARGFCLHAFTFLRDPWNWLDFSVIIMAYVSENIKLGNLSALRTFRVLRALKTISVIPGLKTIVGALIQSVKKLADVMVLTVFCLSVFALIGLQLFMGNLRHKCVRNFTALNGTNGSVEADGLVWESLDLYLSDPENYLLKNGTSDVLLCGNSSDAGTCPEGYRCLKAGENPDHGYTSFDSFAWAFLALFRLMTQDCWERLYQQTLRSAGKIYMIFFMLVIFLGSFYLVNLILAVVAMAYEEQNQATIAETEEKEKRFQEAMEMLKKEHEALTIRGVDTVSRSSLEMSPLAPVNSHERRSKRRKRMSSGTEECGEDRLPKSDSEDGPRAMNHLSLTRGLSRTSMKPRSSRGSIFTFRRRDLGSEADFADDENSTAGESESHHTSLLVPWPLRRTSAQGQPSPGTSAPGHALHGKKNSTVDCNGVVSLLGAGDPEATSPGSHLLRPVMLEHPPDTTTPSEEPGGPQMLTSQAPCVDGFEEPGARQRALSAVSVLTSALEELEESRHKCPPCWNRLAQRYLIWECCPLWMSIKQGVKLVVMDPFTDLTITMCIVLNTLFMALEHYNMTSEFEEMLQVGNLVFTGIFTAEMTFKIIALDPYYYFQQGWNIFDSIIVILSLMELGLSRMSNLSVLRSFRLLRVFKLAKSWPTLNTLIKIIGNSVGALGNLTLVLAIIVFIFAVVGMQLFGKNYSELRDSDSGLLPRWHMMDFFHAFLIIFRILCGEWIETMWDCMEVSGQSLCLLVFLLVMVIGNLVVLNLFLALLLSSFSADNLTAPDEDREMNNLQLALARIQRGLRFVKRTTWDFCCGLLRQRPQKPAALAAQGQLPSCIATPYSPPPPETEKVPPTRKETRFEEGEQPGQGTPGDPEPVCVPIAVAESDTDDQEEDEENSLGTEEESSKQESQPVSGGPEAPPDSRTWSQVSATASSEAEASASQADWRQQWKAEPQAPGCGETPEDSCSEGSTADMTNTAELLEQIPDLGQDVKDPEDCFTEGCVRRCPCCAVDTTQAPGKVWWRLRKTCYHIVEHSWFETFIIFMILLSSGALAFEDIYLEERKTIKVLLEYADKMFTYVFVLEMLLKWVAYGFKKYFTNAWCWLDFLIVDVSLVSLVANTLGFAEMGPIKSLRTLRALRPLRALSRFEGMRVVVNALVGAIPSIMNVLLVCLIFWLIFSIMGVNLFAGKFGRCINQTEGDLPLNYTIVNNKSQCESLNLTGELYWTKVKVNFDNVGAGYLALLQVATFKGWMDIMYAAVDSRGYEEQPQWEYNLYMYIYFVIFIIFGSFFTLNLFIGVIIDNFNQQKKKLGGQDIFMTEEQKKYYNAMKKLGSKKPQKPIPRPLNKYQGFIFDIVTKQAFDVTIMFLICLNMVTMMVETDDQSPEKINILAKINLLFVAIFTGTVLSDIIQKYFFSPTLFRVIRLARIGRILRLIRGAKGIRTLLFALMMSLPALFNIGLLLFLVMFIYSIFGMANFAYVKWEAGIDDMFNFQTFANSMLCLFQITTSAGWDGLLSPILNTGPPYCDPTLPNSNGSRGDCGSPAVGILFFTTYIIISFLIVVNMYIAIILENFSVATEESTEPLSEDDFDMFYEIWEKFDPEATQFIEYSVLSDFADALSEPLRIAKPNQISLINMDLPMVSGDRIHCMDILFAFTKRVLGESGEMDALKIQMEEKFMAANPSKISYEPITTTLRRKHEEVSAMVIQRAFRRHLLQRSLKHASFLFRQQAGSGLSEEDAPEREGLIAYVMSENFSRPLGPPSSSSISSTSFPPSYDSVTRATSDNLQVRGSDYSHSEDLADFPPSPDRDRESIV

SEQ ID NO: 63925 - protein, 1682 aa, Homo sapiens
MLASPEPKGLVPFTKESFELIKQHIAKTHNEDHEEEDLKPTPDLEVGKKLPFIYGNLSQGMVSEPLEDVDPYYYKKKNTFIVLNKNRTIFRFNAASILCTLSPFNCIRRTTIKVLVHPFFQLFILISVLIDCVFMSLTNLPKWRPVLENTLLGIYTFEILVKLFARGVWAGSFSFLGDPWNWLDFSVTVFEVIIRYSPLDFIPTLQTARTLRILKIIPLNQGLKSLVGVLIHCLKQLIGVIILTLFFLSIFSLIGMGLFMGNLKHKCFRWPQENENETLHNRTGNPYYIRETENFYYLEGERYALLCGNRTDAGQCPEGYVCVKAGINPDQGFTNFDSFGWALFALFRLMAQDYPEVLYHQILYASGKVYMIFFVVVSFLFSFYMASLFLGILAMAYEEEKQRVGEISKKIEPKFQQTGKELQEGNETDEAKTIQIEMKKRSPISTDTSLDVLEDATLRHKEELEKSKKICPLYWYKFAKTFLIWNCSPCWLKLKEFVHRIIMAPFTDLFLIICIILNVCFLTLEHYPMSKQTNTLLNIGNLVFIGIFTAEMIFKIIAMHPYGYFQVGWNIFDSMIVFHGLIELCLANVAGMALLRLFRMLRIFKLGKYWPTFQILMWSLSNSWVALKDLVLLLFTFIFFSAAFGMKLFGKNYEEFVCHIDKDCQLPRWHMHDFFHSFLNVFRILCGEWVETLWDCMEVAGQSWCIPFYLMVILIGNLLVLYLFLALVSSFSSCKDVTAEENNEAKNLQLAVARIKKGINYVLLKILCKTQNVPKDTMDHVNEVYVKEDISDHTLSELSNTQDFLKDKEKSSGTEKNATENESQSLIPSPSVSETVPIASGESDIENLDNKEIQSKSGDGGSKEKIKQSSSSECSTVDIAISEEEEMFYGGERSKHLKNGCRRGSSLGQISGASKKGKIWQNIRKTCCKIVENNWFKCFIGLVTLLSTGTLAFEDIYMDQRKTIKILLEYADMIFTYIFILEMLLKWMAYGFKAYFSNGWYRLDFVVVIVFCLSLIGKTREELKPLISMKFLRPLRVLSQFERMKVVVRALIKTTLPTLNVFLVCLMIWLIFSIMGVDLFAGRFYECIDPTSGERFPSSEVMNKSRCESLLFNESMLWENAKMNFDNVGNGFLSLLQVATFNGWITIMNSAIDSVAVNIQPHFEVNIYMYCYFINFIIFGVFLPLSMLITVIIDNFNKHKIKLGGSNIFITVKQRKQYRRLKKLMYEDSQRPVPRPLNKLQGFIFDVVTSQAFNVIVMVLICFQAIAMMIDTDVQSLQMSIALYWINSIFVMLYTMECILKLIAFRCFYFTIAWNIFDFMVVIFSITGLCLPMTVGSYLVPPSLVQLILLSRIIHMLRLGKGPKVFHNLMLPLMLSLPALLNIILLIFLVMFIYAVFGMYNFAYVKKEAGINDVSNFETFGNSMLCLFQVAIFAGWDGMLDAIFNSKWSDCDPDKINPGTQVRGDCGNPSVGIFYFVSYILISWLIIVNMYIVVVMEFLNIASKKKNKTLSEDDFRKFFQVWKRFDPDRTQYIDSSKLSDFAAALDPPLFMAKPNKGQLIALDLPMAVGDRIHCLDILLAFTKRVMGQDVRMEKVVSEIESGFLLANPFKITCEPITTTLKRKQEAVSATIIQRAYKNYRLRRNDKNTSDIHMIDGDRDVHATKEGAYFDKAKEKSPIQSQI

SEQ ID NO: 63926 - protein, 1682 aa, Homo sapiens; identical to SEQ ID NO: 63925

SEQ ID NO: 63927 - protein, 863 aa, Homo sapiens
MLASPEPKGLVPFTKESFELIKQHIAKTHNEDHEEEDLKPTPDLEVGKKLPFIYGNLSQGMVSEPLEDVDPYYYKKKNTFIVLNKNRTIFRFNAASILCTLSPFNCIRRTTIKVLVHPFFQLFILISVLIDCVFMSLTNLPKWRPVLENTLLGIYTFEILVKLFARGVWAGSFSFLGDPWNWLDFSVTVFEVIIRYSPLDFIPTLQTARTLRILKIIPLNQGLKSLVGVLIHCLKQLIGVIILTLFFLSIFSLIGMGLFMGNLKHKCFRWPQENENETLHNRTGNPYYIRETENFYYLEGERYALLCGNRTDAGQCPEGYVCVKAGINPDQGFTNFDSFGWALFALFRLMAQDYPEVLYHQILYASGKVYMIFFVVVSFLFSFYMASLFLGILAMAYEEEKQRVGEISKKIEPKFQQTGKELQEGNETDEAKTIQIEMKKRSPISTDTSLDVLEDATLRHKEELEKSKKICPLYWYKFAKTFLIWNCSPCWLKLKEFVHRIIMAPFTDLFLIICIILNVCFLTLEHYPMSKQTNTLLNIGNLVFIGIFTAEMIFKIIAMHPYGYFQVGWNIFDSMIVFHGLIELCLANVAGMALLRLFRMLRIFKLGKYWPTFQILMWSLSNSWVALKDLVLLLFTFIFFSAAFGMKLFGKNYEEFVCHIDKDCQLPRWHMHDFFHSFLNVFRILCGEWVETLWDCMEVAGQSWCIPFYLMVILIGNLLVLYLFLALVSSFSSCKDVTAEENNEAKNLQLAVARIKKGINYVLLKILCKTQNVPKDTMDHVNEVYVKEDISDHTLSELSNTQDFLKDKEKSSGTEKNATENESQSLIPSPSVSETVPIASGESDIENLDNKEIQSKSGDGGSK

SEQ ID NO: 63928 - protein, 402 aa, Homo sapiens
MLASPEPKGLVPFTKESFELIKQHIAKTHNEDHEEEDLKPTPDLEVGKKLPFIYGNLSQGMVSEPLEDVDPYYYKKKNTFIVLNKNRTIFRFNAASILCTLSPFNCIRRTTIKVLVHPFFQLFILISVLIDCVFMSLTNLPKWRPVLENTLLGIYTFEILVKLFARGVWAGSFSFLGDPWNWLDFSVTVFEVIIRYSPLDFIPTLQTARTLRILKIIPLNQGLKSLVGVLIHCLKQLIGVIILTLFFLSIFSLIGMGLFMGNLKHKCFRWPQENENETLHNRTGNPYYIRETENFYYLEGERYALLCGNRTDAGQCPEGYVCVKAGINPDQGFTNFDSFGWALFALFRLMAQDYPEVLYHQILYASGKVYMIFFVVVSFLFSFYMASLFLGILAMAYEEEKQ

SEQ ID NO: 63929 - protein, 1956 aa, Homo sapiens
MEFPIGSLETNNFRRFTPESLVEIEKQIAAKQGTKKAREKHREQKDQEEKPRPQLDLKACNQLPKFYGELPAELIGEPLEDLDPFYSTHRTFMVLNKGRTISRFSATRALWLFSPFNLIRRTAIKVSVHSWFSLFITVTILVNCVCMTRTDLPEKIEYVFTVIYTFEALIKILARGFCLNEFTYLRDPWNWLDFSVITLAYVGTAIDLRGISGLRTFRVLRALKTVSVIPGLKVIVGALIHSVKKLADVTILTIFCLSVFALVGLQLFKGNLKNKCVKNDMAVNETTNYSSHRKPDIYINKRGTSDPLLCGNGSDSGHCPDGYICLKTSDNPDFNYTSFDSFAWAFLSLFRLMTQDSWERLYQQTLRTSGKIYMIFFVLVIFLGSFYLVNLILAVVTMAYEEQNQATTDEIEAKEKKFQEALEMLRKEQEVLAALGIDTTSLHSHNGSPLTSKNASERRHRIKPRVSEGSTEDNKSPRSDPYNQRRMSFLGLASGKRRASHGSVFHFRSPGRDISLPEGVTDDGVFPGDHESHRGSLLLGGGAGQQGPLPRSPLPQPSNPDSRHGEDEHQPPPTSELAPGAVDVSAFDAGQKKTFLSAEYLDEPFRAQRAMSVVSIITSVLEELEESEQKCPPCLTSLSQKYLIWDCCPMWVKLKTILFGLVTDPFAELTITLCIVVNTIFMAMEHHGMSPTFEAMLQIGNIVFTIFFTAEMVFKIIAFDPYYYFQKKWNIFDCIIVTVSLLELGVAKKGSLSVLRSFRLLRVFKLAKSWPTLNTLIKIIGNSVGALGNLTIILAIIVFVFALVGKQLLGENYRNNRKNISAPHEDWPRWHMHDFFHSFLIVFRILCGEWIENMWACMEVGQKSICLILFLTVMVLGNLVVLNLFIALLLNSFSADNLTAPEDDGEVNNLQVALARIQVFGHRTKQALCSFFSRSCPFPQPKAEPELVVKLPLSSSKAENHIAANTARGSSGGLQAPRGPRDEHSDFIANPTVWVSVPIAEGESDLDDLEDDGGEDAQSFQQEVIPKGQQEQLQQVERCGDHLTPRSPGTGTSSEDLAPSLGETWKDESVPQVPAEGVDDTSSSEGSTVDCLDPEEILRKIPELADDLEEPDDCFTEGCIRHCPCCKLDTTKSPWDVGWQVRKTCYRIVEHSWFESFIIFMILLSSGSLAFEDYYLDQKPTVKALLEYTDRVFTFIFVFEMLLKWVAYGFKKYFTNAWCWLDFLIVNISLISLTAKILEYSEVAPIKALRTLRALRPLRALSRFEGMRVVVDALVGAIPSIMNVLLVCLIFWLIFSIMGVNLFAGKFWRCINYTDGEFSLVPLSIVNNKSDCKIQNSTGSFFWVNVKVNFDNVAMGYLALLQVATFKGWMDIMYAAVDSREVNMQPKWEDNVYMYLYFVIFIIFGGFFTLNLFVGVIIDNFNQQKKKLGGQDIFMTEEQKKYYNAMKKLGSKKPQKPIPRPLNKFQGFVFDIVTRQAFDITIMVLICLNMITMMVETDDQSEEKTKILGKINQFFVAVFTGECVMKMFALRQYYFTNGWNVFDFIVVVLSIASLIFSAILKSLQSYFSPTLFRVIRLARIGRILRLIRAAKGIRTLLFALMMSLPALFNIGLLLFLVMFIYSIFGMSSFPHVRWEAGIDDMFNFQTFANSMLCLFQITTSAGWDGLLSPILNTGPPYCDPNLPNSNGTRGDCGSPAVGIIFFTTYIIISFLIMVNMYIAVILENFNVATEESTEPLSEDDFDMFYETWEKFDPEATQFITFSALSDFADTLSGPLRIPKPNRNILIQMDLPLVPGDKIHCLDILFAFTKNVLGESGELDSLKANMEEKFMATNLSKSSYEPIATTLRWKQEDISATVIQKAYRSYVLHRSMALSNTPCVPRAEEEAASLPDEGFVAFTANENCVLPDKSETASATSFPPSYESVTRGLSDRVNMRTSSSIQNEDEATSMELIAPGP

SEQ ID NO: 63930 - protein, 1791 aa, Homo sapiens
MDDRCYPVIFPDERNFRPFTSDSLAAIEKRIAIQKEKKKSKDQTGEVPQPRPQLDLKASRKLPKLYGDIPRELIGKPLEDLDPFYRNHKTFMVLNRKRTIYRFSAKHALFIFGPFNSIRSLAIRVSVHSLFSMFIIGTVIINCVFMATGPAKNSNSNNTDIAECVFTGIYIFEALIKILARGFILDEFSFLRDPWNWLDSIVIGIAIVSYIPGITIKLLPLRTFRVFRALKAISVVSRLKVIVGALLRSVKKLVNVIILTFFCLSIFALVGQQLFMGSLNLKCISRDCKNISNPEAYDHCFEKKENSPEFKMCGIWMGNSACSIQYECKHTKINPDYNYTNFDNFGWSFLAMFRLMTQDSWEKLYQQTLRTTGLYSVFFFIVVIFLGSFYLINLTLAVVTMAYEEQNKNVAAEIEAKEKMFQEAQQLLKEEKEALVAMGIDRSSLTSLETSYFTPKKRKLFGNKKRKSFFLRESGKDQPPGSDSDEDCQKKPQLLEQTKRLSQNLSLDHFDEHGDPLQRQRALSAVSILTITMKEQEKSQEPCLPCGENLASKYLVWNCCPQWLCVKKVLRTVMTDPFTELAITICIIINTVFLAMEHHKMEASFEKMLNIGNLVFTSIFIAEMCLKIIALDPYHYFRRGWNIFDSIVALLSFADVMNCVLQKRSWPFLRSFRVLRVFKLAKSWPTLNTLIKIIGNSVGALGSLTVVLVIVIFIFSVVGMQLFGRSFNSQKSPKLCNPTGPTVSCLRHWHMGDFWHSFLVVFRILCGEWIENMWECMQEANASSSLCVIVFILITVIGKLVVLNLFIALLLNSFSNEERNGNLEGEARKTKVQLALDRFRRAFCFVRHTLEHFCHKWCRKQNLPQQKEVAGGCAAQSKDIIPLVMEMKRGSETQEELGILTSVPKTLGVRHDWTWLAPLAEEEDDVEFSGEDNAQRITQPEPEQQAYELHQENKKPTSQRVQSVEIDMFSEDEPHLTIQDPRKKSDVTSILSECSTIDLQDGFGWLPEMVPKKQPERCLPKGFGCCFPCCSVDKRKPPWVIWWNLRKTCYQIVKHSWFESFIIFVILLSSGALIFEDVHLENQPKIQELLNCTDIIFTHIFILEMVLKWVAFGFGKYFTSAWCCLDFIIVIVSVTTLINLMELKSFRTLRALRPLRALSQFEGMKVVVNALIGAIPAILNVLLVCLIFWLVFCILGVYFFSGKFGKCINGTDSVINYTIITNKSQCESGNFSWINQKVNFDNVGNAYLALLQVATFKGWMDIIYAAVDSTEKEQQPEFESNSLGYIYFVVFIIFGSFFTLNLFIGVIIDNFNQQQKKLGGQDIFMTEEQKKYYNAMKKLGSKKPQKPIPRPLNKCQGLVFDIVTSQIFDIIIISLIILNMISMMAESYNQPKAMKSILDHLNWVFVVIFTLECLIKIFALRQYYFTNGWNLFDCVVVLLSIVSTMISTLENQEHIPFPPTLFRIVRLARIGRILRLVRAARGIRTLLFALMMSLPSLFNIGLLLFLIMFIYAILGMNWFSKVNPESGIDDIFNFKTFASSMLCLFQISTSAGWDSLLSPMLRSKESCNSSSENCHLPGIATSYFVSYIIISFLIVVNMYIAVILENFNTATEESEDPLGEDDFDIFYEVWEKFDPEATQFIKYSALSDFADALPEPLRVAKPNKYQFLVMDLPMVSEDRLHCMDILFAFTARVLGGSDGLDSMKAMMEEKFMEANPLKKLYEPIVTTTKRKEEERGAAIIQKAFRKYMMKVTKGDQGDQNDLENGPHSPLQTLCNGDLSSFGVAKGKVHCD

SEQ ID NO: 63931 - protein, 1444 aa, Homo sapiens
MDDRCYPVIFPDERNFRPFTSDSLAAIEKRIAIQKEKKKSKDQTGEVPQPRPQLDLKASRKLPKLYGDIPRELIGKPLEDLDPFYRNHKTFMVLNRKRTIYRFSAKHALFIFGPFNSIRSLAIRVSVHSLFSMFIIGTVIINCVFMATGPAKNSNSNNTDIAECVFTGIYIFEALIKILARGFILDEFSFLRDPWNWLDSIVIGIAIVSYIPGITIKLLPLRTFRVFRALKAISVVSRLKVIVGALLRSVKKLVNVIILTFFCLSIFALVGQQLFMGSLNLKCISRDCKNISNPEAYDHCFEKKENSPEFKMCGIWMGNSACSIQYECKHTKINPDYNYTNFDNFGWSFLAMFRLMTQDSWEKLYQQTLRTTGLYSVFFFIVVIFLGSFYLINLTLAVVTMAYEEQNKNVAAEIEAKEKMFQEAQQLLKEEKEALVAMGIDRSSLTSLETSYFTPKKRKLFGNKKRKSFFLRESGKDQPPGSDSDEDCQKKPQLLEQTKRLSQNLSLDHFDEHGDPLQRQRALSAVSILTITMKEQEKSQEPCLPCGENLASKYLVWNCCPQWLCVKKVLRTVMTDPFTELAITICIIINTVFLAMEHHKMEASFEKMLNIGNLVFTSIFIAEMCLKIIALDPYHYFRRGWNIFDSIVALLSFADVMNCVLQKRSWPFLRSFRVLRVFKLAKSWPTLNTLIKIIGNSVGALGSLTVVLVIVIFIFSVVGMQLFGRSFNSQKSPKLCNPTGPTVSCLRHWHMGDFWHSFLVVFRILCGEWIENMWECMQEANASSSLCVIVFILITVIGKLVVLNLFIALLLNSFSNEERNGNLEGEARKTKVQLALDRFRRAFCFVRHTLEHFCHKWCRKQNLPQQKEVAGGCAAQSKDIIPLVMEMKRGSETQEELGILTSVPKTLGVRHDWTWLAPLAEEEDDVEFSGEDNAQRITQPEPEQQAYELHQENKKPTSQRVQSVEIDMFSEDEPHLTIQDPRKKSDVTSILSECSTIDLQDGFGWLPEMVPKKQPERCLPKGFGCCFPCCSVDKRKPPWVIWWNLRKTCYQIVKHSWFESFIIFVILLSSGALIFEDVHLENQPKIQELLNCTDIIFTHIFILEMVLKWVAFGFGKYFTSAWCCLDFIIVIVSVTTLINLMELKSFRTLRALRPLRALSQFEGMKVVVNALIGAIPAILNVLLVCLIFWLVFCILGVYFFSGKFGKCINGTDSVINYTIITNKSQCESGNFSWINQKVNFDNVGNAYLALLQVATFKGWMDIIYAAVDSTEKEQQPEFESNSLGYIYFVVFIIFGSFFTLNLFIGVIIDNFNQQQKKLGGQDIFMTEEQKKYYNAMKKLGSKKPQKPIPRPLNKCQGLVFDIVTSQIFDIIIISLIILNMISMMAESYNQPKAMKSILDHLNWVFVVIFTLECLIKIFALRQYYFTNGWNLFDCVVVLLSIVSK

SEQ ID NO: 63932 - protein, 1791 aa, Homo sapiens; identical to SEQ ID NO: 63930

SEQ ID NO: 63933 - protein, 1738 aa, Homo sapiens
MLKRKQSSRVEAQPVTDFGPDESLSDNADILWINKPWVHSLLRICAIISVISVCMNTPMTFEHYPPLQYVTFTLDTLLMFLYTAEMIAKMHIRGIVKGDSSYVKDRWCVFDGFMVFCLWVSLVLQVFEIADIVDQMSPWGMLRIPRPLIMIRAFRIYFRFELPRTRITNILKRSGEQIWSVSIFLLFFLLLYGILGVQMFGTFTYHCVVNDTKPGNVTWNSLAIPDTHCSPELEEGYQCPPGFKCMDLEDLGLSRQELGYSGFNEIGTSIFTVYEAASQEGWVFLMYRAIDSFPRWRSYFYFITLIFFLAWLVKNVFIAVIIETFAEIRVQFQQMWGSRSSTTSTATTQMFHEDAAGGWQLVAVDVNKPQGRAPACLQKMMRSSVFHMFILSMVTVDVIVAASNYYKGENFRRQYDEFYLAEVAFTVLFDLEALLKIWCLGFTGYISSSLHKFELLLVIGTTLHVYPDLYHSQFTYFQVLRVVRLIKISPALEDFVYKIFGPGKKLGSLVVFTASLLIVMSAISLQMFCFVEELDRFTTFPRAFMSMFQILTQEGWVDVMDQTLNAVGHMWAPVVAIYFILYHLFATLILLSLFVAVILDNLELDEDLKKLKQLKQSEANADTKEKLPLRLRIFEKFPNRPQMVKISKLPSDFTVPKIRESFMKQFIDRQQQDTCCLLRSLPTTSSSSCDHSKRSAIEDNKYIDQKLRKSVFSIRARNLLEKETAVTKILRACTRQRMLSGSFEGQPAKERSILSVQHHIRQERRSLRHGSNSQRISRGKSLETLTQDHSNTVRYRNAQREDSEIKMIQEKKEQAEMKRKVQEEELRENHPYFDKPLFIVGREHRFRNFCRVVVRARFNASKTDPVTGAVKNTKYHQLYDLLGLVTYLDWVMIIVTICSCISMMFESPFRRVMHAPTLQIAEYVFVIFMSIELNLKIMADGLFFTPTAVIRDFGGVMDIFIYLVSLIFLCWMPQNVPAESGAQLLMVLRCLRPLRIFKLVPQMRKVVRELFSGFKEIFLVSILLLTLMLVFASFGVQLFAGKLAKCNDPNIIRREDCNGIFRINVSVSKNLNLKLRPGEKKPGFWVPRVWANPRNFNFDNVGNAMLALFEVLSLKGWVEVRDVIIHRVGPIHGIYIHVFVFLGCMIGLTLFVGVVIANFNENKGTALLTVDQRRWEDLKSRLKIAQPLHLPPRPDNDGFRAKMYDITQHPFFKRTIALLVLAQSVLLSVKWDVEDPVTVPLATMSVVFTFIFVLEVTMKIIAMSPAGFWQSRRNRYDLLVTSLGVVWVVLHFALLNAYTYMMGACVIVFRFFSICGKHVTLKMLLLTVVVSMYKSFFIIVGMFLLLLCYAFAGVVLFGTVKYGENINRHANFSSAGKAITVLFRIVTGEDWNKIMHDCMVQPPFCTPDEFTYWATDCGNYAGALMYFCSFYVIIAYIMLNLLVAIIVENFSLFYSTEEDQLLSYNDLRHFQIIWNMVDDKREGVIPTFRVKFLLRLLRGRLEVDLDKDKLLFKHMCYEMERLHNGGDVTFHDVLSMLSYRSVDIRKSLQLEELLAREQLEYTIEEEVAKQTIRMWLKKCLKRIRAKQQQSCSIIHSLRESQQQELSRFLNPPSIETTQPSEDTNANSQDNSMQPETSSQQQLLSPTLSDRGGSRQDAADAGKPQRKFGQWRLPSAPKPISHSVSSVNLRFGGRTTMKSVVCKMNPMTDAASCGSEVKKWWTRQLTVESDESGDDLLDI

SEQ ID NO: 63934 - protein, 668 aa, Homo sapiens
MLKRKQSSRVEAQPVTDFGPDESLSDNADILWINKPWVHSLLRICAIISVISVCMNTPMTFEHYPPLQYVTFTLDTLLMFLYTAEMIAKMHIRGIVKGDSSYVKDRWCVFDGFMVFCLWVSLVLQVFEIADIVDQMSPWGMLRIPRPLIMIRAFRIYFRFELPRTRITNILKRSGEQIWSVSIFLLFFLLLYGILGVQMFGTFTYHCVVNDTKPGNVTWNSLAIPDTHCSPELEEGYQCPPGFKCMDLEDLGLSRQELGYSGFNEIGTSIFTVYEAASQEGWVFLMYRAIDSFPRWRSYFYFITLIFFLAWLVKNVFIAVIIETFAEIRVQFQQMWGSRSSTTSTATTQMFHEDAAGGWQLVAVDVNKPQGRAPACLQKMMRSSVFHMFILSMVTVDVIVAASNYYKGENFRRQYDEFYLAEVAFTVLFDLEALLKIWCLGFTGYISSSLHKFELLLVIGTTLHVYPDLYHSQFTYFQVLRVVRLIKISPALEDFVYKIFGPGKKLGSLVVFTASLLIVMSAISLQMFCFVEELDRFTTFPRAFMSMFQILTQEGWVDVMDQTLNAVGHMWAPVVAIYFILYHLFATLPPSLIRDLCGTQDACPSCLPLQPPNPLPGSQTLARLTHQALTTPPGMRSSQLFSKISLLLGICVAWESILGSLSLSHNLR

SEQ ID NO: 63935 - protein, 218 aa, Homo sapiens
MLKRKQSSRVEAQPVTDFGPDESLSDNADILWINKPWVHSLLRICAIISVISVCMNTPMTFEHYPPLQYVTFTLDTLLMFLYTAEMIAKMHIRGIVKGDSSYVKDRWCVFDGFMVFCLWVSLVLQVFEIADIVDQMSPWGMLRIPRPLIMIRAFRIYFRFELPRTRITNILKRSGEQIWSVSIFLLFFLLLYGILGVQMFGTFTYHCVVNDTKPGLSL

SEQ ID NO: 63936 - protein, 218 aa, Homo sapiens
MLKRKQSSRVEAQPVTDFGPDESLSDNADILWINKPWVHSLLRICAIISVISVCMNTPMTFEHYPPLQYVTFTLDTLLMFLYTAEMIAKMHIRGIVKGDSSYVKDRWCVFDGFMVFCLWVSLVLQVFEIADIVDQMSPWGMLRIPRPLIMIRAFRIYFRFELPRTRITNILKRSGEQIWSVSIFLLFFLLLYGILGVQMFGTFTYHCVVNDTKPGLSI

SEQ ID NO: 63937 - protein, 574 aa, Homo sapiens
MASTEGANNMPKQVEVRMHDSHLGSEEPKHRHLGLRLCDKLGKNLLLTLTVFGVILGAVCGGLLRLASPIHPDVVMLIAFPGDILMRMLKMLILPLIISSLITGLSGLDAKASGRLGTRAMVYYMSTTIIAAVLGVILVLAIHPGNPKLKKQLGPGKKNDEVSSLDAFLDLIRNLFPENLVQACFQQIQTVTKKVLVAPPPDEEANATSAVVSLLNETVTEVPEETKMVIKKGLEFKDGMNVLGLIGFFIAFGIAMGKMGDQAKLMVDFFNILNEIVMKLVIMIMWYSPLGIACLICGKIIAIKDLEVVARQLGMYMVTVIIGLIIHGGIFLPLIYFVVTRKNPFSFFAGIFQAWITALGTASSAGTLPVTFRCLEENLGIDKRVTRFVLPVGATINMDGTALYEAVAAIFIAQMNGVVLDGGQIVTVSLTATLASVGAASIPSAGLVTMLLILTAVGLPTEDISLLVAVDWLLDRMRTSVNVVGDSFGAGIVYHLSKSELDTIDSQHRVHEDIEMTKTQSIYDDMKNHRESNSNQCVYAAHNSVIVDECKVTLAANGKSADCSVEEEPWKREK

SEQ ID NO: 63938 - protein, 565 aa, Homo sapiens
MPKQVEVRMHDSHLGSEEPKHRHLGLRLCDKLGKNLLLTLTVFGVILGAVCGGLLRLASPIHPDVVMLIAFPGDILMRMLKMLILPLIISSLITGLSGLDAKASGRLGTRAMVYYMSTTIIAAVLGVILVLAIHPGNPKLKKQLGPGKKNDEVSSLDAFLDLIRNLFPENLVQACFQQIQTVTKKVLVAPPPDEEANATSAVVSLLNETVTEVPEETKMVIKKGLEFKDGMNVLGLIGFFIAFGIAMGKMGDQAKLMVDFFNILNEIVMKLVIMIMWYSPLGIACLICGKIIAIKDLEVVARQLGMYMVTVIIGLIIHGGIFLPLIYFVVTRKNPFSFFAGIFQAWITALGTASSAGTLPVTFRCLEENLGIDKRVTRFVLPVGATINMDGTALYEAVAAIFIAQMNGVVLDGGQIVTVSLTATLASVGAASIPSAGLVTMLLILTAVGLPTEDISLLVAVDWLLDRMRTSVNVVGDSFGAGIVYHLSKSELDTIDSQHRVHEDIEMTKTQSIYDDMKNHRESNSNQCVYAAHNSVIVDECKVTLAANGKSADCSVEEEPWKREK

SEQ ID NO: 63939 - protein, 565 aa, Homo sapiens; identical to SEQ ID NO: 63938

SEQ ID NO: 63940 - protein, 542 aa, Homo sapiens
MTKSNGEEPKMGGRMERFQQGVRKRTLLAKKKVQNITKEDVKSYLFRNAFVLLTVTAVIVGTILGFTLRPYRMSYREVKYFSFPGELLMRMLQMLVLPLIISSLVTGMAALDSKASGKMGMRAVVYYMTTTIIAVVIGIIIVIIIHPGKGTKENMHREGKIVRVTAADAFLDLIRNMFPPNLVEACFKQFKTNYEKRSFKVPIQANETLVGAVINNVSEAMETLTRITEELVPVPGSVNGVNALGLVVFSMCFGFVIGNMKEQGQALREFFDSLNEAIMRLVAVIMWYAPVGILFLIAGKIVEMEDMGVIGGQLAMYTVTVIVGLLIHAVIVLPLLYFLVTRKNPWVFIGGLLQALITALGTSSSSATLPITFKCLEENNGVDKRVTRFVLPVGATINMDGTALYEALAAIFIAQVNNFELNFGQIITISITATAASIGAAGIPQAGLVTMVIVLTSVGLPTDDITLIIAVDWFLDRLRTTTNVLGDSLGAGIVEHLSRHELKNRDVEMGNSVIEENEMKKPYQLIAQDNETEKPIDSETKM

SEQ ID NO: 63941 - protein, 497 aa, Homo sapiens
MTKSNGEEPKMGGRMERFQQGVRKRTLLAKKKVQNITKEDVKSYLFRNAFVLLTVTAVIVGTILGFTLRPYRMSYREVKYFSFPGELLMRMLQMLVLPLIISSLVTGMAALDSKASGKMGMRAVVYYMTTTIIAVVIGIIIVIIIHPGKGTKENMHREGKIVRVTAADAFLDLIRNMFPPNLVEACFKQFKTNYEKRSFKVPIQANETLVGAVINNVSEAMETLTRITEELVPVPGSVNGVNALGLVVFSMCFGFVIGNMKEQGQALREFFDSLNEAIMRLVAVIMWYAPVGILFLIAGKIVEMEDMGVIGGQLAMYTVTVIVGLLIHAVIVLPLLYFLVTRKNPWVFIGGLLQALITALGTSSSSATLPITFKCLEENNGVDKRVTRFVLPVGATINMDGTALYEALAAIFIAQVNNFELNFGQIITIRDRLRTTTNVLGDSLGAGIVEHLSRHELKNRDVEMGNSVIEENEMKKPYQLIAQDNETEKPIDSETKM

SEQ ID NO: 63942 - protein, 115 aa, Homo sapiens
MTKSNGEEPKMGGRMERFQQGVRKRTLLAKKKVQNITKEDVKSYLFRNAFVLLTVTAVIVDEKTEAQILTTQLMNTEWDSNPPFRLQVLIHHTVLGAITPILALLQQFAEGLPEV

SEQ ID NO: 63943 - protein, 490 aa, Homo sapiens
MTKSNGEEPKMGGRMERFQQGVRKRTLLAKKKVQNITKEDVKSYLFRNAFVLLTGMAALDSKASGKMGMRAVVYYMTTTIIAVVIGIIIVIIIHPGKGTKENMHREGKIVRVTAADAFLDLIRNMFPPNLVEACFKQFKTNYEKRSFKVPIQANETLVGAVINNVSEAMETLTRITEELVPVPGSVNGVNALGLVVFSMCFGFVIGNMKEQGQALREFFDSLNEAIMRLVAVIMWYAPVGILFLIAGKIVEMEDMGVIGGQLAMYTVTVIVGLLIHAVIVLPLLYFLVTRKNPWVFIGGLLQALITALGTSSSSATLPITFKCLEENNGVDKRVTRFVLPVGATINMDGTALYEALAAIFIAQVNNFELNFGQIITISITATAASIGAAGIPQAGLVTMVIVLTSVGLPTDDITLIIAVDWFLDRLRTTTNVLGDSLGAGIVEHLSRHELKNRDVEMGNSVIEENEMKKPYQLIAQDNETEKPIDSETKM

SEQ ID NO: 63944 - protein, 107 aa, Homo sapiens
MTKSNGEEPKMGGRMERFQQGVRKRTLLAKKKVQNITKEDVKSYLFRNAFVLLTVTAVIVGTILGFTLRPYRMSYREVKYFSFPGELLMRMLQMLVLPLIISSLVTG

SEQ ID NO: 63945 - protein, 107 aa, Homo sapiens; identical to SEQ ID NO: 63944

SEQ ID NO: 63946 - protein, 101 aa, Homo sapiens
MTKSNGEEPKMGGRMERFQQGVRKRTLLAKKKVQNITKEDVKSYLFRNAFVLLTVTAVIVGTILGFTLRPYRMSYREVKYFSFPGELLMRMLQMLVLPLII

SEQ ID NO: 63947 - protein, 532 aa, Homo sapiens
MEKSNETNGYLDSAQAGPAAGPGAPGTAAGRARRCAGFLRRQALVLLTVSGVLAGAGLGAALRGLSLSRTQVTYLAFPGEMLLRMLRMIILPLVVCSLVSGAASLDASCLGRLGGIAVAYFGLTTLSASALAVALAFIIKPGSGAQTLQSSDLGLEDSGPPPVPKETVDSFLDLARNLFPSNLVVAAFRTYATDYKVVTQNSSSGNVTHEKIPIGTEIEGMNILGLVLFALVLGVALKKLGSEGEDLIRFFNSLNEATMVLVSWIMWYVPVGIMFLVGSKIVEMKDIIVLVTSLGKYIFASILGHVIHGGIVLPLIYFVFTRKNPFRFLLGLLAPFATAFATCSSSATLPSMMKCIEENNGVDKRISRFILPIGATVNMDGAAIFQCVAAVFIAQLNNVELNAGQIFTILVTATASSVGAAGVPAGGVLTIAIILEAIGLPTHDLPLILAVDWIVDRTTTVVNVEGDALGAGILHHLNQKATKKGEQELAEVKVEAIPNCKSEEETSPLVTHQNPAGPVASAPELESKESVL

SEQ ID NO: 63948 - protein, 452 aa, Homo sapiens
MLLRMLRMIILPLVVCSLVSGAASLDASCLGRLGGIAVAYFGLTTLSASALAVALAFIIKPGSGAQTLQSSDLGLEDSGPPPVPKETVDSFLDLARNLFPSNLVVAAFRTYATDYKVVTQNSSSGNVTHEKIPIGTEIEGMNILGLVLFALVLGVALKKLGSEGEDLIRFFNSLNEATMVLVSWIMWYVPVGIMFLVGSKIVEMKDIIVLVTSLGKYIFASILGHVIHGGIVLPLIYFVFTRKNPFRFLLGLLAPFATAFATCSSSATLPSMMKCIEENNGVDKRISRFILPIGATVNMDGAAIFQCVAAVFIAQLNNVELNAGQIFTILVTATASSVGAAGVPAGGVLTIAIILEAIGLPTHDLPLILAVDWIVDRTTTVVNVEGDALGAGILHHLNQKATKKGEQELAEVKVEAIPNCKSEEETSPLVTHQNPAGPVASAPELESKESVL

SEQ ID NO: 63949 - protein, 234 aa, Homo sapiens
MNILGLVLFALVLGVALKKLGSEGEDLIRFFNSLNEATMVLVSWIMCSATLPSMMKCIEENNGVDKRISRFILPIGATVNMDGAAIFQCVAAVFIAQLNNVELNAGQIFTILVTATASSVGAAGVPAGGVLTIAIILEAIGLPTHDLPLILAVDWIVDRTTTVVNVEGDALGAGILHHLNQKATKKGEQELAEVKVEAIPNCKSEEETSPLVTHQNPAGPVASAPELESKESVL

SEQ ID NO: 63950 - protein, 524 aa, Homo sapiens
MGKPARKGCEWKRFLKNNWVLLSTVAAVVLGITTGVLVREHSNLSTLEKFYFAFPGEILMRMLKLIILPLIISSMITGVAALDSNVSGKIGLRAVVYYFCTTLIAVILGIVLVVSIKPGVTQKVGEIARTGSTPEVSTVDAMLDLIRNMFPENLVQACFQQYKTKREEVKPPSDPEMNMTEESFTAVMTTAISKNKTKEYKIVGMYSDGINVLGLIVFCLVFGLVIGKMGEKGQILVDFFNALSDATMKIVQIIMCYMPLGILFLIAGKIIEVEDWEIFRKLGLYMATVLTGLAIHSIVILPLIYFIVVRKNPFRFAMGMAQALLTALMISSSSATLPVTFRCAEENNQVDKRITRFVLPVGATINMDGTALYEAVAAVFIAQLNDLDLGIGQIITISITATSASIGAAGVPQAGLVTMVIVLSAVGLPAEDVTLIIAVDWLLDRFRTMVNVLGDAFGTGIVEKLSKKELEQMDVSSEVNIVNPFALESTILDNEDSDTKKSYVNGGFAVDKSDTISFTQTSQF

SEQ ID NO: 63951 - protein, 242 aa, Homo sapiens
  VARIANT 1: note = MOD_RES - Any amino acid
XFFNALSDATMKIVQIIMCYMPLGILFLIAGKIIEVEDWEIFRKLGLYMATVLTGLAIHSIVILPLIYFIVVRKNPFRFAMGMAQALLTALMISSSSATLPVTFRCAEENNQVDKRITRFVLPVGATINMDGTALYEAVAAVFIAQLNDLDLGIGQIITIRDRFRTMVNVLGDAFGTGIVEKLSKKELEQMDVSSEVNIVNPFALESTILDNEDSDTKKSYVNGGFAVDKSDTISFTQTSQF

SEQ ID NO: 63952 - protein, 548 aa, Homo sapiens
ETPVLPIMVADPPRDSKGLAAAEPTANGGLALASIEDQGAAAGGYCGSRDQVRRCLRANLLVLLTVVAVVAGVALGLGVSGAGGALALGPERLSAFVFPGELLLRLLRMIILPLVVCSLIGGAASLDPGALGRLGAWALLFFLVTTLLASALGVGLALALQPGAASAAINASVGAAGSAENAPSKEVLDSFLDLARNIFPSNLVSAAFRSYSTTYEERNITGTRVKVPVGQEVEGMNILGLVVFAIVFGVALRKLGPEGELLIRFFNSFNEATMVLVSWIMWYAPVGIMFLVAGKIVEMEDVGLLFARLGKYILCCLLGHAIHGLLVLPLIYFLFTRKNPYRFLWGIVTPLATAFGTSSSSATLPLMMKCVEENNGVAKHISRFILPIGATVNMDGAALFQCVAAVFIAQLSQQSLDFVKIITILVTATASSVGAAGIPAGGVLTLAIILEAVNLPVDHISLILAVDWLVDRSCTVLNVEGDALGAGLLQNYVDRTESRSTEPELIQVKSELPLDPLPVPTEEGNPLLKHYRGPAGDATVASEKESVM

SEQ ID NO: 63953 - protein, 313 aa, Homo sapiens
MNILGLVVFAIVFGVALRKLGPEGELLIRFFNSFNEATMVLVSWIMWYAPVGIMFLVAGKIVEMEDVGLLFARLGKYILCCLLGHAIHGLLVLPLIYFLFTRKNPYRFLWGIVTPLATAFGTSSSSATLPLMMKCVEENNGVAKHISRFILPIGATVNMDGAALFQCVAAVFIAQLSQQSLDFVKIITILVTATASSVGAAGIPAGGVLTLAIILEAVNLPVDHISLILAVDWLVDRSCTVLNVEGDALGAGLLQNYVDRTESRSTEPELIQVKSELPLDPLPVPTEEGNPLLKHYRGPAGDATVASEKESVM

SEQ ID NO: 63954 - protein, 339 aa, Homo sapiens
MYSTTYEERNITGTRVKVPVGQEVEGMNILGLVVFAIVFGVALRKLGPEGELLIRFFNSFNEATMVLVSWIMWYAPVGIMFLVAGKIVEMEDVGLLFARLGKYILCCLLGHAIHGLLVLPLIYFLFTRKNPYRFLWGIVTPLATAFGTSSSSATLPLMMKCVEENNGVAKHISRFILPIGATVNMDGAALFQCVAAVFIAQLSQQSLDFVKIITILVTATASSVGAAGIPAGGVLTLAIILEAVNLPVDHISLILAVDWLVDRSCTVLNVEGDALGAGLLQNYVDRTESRSTEPELIQVKSELPLDPLPVPTEEGNPLLKHYRGPAGDATVASEKESVM

SEQ ID NO: 63955 - protein, 541 aa, Homo sapiens
MVADPPRDSKGLAAAEPTANGGLALASIEDQGAAAGGYCGSRDQVRRCLRANLLVLLTVVAVVAGVALGLGVSGAGGALALGPERLSAFVFPGELLLRLLRMIILPLVVCSLIGGAASLDPGALGRLGAWALLFFLVTTLLASALGVGLALALQPGAASAAINASVGAAGSAENAPSKEVLDSFLDLARNIFPSNLVSAAFRSYSTTYEERNITGTRVKVPVGQEVEGMNILGLVVFAIVFGVALRKLGPEGELLIRFFNSFNEATMVLVSWIMWYAPVGIMFLVAGKIVEMEDVGLLFARLGKYILCCLLGHAIHGLLVLPLIYFLFTRKNPYRFLWGIVTPLATAFGTSSSSATLPLMMKCVEENNGVAKHISRFILPIGATVNMDGAALFQCVAAVFIAQLSQQSLDFVKIITILVTATASSVGAAGIPAGGVLTLAIILEAVNLPVDHISLILAVDWLVDRSCTVLNVEGDALGAGLLQNYVDRTESRSTEPELIQVKSELPLDPLPVPTEEGNPLLKHYRGPAGDATVASEKESVM

SEQ ID NO: 63956 - protein, 349 aa, Homo sapiens
MEAHNASAPFNFTLPPNFGKRPTDLALSVILVFMLFFIMLSLGCTMEFSKIKAHLWKPKGLAIALVAQYGIMPLTAFVLGKVFRLKNIEALAILVCGCSPGGNLSNVFSLAMKGDMNLSIVMTTCSTFCALGMMPLLLYIYSRGIYDGDLKDKVPYKGIVISLVLVLIPCTIGIVLKSKRPQYMRYVIKGGMIIILLCSVAVTVLSAINVGKSIMFAMTPLLIATSSLMPFIGFLLGYVLSALFCLNGRCRRTVSMETGCQNVQLCSTILNVAFPPEVIGPLFFFPLLYMIFQLGEGLLLIAIFWCYEKFKTPKDKTKMIYTAATTEETIPGALGNGTYKGEDCSPCTA

SEQ ID NO: 63957 - protein, 348 aa, Homo sapiens
MNDPNSCVDNATVCSGASCVVPESNFNNILSVVLSTVLTILLALVMFSMGCNVEIKKFLGHIKRPWGICVGFLCQFGIMPLTGFILSVAFDILPLQAVVVLIIGCCPGGTASNILAYWVDGDMDLSVSMTTCSTLLALGMMPLCLLIYTKMWVDSGSIVIPYDNIGTSLVSLVVPVSIGMFVNHKWPQKAKIILKIGSIAGAILIVLIAVVGGILYQSAWIIAPKLWIIGTIFPVAGYSLGFLLARIAGLPWYRCRTVAFETGMQNTQLCSTIVQLSFTPEELNVVFTFPLIYSIFQLAFAAIFLGFYVAYKKCHGKNKAEIPESKENGTEPESSFYKANGGFQPDEK

SEQ ID NO: 63958 - protein, 477 aa, Homo sapiens
MVLMQDKGSSQQWPGLGGEGGGTGPLSMLRAALLLISLPWGAQGTASTSLSTAGGHTVPPTGGRYLSIGDGSVMEFEFPEDSEGIIVISSQYPGQANRTAPGPMLRVTSLDTEVLTIKNVSAITWGGGGGFVVSIHSGLAGLAPLHIQLVDAHEAPPTLIEERRDFCIKVSPAEDTPATLSADLAHFSENPILYLLLPLIFVNKCSFGCKVELEVLKGLMQSPQPMLLGLLGQFLVMPLYAFLMAKVFMLPKALALGLIITCSSPGGGGSYLFSLLLGGDVTLAISMTFLSTVAATGFLPLSSAIYSRLLSIHETLHVPISKILGTLLFIAIPIAVGVLIKSKLPKFSQLLLQVVKPFSFVLLLGGLFLAYRMGVFILAGIRLPIVLVGITVPLVGLLVGYCLATCLKLPVAQRRTVSIEVGVQNSLLALAMLQLSLRRLQADYASQAPFIVALSGTSEMLALVIGHFIYSSLFPVP

SEQ ID NO: 63959 - protein, 448 aa, Homo sapiens
MVLMQDKGSSQQWPGLGGEGGGTGPLSMLRAALLLISLPWGAQGTASTSLSTAGGHTVPPTGGRYLSIGDGSVMEFEFPEDSEGIIVISSQYPGQANRTAPGPMLRVTSLDTEVLTIKNLVDAHEAPPTLIEERRDFCIKVSPAEDTPATLSADLAHFSENPILYLLLPLIFVNKCSFGCKVELEVLKGLMQSPQPMLLGLLGQFLVMPLYAFLMAKVFMLPKALALGLIITCSSPGGGGSYLFSLLLGGDVTLAISMTFLSTVAATGFLPLSSAIYSRLLSIHETLHVPISKILGTLLFIAIPIAVGVLIKSKLPKFSQLLLQVVKPFSFVLLLGGLFLAYRMGVFILAGIRLPIVLVGITVPLVGLLVGYCLATCLKLPVAQRRTVSIEVGVQNSLLALAMLQLSLRRLQADYASQAPFIVALSGTSEMLALVIGHFIYSSLFPVP

SEQ ID NO: 63960 - protein, 532 aa, Homo sapiens
MAGPRPPGDSPAIKEDSTGLGPTHEPFSGQPNSTSGDVLLSRRGPGHAIRPPGRAMVLMQDKGSSQQWPGLGGEGGGTGPLSMLRAALLLISLPWGAQGTASTSLSTAGGHTVPPTGGRYLSIGDGSVMEFEFPEDSEGIIVISSQYPGQANRTAPGPMLRVTSLDTEVLTIKNVSAITWGGGGGFVVSIHSGLAGLAPLHIQLVDAHEAPPTLIEERRDFCIKVSPAEDTPATLSADLAHFSENPILYLLLPLIFVNKCSFGCKVELEVLKGLMQSPQPMLLGLLGQFLVMPLYAFLMAKVFMLPKALALGLIITCSSPGGGGSYLFSLLLGGDVTLAISMTFLSTVAATGFLPLSSAIYSRLLSIHETLHVPISKILGTLLFIAIPIAVGVLIKSKLPKFSQLLLQVVKPFSFVLLLGGLFLAYRMGVFILAGIRLPIVLVGITVPLVGLLVGYCLATCLKLPVAQRRTVSIEVGVQNSLLALAMLQLSLRRLQADYASQAPFIVALSGTSEMLALVIGHFIYSSLFPVP

SEQ ID NO: 63961 - protein, 477 aa, Homo sapiens; identical to SEQ ID NO: 63958

SEQ ID NO: 63962 - protein, 218 aa, Homo sapiens
MVLMQDKGSSQQWPGLGGEGGGTGPLSMLRAALLLISLPWGAQGTASTSLSTAGGHTVPPTGGRYLSIGDGSVMEFEFPEDSEGIIVISSQYPGQANRTAPGPMLRVTSLDTEVLTIKNVSAITWGGGGGFVVSIHSGLAGLAPLHIQLVDAHEAPPTLIEERRDFCIKVSPAEDTPATLSADLAHFSENPILYLLLPLIFVNKCSFGCKVELEVLKG

SEQ ID NO: 63963 - protein, 437 aa, Homo sapiens
MDGNDNVTLLFAPLLRDNYTLAPNASSLGPGTDLALAPASSAGPGPGLSLGPGPSFGFSPGPTPTPEPTTSGLAGGAASHGPSPFPRPWAPHALPFWDTPLNHGLNVFVGAALCITMLGLGCTVDVNHFGAHVRRPVGALLAALCQFGLLPLLAFLLALAFKLDEVAAVAVLLCGCCPGGNLSNLMSLLVDGDMNLSIIMTISSTLLALVLMPLCLWIYSWAWINTPIVQLLPLGTVTLTLCSTLIPIGLGVFIRYKYSRVADYIVKVSLWSLLVTLVVLFIMTGTMLGPELLASIPAAVYVIAIFMPLAGYASGYGLATLFHLPPNCKRTVCLETGSQNVQLCTAILKLAFPPQFIGSMYMFPLLYALFQSAEAGIFVLIYKMYGSEMLHKRDPLDEDEDTDISYKKLKEEEMADTSYGTVKAENIIMMETAQTSL

SEQ ID NO: 63964 - protein, 377 aa, Homo sapiens
MRANCSSSSACPANSSEEELPVGLEVHGNLELVFTVVSTVMMGLLMFSLGCSVEIRKLWSHIRRPWGIAVGLLCQFGLMPFTAYLLAISFSLKPVQAIAVLIMGCCPGGTISNIFTFWVDGDMDLSISMTTCSTVAALGMMPLCIYLYTWSWSLQQNLTIPYQNIGITLVCLTIPVAFGVYVNYRWPKQSKIILKIGAVVGGVLLLVVAVAGVVLAKGSWNSDITLLTISFIFPLIGHVTGFLLALFTHQSWQRCRTISLETGAQNIQMCITMLQLSFTAEHLVQMLSFPLAYGLFQLIDGFLIVAAYQTYKRRLKNKHGKKNSGCTEVCHTRKSTSSRETNAFLEVNEEGAITPGPPGPMDCHRALEPVGHITSCE

SEQ ID NO: 63965 - protein, 550 aa, Homo sapiens
MTGDKGPQRLSGSSYGSISSPTSPTSPGPQQAPPRETYLSEKIPIPDTKPGTFSLRKLWAFTGPGFLMSIAFLDPGNIESDLQAGAVAGFKLLWVLLWATVLGLLCQRLAARLGVVTGKDLGEVCHLYYPKVPRTVLWLTIELAIVGSDMQEVIGTAIAFNLLSAGRIPLWGGVLITIVDTFFFLFLDNYGLRKLEAFFGLLITIMALTFGYEYVVARPEQGALLRGLFLPSCPGCGHPELLQAVGIVGAIIMPHNIYLHSALVKSREIDRARRADIREANMYFLIEATIALSVSFIINLFVMAVFGQAFYQKTNQAAFNICANSSLHDYAKIFPMNNATVAVDIYQGGVILGCLFGPAALYIWAIGLLAAGQSSTMTGTYAGQFVMEGFLRLRWSRFARVLLTRSCAILPTVLVAVFRDLRDLSGLNDLLNVLQSLLLPFAVLPILTFTSMPTLMQEFANGLLNKVVTSSIMVLVCAINLYFVVSYLPSLPHPAYFGLAALLAAAYLGLSTYLVWTCCLAHGATFLAHSSHHHFLYGLLEEDQKGETSG

SEQ ID NO: 63966 - protein, 163 aa, Homo sapiens
MTGDKGPQRLSGSSYGSISSPTSPTSPGPQQAPPRETYLSEKIPIPDTKPGTFSLRKLWAFTGPGFLMSIAFLDPGNIESDLQAGAVAGFKLLWVLLWATVLGLLCQRLAARLGVVTGKDLGEVCHLYYPKSESRSVAQSGVQWCDVSSLQPLPPRCPAPSSG

SEQ ID NO: 63967 - protein, 432 aa, Homo sapiens
MVRCQLTATSTSQVPRTVLWLTIELAIVGSDMQEVIGTAIAFNLLSAGRIPLWGGVLITIVDTFFFLFLDNYGLRKLEAFFGLLITIMALTFGYEYVVARPEQGALLRGLFLPSCPGCGHPELLQAVGIVGAIIMPHNIYLHSALVKSREIDRARRADIREANMYFLIEATIALSVSFIINLFVMAVFGQAFYQKTNQAAFNICANSSLHDYAKIFPMNNATVAVDIYQGGVILGCLFGPAALYIWAIGLLAAGQSSTMTGTYAGQFVMEGFLRLRWSRFARVLLTRSCAILPTVLVAVFRDLRDLSGLNDLLNVLQSLLLPFAVLPILTFTSMPTLMQEFANGLLNKVVTSSIMVLVCAINLYFVVSYLPSLPHPAYFGLAALLAAAYLGLSTYLVWTCCLAHGATFLAHSSHHHFLYGLLEEDQKGETSG

SEQ ID NO: 63968 - protein, 1116 aa, Homo sapiens
MLNNLTDCEDGDGGANPGDGNPKESSPFINSTDTEKGKEYDGKNMALFEEEMDTSPMVSSLLSGLANYTNLPQGSREHEEAENNEGGKKKPVQAPRMGTFMGVYLPCLQNIFGVILFLRLTWVVGIAGIMESFCMVFICCSCTMLTAISMSAIATNGVVPAGGSYYMISRSLGPEFGGAVGLCFYLGTTFAGAMYILGTIEILLAYLFPAMAIFKAEDASGEAAAMLNNMRVYGTCVLTCMATVVFVGVKYVNKFALVFLGCVILSILAIYAGVIKSAFDPPNFPICLLGNRTLSRHGFDVCAKLAWEGNETVTTRLWGLFCSSRFLNATCDEYFTRNNVTEIQGIPGAASGLIKENLWSSYLTKGVIVERSGMTSVGLADGTPIDMDHPYVFSDMTSYFTLLVGIYFPSVTGIMAGSNRSGDLRDAQKSIPTGTILAIATTSAVYISSVVLFGACIEGVVLRDKFGEAVNGNLVVGTLAWPSPWVIVIGSFFSTCGAGLQSLTGAPRLLQAISRDGIVPFLQVFGHGKANGEPTWALLLTACICEIGILIASLDEVAPILSMFFLMCYMFVNLACAVQTLLRTPNWRPRFRYYHWTLSFLGMSLCLALMFICSWYYALVAMLIAGLIYKYIEYRGAEKEWGDGIRGLSLSAARYALLRLEEGPPHTKNWRPQLLVLVRVDQDQNVVHPQLLSLTSQLKAGKGLTIVGSVLEGTFLENHPQAQRAEESIRRLMEAEKVKGFCQVVISSNLRDGVSHLIQSGGLGGLQHNTVLVGWPRNWRQKEDHQTWRNFIELVRETTAGHLALLVTKNVSMFPGNPERFSEGSIDVWWIVHDGGMLMLLPFLLRHHKVWRKCKMRIFTVAQMDDNSIQMKKDLTTFLYHLRITAEVEVVEMHESDISAYTYEKTLVMEQRSQILKQMHLTKNEREREIQSITDESRGSIRRKNPANTRLRLNVPEETAGDSEEKPEEEVQLIHDQSAPSCPSSSPSPGEEPEGEGETDPEKVHLTWTKDKSVAEKNKGPSPVSSEGIKDFFSMKPEWENLNQSNVRRMHTAVRLNEVIVKKSRDAKLVLLNMPGPPRNRNGDENYMEFLEVLTEHLDRVMLVRGGGREVITIYS

SEQ ID NO: 63969 - protein, 285 aa, Homo sapiens
MLNNLTDCEDGDGGANPGDGNPKESSPFINSTDTEKGKEYDGKNMALFEEEMDTSPMVSSLLSGLANYTNLPQGSREHEEAENNEGGKKKPVQAPRMGTFMGVYLPCLQNIFGVILFLRLTWVVGIAGIMESFCMVFICCSCTMLTAISMSAIATNGVVPAGGSYYMISRSLGPEFGGAVGLCFYLGTTFAGAMYILGTIEILLAYLFPAMAIFKAEDASGEAAAMLNNMRVYGTCVLTCMATVVFVGVKYVNKFALVFLGCVILSILAIYAGVIKSAFDPPNFP

SEQ ID NO: 63970 - protein, 1139 aa, Homo sapiens
MSRRFTVTSLPPAGPARSPDPESRRHSVADPRHLPGEDVKGDGNPKESSPFINSTDTEKGKEYDGKNMALFEEEMDTSPMVSSLLSGLANYTNLPQGSREHEEAENNEGGKKKPVQAPRMGTFMGVYLPCLQNIFGVILFLRLTWVVGIAGIMESFCMVFICCSCTMLTAISMSAIATNGVVPAGGSYYMISRSLGPEFGGAVGLCFYLGTTFAGAMYILGTIEILLAYLFPAMAIFKAEDASGEAAAMLNNMRVYGTCVLTCMATVVFVGVKYVNKFALVFLGCVILSILAIYAGVIKSAFDPPNFPICLLGNRTLSRHGFDVCAKLAWEGNETVTTRLWGLFCSSRFLNATCDEYFTRNNVTEIQGIPGAASGLIKENLWSSYLTKGVIVERSGMTSVGLADGTPIDMDHPYVFSDMTSYFTLLVGIYFPSVTGIMAGSNRSGDLRDAQKSIPTGTILAIATTSAVYISSVVLFGACIEGVVLRDKFGEAVNGNLVVGTLAWPSPWVIVIGSFFSTCGAGLQSLTGAPRLLQAISRDGIVPFLQVFGHGKANGEPTWALLLTACICEIGILIASLDEVAPILSMFFLMCYMFVNLACAVQTLLRTPNWRPRFRYYHWTLSFLGMSLCLALMFICSWYYALVAMLIAGLIYKYIEYRGAEKEWGDGIRGLSLSAARYALLRLEEGPPHTKNWRPQLLVLVRVDQDQNVVHPQLLSLTSQLKAGKGLTIVGSVLEGTFLENHPQAQRAEESIRRLMEAEKVKGFCQVVISSNLRDGVSHLIQSGGLGGLQHNTVLVGWPRNWRQKEDHQTWRNFIELVRETTAGHLALLVTKNVSMFPGNPERFSEGSIDVWWIVHDGGMLMLLPFLLRHHKVWRKCKMRIFTVAQMDDNSIQMKKDLTTFLYHLRITAEVEVVEMHESDISAYTYEKTLVMEQRSQILKQMHLTKNEREREIQSITDESRGSIRRKNPANTRLRLNVPEETAGDSEEKPEEEVQLIHDQSAPSCPSSSPSPGEEPEGEGETDPEKVHLTWTKDKSVAEKNKGPSPVSSEGIKDFFSMKPEWENLNQSNVRRMHTAVRLNEVIVKKSRDAKLVLLNMPGPPRNRNGDENYMEFLEVLTEHLDRVMLVRGGGREVITIYS

SEQ ID NO: 63971 - protein, 186 aa, Homo sapiens
MLNNLTDCEDGDGGANPGDGNPKESSPFINSTDTEKGKEYDGKNMALFEEEMDTSPMVSSLLSGLANYTNLPQGSREHEEAENNEGGKKKPVQAPRMGTFMGVYLPCLQNIFGVILFLRLTWVVGIAGIMESFCMVFICCSCTMLTAISMSAIATNGVVPAGGSYYMISRSLAMARPMESRPGPCS

SEQ ID NO: 63972 - protein, 1085 aa, Homo sapiens
MPHFTVVPVDGPRRGDYDNLEGLSWVDYGERAELDDSDGHGNHRESSPFLSPLEASRGIDYYDRNLALFEEELDIRPKVSSLLGKLVSYTNLTQGAKEHEEAESGEGTRRRAAEAPSMGTLMGVYLPCLQNIFGVILFLRLTWMVGTAGVLQALLIVLICCCCTLLTAISMSAIATNGVVPAGGSYFMISRSLGPEFGGAVGLCFYLGTTFAAAMYILGAIEILLTYIAPPAAIFYPSGAHDTSNATLNNMRVYGTIFLTFMTLVVFVGVKYVNKFASLFLACVIISILSIYAGGIKSIFDPPVFPVCMLGNRTLSRDQFDICAKTAVVDNETVATQLWSFFCHSPNLTTDSCDPYFMLNNVTEIPGIPGAAAGVLQENLWSAYLEKGDIVEKHGLPSADAPSLKESLPLYVVADIATSFTVLVGIFFPSVTGIMAGSNRSGDLRDAQKSIPVGTILAIITTSLVYFSSVVLFGACIEGVVLRDKYGDGVSRNLVVGTLAWPSPWVIVIGSFFSTCGAGLQSLTGAPRLLQAIAKDNIIPFLRVFGHGKVNGEPTWALLLTALIAELGILIASLDMVAPILSMFFLMCYLFVNLACAVQTLLRTPNWRPRFKYYHWALSFLGMSLCLALMFVSSWYYALVAMLIAGMIYKYIEYQGAEKEWGDGIRGLSLSAARYALLRLEEGPPHTKNWRPQLLVLLKLDEDLHVKYPRLLTFASQLKAGKGLTIVGSVIQGSFLESYGEAQAAEQTIKNMMEIEKVKGFCQVVVASKVREGLAHLIQSCGLGGMRHNSVVLGWPYGWRQSEDPRAWKTFIDTVRCTTAAHLALLVPKNIAFYPSNHERYLEGHIDVWWIVHDGGMLMLLPFLLRQHKVWRKCRMRIFTVAQMDDNSIQMKKDLAVFLYHLRLEAEVEVVEMHNSDISAYTYERTLMMEQRSQMLRQMRLTKTEREREAQLVKDRHSALRLESLYSDEEDESAVGADKIQMTWTRDKYMTETWDPSHAPDNFRELVHIKPDQSNVRRMHTAVKLNEVIVTRSHDARLVLLNMPGPPRNSEGDENYMEFLEVLTEGLERVLLVRGGGREVITIYS

SEQ ID NO: 63973 - protein, 780 aa, Homo sapiens
MPHFTVVPVDGPRRGDYDNLEGLSWVDYGERAELDDSDGHGNHRESSPFLSPLEASRGIDYYDRNLALFEEELDIRPKVSSLLGKLVSYTNLTQGAKEHEEAESGEGTRRRAAEAPSMGTLMGVYLPCLQNIFGVILFLRLTWMVGTAGVLQALLIVLICCCCTLLTAISMSAIATNGVVPAGGSYFMISRSLGPEFGGAVGLCFYLGTTFAAAMYILGAIEILLTYIAPPAAIFYPSGAHDTSNATLNNMRVYGTIFLTFMTLVVFVGVKYVNKFASLFLACVIISILSIYAGGIKSIFDPPVFPVCMLGNRTLSRDQFDICAKTAVVDNETVATQLWSFFCHSPNLTTDSCDPYFMLNNVTEIPGIPGAAAGVLQENLWSAYLEKGDIVEKHGLPSADAPSLKESLPLYVVADIATSFTVLVGIFFPSVTGIMAGSNRSGDLRDAQKSIPVGTILAIITTSLVYFSSVVLFGACIEGVVLRDKYGDGVSRNLVVGTLAWPSPWVIVIGSFFSTCGAGLQSLTGAPRLLQAIAKDNIIPFLRVFGHGKVNGEPTWALLLTALIAELGILIASLDMVAPILSMFFLMCYLFVNLACAVQTLLRTPNWRPRFKYYHWALSFLGMSLCLALMFVSSWYYALVAMLIAGMIYKYIEYQGAEKEWGDGIRGLSLSAARYALLRLEEGPPHTKNWRPQLLVLLKLDEDLHVKYPRLLTFASQLKAGKGLTIVGSVIQGSFLESYGEAQAAEQTPCAALRLPTWPCSCPRTSPSTPATTSATWRAT

SEQ ID NO: 63974 - protein, 1087 aa, Homo sapiens
MRAGGACRPGAAGTAAGTAAGGWDGGCGGAEPARCLTSPWCQWTGRGAATMTTSRGSVGWTTGSAPSWMTRTEELDIRPKVSSLLGKLVSYTNLTQGAKEHEEAESGEGTRRRAAEAPSMGTLMGVYLPCLQNIFGVILFLRLTWMVGTAGVLQALLIVLICCCCTLLTAISMSAIATNGVVPAGGSYFMISRSLGPEFGGAVGLCFYLGTTFAAAMYILGAIEILLTYIAPPAAIFYPSGAHDTSNATLNNMRVYGTIFLTFMTLVVFVGVKYVNKFASLFLACVIISILSIYAGGIKSIFDPPVFPVCMLGNRTLSRDQFDICAKTAVVDNETVATQLWSFFCHSPNLTTDSCDPYFMLNNVTEIPGIPGAAAGVLQENLWSAYLEKGDIVEKHGLPSADAPSLKESLPLYVVADIATSFTVLVGIFFPSVTGIMAGSNRSGDLRDAQKSIPVGTILAIITTSLVYFSSVVLFGACIEGVVLRDKYGDGVSRNLVVGTLAWPSPWVIVIGSFFSTCGAGLQSLTGAPRLLQAIAKDNIIPFLRVFGHGKVNGEPTWALLLTALIAELGILIASLDMVAPILSMFFLMCYLFVNLACAVQTLLRTPNWRPRFKYYHWALSFLGMSLCLALMFVSSWYYALVAMLIAGMIYKYIEYQGAEKEWGDGIRGLSLSAARYALLRLEEGPPHTKNWRPQLLVLLKLDEDLHVKYPRLLTFASQLKAGKGLTIVGSVIQGSFLESYGEAQAAEQTIKNMMEIEKVKGFCQVVVASKVREGLAHLIQSCGLGGMRHNSVVLGWPYGWRQSEDPRAWKTFIDTVRCTTAAHLALLVPKNIAFYPSNHERYLEGHIDVWWIVHDGGMLMLLPFLLRQHKVWRKCRMRIFTVAQMDDNSIQMKKDLAVFLYHLRLEAEVEVVEMHNSDISAYTYERTLMMEQRSQMLRQMRLTKTEREREAQLVKDRHSALRLESLYSDEEDESAVGADKIQMTWTRDKYMTETWDPSHAPDNFRELVHIKPDQSNVRRMHTAVKLNEVIVTRSHDARLVLLNMPGPPRNSEGDENYMEFLEVLTEGLERVLLVRGGGREVITIYS

SEQ ID NO: 63975 - protein, 1079 aa, Homo sapiens
MAAEGAVCGFVYLEGTAWAVPEDTEPLASCTLGHGNHRESSPFLSPLEASRGIDYYDRNLALFEEELDIRPKVSSLLGKLVSYTNLTQGAKEHEEAESGEGTRRRAAEAPSMGTLMGVYLPCLQNIFGVILFLRLTWMVGTAGVLQALLIVLICCCCTLLTAISMSAIATNGVVPAGGSYFMISRSLGPEFGGAVGLCFYLGTTFAAAMYILGAIEILLTYIAPPAAIFYPSGAHDTSNATLNNMRVYGTIFLTFMTLVVFVGVKYVNKFASLFLACVIISILSIYAGGIKSIFDPPVFPVCMLGNRTLSRDQFDICAKTAVVDNETVATQLWSFFCHSPNLTTDSCDPYFMLNNVTEIPGIPGAAAGVLQENLWSAYLEKGDIVEKHGLPSADAPSLKESLPLYVVADIATSFTVLVGIFFPSVTGIMAGSNRSGDLRDAQKSIPVGTILAIITTSLVYFSSVVLFGACIEGVVLRDKYGDGVSRNLVVGTLAWPSPWVIVIGSFFSTCGAGLQSLTGAPRLLQAIAKDNIIPFLRVFGHGKVNGEPTWALLLTALIAELGILIASLDMVAPILSMFFLMCYLFVNLACAVQTLLRTPNWRPRFKYYHWALSFLGMSLCLALMFVSSWYYALVAMLIAGMIYKYIEYQGAEKEWGDGIRGLSLSAARYALLRLEEGPPHTKNWRPQLLVLLKLDEDLHVKYPRLLTFASQLKAGKGLTIVGSVIQGSFLESYGEAQAAEQTIKNMMEIEKVKGFCQVVVASKVREGLAHLIQSCGLGGMRHNSVVLGWPYGWRQSEDPRAWKTFIDTVRCTTAAHLALLVPKNIAFYPSNHERYLEGHIDVWWIVHDGGMLMLLPFLLRQHKVWRKCRMRIFTVAQMDDNSIQMKKDLAVFLYHLRLEAEVEVVEMHNSDISAYTYERTLMMEQRSQMLRQMRLTKTEREREAQLVKDRHSALRLESLYSDEEDESAVGADKIQMTWTRDKYMTETWDPSHAPDNFRELVHIKPDQSNVRRMHTAVKLNEVIVTRSHDARLVLLNMPGPPRNSEGDENYMEFLEVLTEGLERVLLVRGGGREVITIYS

SEQ ID NO: 63976 - protein, 1054 aa, Homo sapiens
MGDTLSPGHGNHRESSPFLSPLEASRGIDYYDRNLALFEEELDIRPKVSSLLGKLVSYTNLTQGAKEHEEAESGEGTRRRAAEAPSMGTLMGVYLPCLQNIFGVILFLRLTWMVGTAGVLQALLIVLICCCCTLLTAISMSAIATNGVVPAGGSYFMISRSLGPEFGGAVGLCFYLGTTFAAAMYILGAIEILLTYIAPPAAIFYPSGAHDTSNATLNNMRVYGTIFLTFMTLVVFVGVKYVNKFASLFLACVIISILSIYAGGIKSIFDPPVFPVCMLGNRTLSRDQFDICAKTAVVDNETVATQLWSFFCHSPNLTTDSCDPYFMLNNVTEIPGIPGAAAGVLQENLWSAYLEKGDIVEKHGLPSADAPSLKESLPLYVVADIATSFTVLVGIFFPSVTGIMAGSNRSGDLRDAQKSIPVGTILAIITTSLVYFSSVVLFGACIEGVVLRDKYGDGVSRNLVVGTLAWPSPWVIVIGSFFSTCGAGLQSLTGAPRLLQAIAKDNIIPFLRVFGHGKVNGEPTWALLLTALIAELGILIASLDMVAPILSMFFLMCYLFVNLACAVQTLLRTPNWRPRFKYYHWALSFLGMSLCLALMFVSSWYYALVAMLIAGMIYKYIEYQGAEKEWGDGIRGLSLSAARYALLRLEEGPPHTKNWRPQLLVLLKLDEDLHVKYPRLLTFASQLKAGKGLTIVGSVIQGSFLESYGEAQAAEQTIKNMMEIEKVKGFCQVVVASKVREGLAHLIQSCGLGGMRHNSVVLGWPYGWRQSEDPRAWKTFIDTVRCTTAAHLALLVPKNIAFYPSNHERYLEGHIDVWWIVHDGGMLMLLPFLLRQHKVWRKCRMRIFTVAQMDDNSIQMKKDLAVFLYHLRLEAEVEVVEMHNSDISAYTYERTLMMEQRSQMLRQMRLTKTEREREAQLVKDRHSALRLESLYSDEEDESAVGADKIQMTWTRDKYMTETWDPSHAPDNFRELVHIKPDQSNVRRMHTAVKLNEVIVTRSHDARLVLLNMPGPPRNSEGDENYMEFLEVLTEGLERVLLVRGGGREVITIYS

SEQ ID NO: 63977 - protein, 1099 aa, Homo sapiens
MPHFTVTKVEDPEEGAAASISQEPSLADIKARIQDSDEPDLSQNSITGEHSQLLDDGHKKARNAYLNNSNYEEGDEYFDKNLALFEEEMDTRPKVSSLLNRMANYTNLTQGAKEHEEAENITEGKKKPTKTPQMGTFMGVYLPCLQNIFGVILFLRLTWVVGTAGVLQAFAIVLICCCCTMLTAISMSAIATNGVVPAGGSYFMISRALGPEFGGAVGLCFYLGTTFAAAMYILGAIEIFLVYIVPRAAIFHSDDALKESAAMLNNMRVYGTAFLVLMVLVVFIGVRYVNKFASLFLACVIVSILAIYAGAIKSSFAPPHFPVCMLGNRTLSSRHIDVCSKTKEINNMTVPSKLWGFFCNSSQFFNATCDEYFVHNNVTSIQGIPGLASGIITENLWSNYLPKGEIIEKPSAKSSDVLGSLNHEYVLVDITTSFTLLVGIFFPSVTGIMAGSNRSGDLKDAQKSIPIGTILAILTTSFVYLSNVVLFGACIEGVVLRDKFGDAVKGNLVVGTLSWPSPWVIVIGSFFSTCGAGLQSLTGAPRLLQAIAKDNIIPFLRVFGHSKANGEPTWALLLTAAIAELGILIASLDLVAPILSMFFLMCYLFVNLACALQTLLRTPNWRPRFRYYHWALSFMGMSICLALMFISSWYYAIVAMVIAGMIYKYIEYQGAEKEWGDGIRGLSLSAARFALLRLEEGPPHTKNWRPQLLVLLKLDEDLHVKHPRLLTFASQLKAGKGLTIVGSVIVGNFLENYGEALAAEQTIKHLMEAEKVKGFCQLVVAAKLREGISHLIQSCGLGGMKHNTVVMGWPNGWRQSEDARAWKTFIGTVRVTTAAHLALLVAKNISFFPSNVEQFSEGNIDVWWIVHDGGMLMLLPFLLKQHKVWRKCSIRIFTVAQLEDNSIQMKKDLATFLYHLRIEAEVEVVEMHDSDISAYTYERTLMMEQRSQMLRHMRLSKTERDREAQLVKDRNSMLRLTSIGSDEDEETETYQEKVHMTWTKDKYMASRGQKAKSMEGFQDLLNMRPDQSNVRRMHTAVKLNEVIVNKSHEAKLVLLNMPGPPRNPEGDENYMEFLEVLTEGLERVLLVRGGGSEVITIYS

SEQ ID NO: 63978 - protein, 1150 aa, Homo sapiens
MHPPETTTKMASVRFMVTPTKIDDIPGLSDTSPDLSSRSSSRVRFSSRESVPETSRSEPMSEMSGATTSLATVALDPPSDRTSHPQDVIEDLSQNSITGEHSQLLDDGHKKARNAYLNNSNYEEGDEYFDKNLALFEEEMDTRPKVSSLLNRMANYTNLTQGAKEHEEAENITEGKKKPTKTPQMGTFMGVYLPCLQNIFGVILFLRLTWVVGTAGVLQAFAIVLICCCCTMLTAISMSAIATNGVVPAGGSYFMISRALGPEFGGAVGLCFYLGTTFAAAMYILGAIEIFLVYIVPRAAIFHSDDALKESAAMLNNMRVYGTAFLVLMVLVVFIGVRYVNKFASLFLACVIVSILAIYAGAIKSSFAPPHFPVCMLGNRTLSSRHIDVCSKTKEINNMTVPSKLWGFFCNSSQFFNATCDEYFVHNNVTSIQGIPGLASGIITENLWSNYLPKGEIIEKPSAKSSDVLGSLNHEYVLVDITTSFTLLVGIFFPSVTGIMAGSNRSGDLKDAQKSIPIGTILAILTTSFVYLSNVVLFGACIEGVVLRDKFGDAVKGNLVVGTLSWPSPWVIVIGSFFSTCGAGLQSLTGAPRLLQAIAKDNIIPFLRVFGHSKANGEPTWALLLTAAIAELGILIASLDLVAPILSMFFLMCYLFVNLACALQTLLRTPNWRPRFRYYHWALSFMGMSICLALMFISSWYYAIVAMVIAGMIYKYIEYQGAEKEWGDGIRGLSLSAARFALLRLEEGPPHTKNWRPQLLVLLKLDEDLHVKHPRLLTFASQLKAGKGLTIVGSVIVGNFLENYGEALAAEQTIKHLMEAEKVKGFCQLVVAAKLREGISHLIQSCGLGGMKHNTVVMGWPNGWRQSEDARAWKTFIGTVRVTTAAHLALLVAKNISFFPSNVEQFSEGNIDVWWIVHDGGMLMLLPFLLKQHKVWRKCSIRIFTVAQLEDNSIQMKKDLATFLYHLRIEAEVEVVEMHDSDISAYTYERTLMMEQRSQMLRHMRLSKTERDREAQLVKDRNSMLRLTSIGSDEDEETETYQEKVHMTWTKDKYMASRGQKAKSMEGFQDLLNMRPDQSNVRRMHTAVKLNEVIVNKSHEAKLVLLNMPGPPRNPEGDENYMEFLEVLTEGLERVLLVRGGGSEVITIYS

SEQ ID NO: 63979 - protein, 1091 aa, Homo sapiens
MSEMSGATTSLATVALDPPSDRTSHPQDVIEDLSQNSITGEHSQLLDDGHKKARNAYLNNSNYEEGDEYFDKNLALFEEEMDTRPKVSSLLNRMANYTNLTQGAKEHEEAENITEGKKKPTKTPQMGTFMGVYLPCLQNIFGVILFLRLTWVVGTAGVLQAFAIVLICCCCTMLTAISMSAIATNGVVPAGGSYFMISRALGPEFGGAVGLCFYLGTTFAAAMYILGAIEIFLVYIVPRAAIFHSDDALKESAAMLNNMRVYGTAFLVLMVLVVFIGVRYVNKFASLFLACVIVSILAIYAGAIKSSFAPPHFPVCMLGNRTLSSRHIDVCSKTKEINNMTVPSKLWGFFCNSSQFFNATCDEYFVHNNVTSIQGIPGLASGIITENLWSNYLPKGEIIEKPSAKSSDVLGSLNHEYVLVDITTSFTLLVGIFFPSVTGIMAGSNRSGDLKDAQKSIPIGTILAILTTSFVYLSNVVLFGACIEGVVLRDKFGDAVKGNLVVGTLSWPSPWVIVIGSFFSTCGAGLQSLTGAPRLLQAIAKDNIIPFLRVFGHSKANGEPTWALLLTAAIAELGILIASLDLVAPILSMFFLMCYLFVNLACALQTLLRTPNWRPRFRYYHWALSFMGMSICLALMFISSWYYAIVAMVIAGMIYKYIEYQGAEKEWGDGIRGLSLSAARFALLRLEEGPPHTKNWRPQLLVLLKLDEDLHVKHPRLLTFASQLKAGKGLTIVGSVIVGNFLENYGEALAAEQTIKHLMEAEKVKGFCQLVVAAKLREGISHLIQSCGLGGMKHNTVVMGWPNGWRQSEDARAWKTFIGTVRVTTAAHLALLVAKNISFFPSNVEQFSEGNIDVWWIVHDGGMLMLLPFLLKQHKVWRKCSIRIFTVAQLEDNSIQMKKDLATFLYHLRIEAEVEVVEMHDSDISAYTYERTLMMEQRSQMLRHMRLSKTERDREAQLVKDRNSMLRLTSIGSDEDEETETYQEKVHMTWTKDKYMASRGQKAKSMEGFQDLLNMRPDQSNVRRMHTAVKLNEVIVNKSHEAKLVLLNMPGPPRNPEGDENYMEFLEVLTEGLERVLLVRGGGSEVITIYS

SEQ ID NO: 63980 - protein, 1135 aa, Homo sapiens
MHPPETTTKMASVRFMVTPTKIDDIPGLSDTSPDLSSRSSSRVRFSSRESVPETSRSEPMSEMSGATTSLATVALDPPSDRTSHPQDVIEDDGHKKARNAYLNNSNYEEGDEYFDKNLALFEEEMDTRPKVSSLLNRMANYTNLTQGAKEHEEAENITEGKKKPTKTPQMGTFMGVYLPCLQNIFGVILFLRLTWVVGTAGVLQAFAIVLICCCCTMLTAISMSAIATNGVVPAGGSYFMISRALGPEFGGAVGLCFYLGTTFAAAMYILGAIEIFLVYIVPRAAIFHSDDALKESAAMLNNMRVYGTAFLVLMVLVVFIGVRYVNKFASLFLACVIVSILAIYAGAIKSSFAPPHFPVCMLGNRTLSSRHIDVCSKTKEINNMTVPSKLWGFFCNSSQFFNATCDEYFVHNNVTSIQGIPGLASGIITENLWSNYLPKGEIIEKPSAKSSDVLGSLNHEYVLVDITTSFTLLVGIFFPSVTGIMAGSNRSGDLKDAQKSIPIGTILAILTTSFVYLSNVVLFGACIEGVVLRDKFGDAVKGNLVVGTLSWPSPWVIVIGSFFSTCGAGLQSLTGAPRLLQAIAKDNIIPFLRVFGHSKANGEPTWALLLTAAIAELGILIASLDLVAPILSMFFLMCYLFVNLACALQTLLRTPNWRPRFRYYHWALSFMGMSICLALMFISSWYYAIVAMVIAGMIYKYIEYQGAEKEWGDGIRGLSLSAARFALLRLEEGPPHTKNWRPQLLVLLKLDEDLHVKHPRLLTFASQLKAGKGLTIVGSVIVGNFLENYGEALAAEQTIKHLMEAEKVKGFCQLVVAAKLREGISHLIQSCGLGGMKHNTVVMGWPNGWRQSEDARAWKTFIGTVRVTTAAHLALLVAKNISFFPSNVEQFSEGNIDVWWIVHDGGMLMLLPFLLKQHKVWRKCSIRIFTVAQLEDNSIQMKKDLATFLYHLRIEAEVEVVEMHDSDISAYTYERTLMMEQRSQMLRHMRLSKTERDREAQLVKDRNSMLRLTSIGSDEDEETETYQEKVHMTWTKDKYMASRGQKAKSMEGFQDLLNMRPDQSNVRRMHTAVKLNEVIVNKSHEAKLVLLNMPGPPRNPEGDENYMEFLEVLTEGLERVLLVRGGGSEVITIYS

SEQ ID NO: 63981 - protein, 962 aa, Homo sapiens
MDTRPKVSSLLNRMANYTNLTQGAKEHEEAENITEGKKKPTKTMLTAISMSAIATNGVVPAGGSYFMISRALGPEFGGAVGLCFYLGTTFAAAMYILGAIEIFLVYIVPRAAIFHSDDALKESAAMLNNMRVYGTAFLVLMVLVVFIGVRYVNKFASLFLACVIVSILAIYAGAIKSSFAPPHFPVCMLGNRTLSSRHIDVCSKTKEINNMTVPSKLWGFFCNSSQFFNATCDEYFVHNNVTSIQGIPGLASGIITENLWSNYLPKGEIIEKPSAKSSDVLGSLNHEYVLVDITTSFTLLVGIFFPSVTGIMAGSNRSGDLKDAQKSIPIGTILAILTTSFVYLSNVVLFGACIEGVVLRDKFGDAVKGNLVVGTLSWPSPWVIVIGSFFSTCGAGLQSLTGAPRLLQAIAKDNIIPFLRVFGHSKANGEPTWALLLTAAIAELGILIASLDLVAPILSMFFLMCYLFVNLACALQTLLRTPNWRPRFRYYHWALSFMGMSICLALMFISSWYYAIVAMVIAGMIYKYIEYQGAEKEWGDGIRGLSLSAARFALLRLEEGPPHTKNWRPQLLVLLKLDEDLHVKHPRLLTFASQLKAGKGLTIVGSVIVGNFLENYGEALAAEQTIKHLMEAEKVKGFCQLVVAAKLREGISHLIQSCGLGGMKHNTVVMGWPNGWRQSEDARAWKTFIGTVRVTTAAHLALLVAKNISFFPSNVEQFSEGNIDVWWIVHDGGMLMLLPFLLKQHKVWRKCSIRIFTVAQLEDNSIQMKKDLATFLYHLRIEAEVEVVEMHDSDISAYTYERTLMMEQRSQMLRHMRLSKTERDREAQLVKDRNSMLRLTSIGSDEDEETETYQEKVHMTWTKDKYMASRGQKAKSMEGFQDLLNMRPDQSNVRRMHTAVKLNEVIVNKSHEAKLVLLNMPGPPRNPEGDENYMEFLEVLTEGLERVLLVRGGGSEVITIYS

SEQ ID NO: 63982 - protein, 1091 aa, Homo sapiens; identical to SEQ ID NO: 63979

SEQ ID NO: 63983 - protein, 1141 aa, Homo sapiens
MASVRFMVTPTKIDDIPGLSDTSPDLSSRSSSRVRFSSRESVPETSRSEPMSEMSGATTSLATVALDPPSDRTSHPQDVIEDLSQNSITGEHSQLLDDGHKKARNAYLNNSNYEEGDEYFDKNLALFEEEMDTRPKVSSLLNRMANYTNLTQGAKEHEEAENITEGKKKPTKTPQMGTFMGVYLPCLQNIFGVILFLRLTWVVGTAGVLQAFAIVLICCCCTMLTAISMSAIATNGVVPAGGSYFMISRALGPEFGGAVGLCFYLGTTFAAAMYILGAIEIFLVYIVPRAAIFHSDDALKESAAMLNNMRVYGTAFLVLMVLVVFIGVRYVNKFASLFLACVIVSILAIYAGAIKSSFAPPHFPVCMLGNRTLSSRHIDVCSKTKEINNMTVPSKLWGFFCNSSQFFNATCDEYFVHNNVTSIQGIPGLASGIITENLWSNYLPKGEIIEKPSAKSSDVLGSLNHEYVLVDITTSFTLLVGIFFPSVTGIMAGSNRSGDLKDAQKSIPIGTILAILTTSFVYLSNVVLFGACIEGVVLRDKFGDAVKGNLVVGTLSWPSPWVIVIGSFFSTCGAGLQSLTGAPRLLQAIAKDNIIPFLRVFGHSKANGEPTWALLLTAAIAELGILIASLDLVAPILSMFFLMCYLFVNLACALQTLLRTPNWRPRFRYYHWALSFMGMSICLALMFISSWYYAIVAMVIAGMIYKYIEYQGAEKEWGDGIRGLSLSAARFALLRLEEGPPHTKNWRPQLLVLLKLDEDLHVKHPRLLTFASQLKAGKGLTIVGSVIVGNFLENYGEALAAEQTIKHLMEAEKVKGFCQLVVAAKLREGISHLIQSCGLGGMKHNTVVMGWPNGWRQSEDARAWKTFIGTVRVTTAAHLALLVAKNISFFPSNVEQFSEGNIDVWWIVHDGGMLMLLPFLLKQHKVWRKCSIRIFTVAQLEDNSIQMKKDLATFLYHLRIEAEVEVVEMHDSDISAYTYERTLMMEQRSQMLRHMRLSKTERDREAQLVKDRNSMLRLTSIGSDEDEETETYQEKVHMTWTKDKYMASRGQKAKSMEGFQDLLNMRPDQSNVRRMHTAVKLNEVIVNKSHEAKLVLLNMPGPPRNPEGDENYMEFLEVLTEGLERVLLVRGGGSEVITIYS

SEQ ID NO: 63984 - protein, 1150 aa, Homo sapiens; identical to SEQ ID NO: 63978

SEQ ID NO: 63985 - protein, 61 aa, Homo sapiens
MSEMSGATTSLATVALDPPSDRTSHPQDVIEDLSQNSITGEHSQLLDDGHKKARNAYLNNS

SEQ ID NO: 63986 - protein, 962 aa, Homo sapiens; identical to SEQ ID NO: 63981

SEQ ID NO: 63987 - protein, 1150 aa, Homo sapiens; identical to SEQ ID NO: 63978

SEQ ID NO: 63988 - protein, 152 aa, Homo sapiens
MASVRFMVTPTKIDDIPGLSDTSPDLSSRSSSRVRFSSRESVPETSRSEPMSEMSGATTSLATVALDPPSDRTSHPQDVIEDLSQNSITGEHSQLLDDGHKKARNAYLNNSNYEEGDEYFDKNLALFEEEMDTRPKVSSLLNRMANYTNLTQ

SEQ ID NO: 63989 - protein, 1083 aa, Homo sapiens
MPTNFTVVPVEAHADGGGDETAERTEAPGTPEGPEPERPSPGDGNPRENSPFLNNVEVEQESFFEGKNMALFEEEMDSNPMVSSLLNKLANYTNLSQGVVEHEEDEESRRREAKAPRMGTFIGVYLPCLQNILGVILFLRLTWIVGVAGVLESFLIVAMCCTCTMLTAISMSAIATNGVVPAGGSYYMISRSLGPEFGGAVGLCFYLGTTFAGAMYILGTIEIFLTYISPGAAIFQAEAAGGEAAAMLHNMRVYGTCTLVLMALVVFVGVKYVNKLALVFLACVVLSILAIYAGVIKSAFDPPDIPVCLLGNRTLSRRSFDACVKAYGIHNNSATSALWGLFCNGSQPSAACDEYFIQNNVTEIQGIPGAASGVFLENLWSTYAHAGAFVEKKGVPSVPVAEESRASALPYVLTDIAASFTLLVGIYFPSVTGIMAGSNRSGDLKDAQKSIPTGTILAIVTTSFIYLSCIVLFGACIEGVVLRDKFGEALQGNLVIGMLAWPSPWVIVIGSFFSTCGAGLQSLTGAPRLLQAIARDGIVPFLQVFGHGKANGEPTWALLLTVLICETGILIASLDSVAPILSMFFLMCYLFVNLACAVQTLLRTPNWRPRFKFYHWTLSFLGMSLCLALMFICSWYYALSAMLIAGCIYKYIEYRGAEKEWGDGIRGLSLNAARYALLRVEHGPPHTKNWRPQVLVMLNLDAEQAVKHPRLLSFTSQLKAGKGLTIVGSVLEGTYLDKHMEAQRAEENIRSLMSTEKTKGFCQLVVSSSLRDGMSHLIQSAGLGGLKHNTVLMAWPASWKQEDNPFSWKNFVDTVRDTTAAHQALLVAKNVDSFPQNQERFGGGHIDVWWIVHDGGMLMLLPFLLRQHKVWRKCRMRIFTVAQVDDNSIQMKKDLQMFLYHLRISAEVEVVEMVENDISAFTYERTLMMEQRSQMLKQMQLSKNEQEREAQLIHDRNTASHTAAAARTQAPPTPDKVQMTWTREKLIAEKYRSRDTSLSGFKDLFSMKPDQSNVRRMHTAVKLNGVVLNKSQDAQLVLLNMPGPPKNRQGDENYMEFLEVLTEGLNRVLLVRGGGREVITIYS

SEQ ID NO: 63990 - protein, 266 aa, Homo sapiens
MPTNFTVVPVEAHADGGGDETAERTEAPGTPEGPEPERPSPGDGNPRENSPFLNNVEVEQESFFEGKNMALFEEEMDSNPMVSSLLNKLANYTNLSQGVVEHEEDEESRRREAKAPRMGTFIGVYLPCLQNILGVILFLRLTWIVGVAGVLESFLIVAMCCTCTMLTAISMSAIATNGVVPAGGSYYMISRSLGPEFGGAVGLCFYLGTTFAGAMYILGTIEIFLTGTEDGVGSLGLGLAQGNRRQTHLSPSDAAQAAHGASYGSF

SEQ ID NO: 63991 - protein, 1021 aa, Homo sapiens
MAELPTTETPGDATLCSGRFTISTLLSSDEPSPPAAYDSSHPSHLTHSSTFCMRTFGYNTIDVVPTYEHYANSTQPGEPRKVRPTLADLHSFLKQEGRHLHALAFDSRPSHEMTDGLVEGEAGTSSEKNPEEPVRFGWVKGVMIRCMLNIWGVILYLRLPWITAQAGIVLTWIIILLSVTVTSITGLSISAISTNGKVKSGGTYFLISRSLGPELGGSIGLIFAFANAVGVAMHTVGFAETVRDLLQEYGAPIVDPINDIRIIAVVSVTVLLAISLAGMEWESKAQVLFFLVIMVSFANYLVGTLIPPSEDKASKGFFSYRADIFVQNLVPDWRGPDGTFFGMFSIFFPSATGILAGANISGDLKDPAIAIPKGTLMAIFWTTISYLAISATIGSCVVRDASGVLNDTVTPGWGACEGLACSYGWNFTECTQQHSCHYGLINYYQTMSMVSGFAPLITAGIFGATLSSALACLVSAAKVFQCLCEDQLYPLIGFFGKGYGKNKEPVRGYLLAYAIAVAFIIIAELNTIAPIISNFFLCSYALINFSCFHASITNSPGWRPSFQYYNKWAALFGAIISVVIMFLLTWWAALIAIGVVLFLLLYVIYKKPEVNWGSSVQAGSYNLALSYSVGLNEVEDHIKNYRPQCLVLTGPPNFRPALVDFVGTFTRNLSLMICGHVLIGPHKQRMPELQLIANGHTKWLNKRKIKAFYSDVIAEDLRRGVQILMQAAGLGRMKPNILVVGFKKNWQSAHPATVEDYIGILHDAFDFNYGVCVMRMREGLNVSKMMQAHINPVFDPAEDGKEASARVDPKALVKEEQATTIFQSEQGKKTIDIYWLFDDGGLTLLIPYLLGRKRRWSKCKIRVFVGGQINRMDQERKAIISLLSKFRLGFHEVHILPDINQNPRAEHTKRFEDMIAPFRLNDGFKDEATVNEMRRDCPWKISDEEITKNRVKSLRQVRLNEIVLDYSRDAALIVITLPIGRKGKCPSSLYMAWLETLSQDLRPPVILIRGNQENVLTFYCQ

SEQ ID NO: 63992 - protein, 1029 aa, Homo sapiens
MAELPTTETPGDATLCSGRFTISTLLSSDEPSPPAAYDSSHPSHLTHSSTFCMRTFGYNTIDVVPTYEHYANSTQPGEPRKVRPTLADLHSFLKEGRHLHALAFDSRPSHEMTDGLVEGEAGTSSEKNPEEPVRFGWVKGVMIRCMLNIWGVILYLRLPWITAQAGIVLTWIIILLSVTVTSITGLSISAISTNGKVKSGGTYFLISRSLGPELGGSIGLIFAFANAVGVAMHTVGFAETVRDLLQEYGAPIVDPINDIRIIAVVSVTVLLAISLAGMEWESKAQVLFFLVIMVSFANYLVGTLIPPSEDKASKGFFSYRADIFVQNLVPDWRGPDGTFFGMFSIFFPSATGILAGANISGDLKDPAIAIPKGTLMAIFWTTISYLAISATIGSCVVRDASGVLNDTVTPGWGACEGLACSYGWNFTECTQQHSCHYGLINYYQTMSMVSGFAPLITAGIFGATLSSALACLVSAAKVFQCLCEDQLYPLIGFFGKGYGKNKEPVRGYLLAYAIAVAFIIIAELNTIAPIISNFFLCSYALINFSCFHASITNSPGWRPSFQYYNKWAALFGAIISVVIMFLLTWWAALIAIGVVLFLLLYVIYKKPEVNWGSSVQAGSYNLALSYSVGLNEVEDHIKNYRPQCLVLTGPPNFRPALVDFVGTFTRNLSLMICGHVLIGPHKQRMPELQLIANGHTKWLNKRKIKAFYSDVIAEDLRRGVQILMQAAGLGRMKPNILVVGFKKNWQSAHPATVEDYIGILHDAFDFNYGVCVMRMREGLNVSKMMQAHINPVFDPAEDGKEASARGARPSVSGALDPKALVKEEQATTIFQSEQGKKTIDIYWLFDDGGLTLLIPYLLGRKRRWSKCKIRVFVGGQINRMDQERKAIISLLSKFRLGFHEVHILPDINQNPRAEHTKRFEDMIAPFRLNDGFKDEATVNEMRRDCPWKISDEEITKNRVKSLRQVRLNEIVLDYSRDAALIVITLPIGRKGKCPSSLYMAWLETLSQDLRPPVILIRGNQENVLTFYCQ

SEQ ID NO: 63993 - protein, 1030 aa, Homo sapiens
MAELPTTETPGDATLCSGRFTISTLLSSDEPSPPAAYDSSHPSHLTHSSTFCMRTFGYNTIDVVPTYEHYANSTQPGEPRKVRPTLADLHSFLKQEGRHLHALAFDSRPSHEMTDGLVEGEAGTSSEKNPEEPVRFGWVKGVMIRCMLNIWGVILYLRLPWITAQAGIVLTWIIILLSVTVTSITGLSISAISTNGKVKSGGTYFLISRSLGPELGGSIGLIFAFANAVGVAMHTVGFAETVRDLLQEYGAPIVDPINDIRIIAVVSVTVLLAISLAGMEWESKAQVLFFLVIMVSFANYLVGTLIPPSEDKASKGFFSYRADIFVQNLVPDWRGPDGTFFGMFSIFFPSATGILAGANISGDLKDPAIAIPKGTLMAIFWTTISYLAISATIGSCVVRDASGVLNDTVTPGWGACEGLACSYGWNFTECTQQHSCHYGLINYYQTMSMVSGFAPLITAGIFGATLSSALACLVSAAKVFQCLCEDQLYPLIGFFGKGYGKNKEPVRGYLLAYAIAVAFIIIAELNTIAPIISNFFLCSYALINFSCFHASITNSPGWRPSFQYYNKWAALFGAIISVVIMFLLTWWAALIAIGVVLFLLLYVIYKKPEVNWGSSVQAGSYNLALSYSVGLNEVEDHIKNYRPQCLVLTGPPNFRPALVDFVGTFTRNLSLMICGHVLIGPHKQRMPELQLIANGHTKWLNKRKIKAFYSDVIAEDLRRGVQILMQAAGLGRMKPNILVVGFKKNWQSAHPATVEDYIGILHDAFDFNYGVCVMRMREGLNVSKMMQAHINPVFDPAEDGKEASARGARPSVSGALDPKALVKEEQATTIFQSEQGKKTIDIYWLFDDGGLTLLIPYLLGRKRRWSKCKIRVFVGGQINRMDQERKAIISLLSKFRLGFHEVHILPDINQNPRAEHTKRFEDMIAPFRLNDGFKDEATVNEMRRDCPWKISDEEITKNRVKSLRQVRLNEIVLDYSRDAALIVITLPIGRKGKCPSSLYMAWLETLSQDLRPPVILIRGNQENVLTFYCQ

SEQ ID NO: 63994 - protein, 1029 aa, Homo sapiens; identical to SEQ ID NO: 63992

SEQ ID NO: 63995 - protein, 430 aa, Homo sapiens
MSLNNSSNVFLDSVPSNTNRFQVSVINENHESSAAADDNTDPPHYEETSFGDEAQKRLRISFRPGNQECYDNFLQSGETAKTDASFHAYDSHTNTYYLQTFGHNTMDAVPKIEYYRNTGSISGPKVNRPSLLEIHEQLAKNVAVTPSSADRVANGDGIPGDEQAENKEDDQAGVVKFGWVKGVLVRCMLNIWGVMLFIRLSWIVGEAGIGLGVLIILLSTMVTSITGLSTSAIATNGFVRGGGAYYLISRSLGPEFGGSIGLIFAFANAVAVAMYVVGFAETVVDLLKESDSMMVDPTNDIRIIGSITVVILLGISVAGMEWEAKAQVILLVILLIAIANFFIGTVIPSNNEKKSRGFFNYQASIFAENFGPRFTKGEGFFSVFAIFFPAATGILAGANISGDLEALRKQGASPLPQGAQSRRRRQTSLI

SEQ ID NO: 63996 - protein, 1099 aa, Homo sapiens
MSLNNSSNVFLDSVPSNTNRFQVSVINENHESSAAADDNTDPPHYEETSFGDEAQKRLRISFRPGNQECYDNFLQSGETAKTDASFHAYDSHTNTYYLQTFGHNTMDAVPKIEYYRNTGSISGPKVNRPSLLEIHEQLAKNVAVTPSSADRVANGDGIPGDEQAENKEDDQAGVVKFGWVKGVLVRCMLNIWGVMLFIRLSWIVGEAGIGLGVLIILLSTMVTSITGLSTSAIATNGFVRGGGAYYLISRSLGPEFGGSIGLIFAFANAVAVAMYVVGFAETVVDLLKESDSMMVDPTNDIRIIGSITVVILLGISVAGMEWEAKAQVILLVILLIAIANFFIGTVIPSNNEKKSRGFFNYQASIFAENFGPRFTKGEGFFSVFAIFFPAATGILAGANISGDLEDPQDAIPRGTMLAIFITTVAYLGVAICVGACVVRDATGNMNDTIISGMNCNGSAACGLGYDFSRCRHEPCQYGLMNNFQVMSMVSGFGPLITAGIFSATLSSALASLVSAPKVFQALCKDNIYKALQFFAKGYGKNNEPLRGYILTFLIAMAFILIAELNTIAPIISNFFLASYALINFSCFHASYAKSPGWRPAYGIYNMWVSLFGAVLCCAVMFVINWWAAVITYVIEFFLYVYVTCKKPDVNWGSSTQALSYVSALDNALELTTVEDHVKNFRPQCIVLTGGPMTRPALLDITHAFTKNSGLCICCEVFVGPRKLCVKEMNSGMAKKQAWLIKNKIKAFYAAVAADCFRDGVRSLLQASGLGRMKPNTLVIGYKKNWRKAPLTEIENYVGIIHDAFDFEIGVVIVRISQGFDISQVLQVQEELERLEQERLALEATIKDNECEEESGGIRGLFKKAGKLNITKTTPKKDGSINTSQSMHVGEFNQKLVEASTQFKKKQEKGTIDVWWLFDDGGLTLLIPYILTLRKKWKDCKLRIYVGGKINRIEEEKIVMASLLSKFRIKFADIHIIGDINIRPNKESWKVFEEMIEPYRLHESCKDLTTAEKLKRETPWKITDAELEAVKEKSYRQVRLNELLQEHSRAANLIVLSLPVARKGSISDLLYMAWLEILTKNLPPVLLVRGNHKNVLTFYS

SEQ ID NO: 63997 - protein, 1099 aa, Homo sapiens
MSLNNSSNVFLDSVPSNTNRFQVSVINENHESSAAADDNTDPPHYEETSFGDEAQKRLRISFRPGNQECYDNFLQSGETAKTDASFHAYDSHTNTYYLQTFGHNTMDAVPKIEYYRNTGSISGPKVNRPSLLEIHEQLAKNVAVTPSSADRVANGDGIPGDEQAENKEDDQAGVVKFGWVKGVLVRCMLNIWGVMLFIRLSWIVGEAGIGLGVIIIGLSVVVTTLTGISMSAICTNGVVRGGGAYYLISRSLGPEFGGSIGLIFAFANAVAVAMYVVGFAETVVDLLKESDSMMVDPTNDIRIIGSITVVILLGISVAGMEWEAKAQVILLVILLIAIANFFIGTVIPSNNEKKSRGFFNYQASIFAENFGPRFTKGEGFFSVFAIFFPAATGILAGANISGDLEDPQDAIPRGTMLAIFITTVAYLGVAICVGACVVRDATGNMNDTIISGMNCNGSAACGLGYDFSRCRHEPCQYGLMNNFQVMSMVSGFGPLITAGIFSATLSSALASLVSAPKVFQALCKDNIYKALQFFAKGYGKNNEPLRGYILTFLIAMAFILIAELNTIAPIISNFFLASYALINFSCFHASYAKSPGWRPAYGIYNMWVSLFGAVLCCAVMFVINWWAAVITYVIEFFLYVYVTCKKPDVNWGSSTQALSYVSALDNALELTTVEDHVKNFRPQCIVLTGGPMTRPALLDITHAFTKNSGLCICCEVFVGPRKLCVKEMNSGMAKKQAWLIKNKIKAFYAAVAADCFRDGVRSLLQASGLGRMKPNTLVIGYKKNWRKAPLTEIENYVGIIHDAFDFEIGVVIVRISQGFDISQVLQVQEELERLEQERLALEATIKDNECEEESGGIRGLFKKAGKLNITKTTPKKDGSINTSQSMHVGEFNQKLVEASTQFKKKQEKGTIDVWWLFDDGGLTLLIPYILTLRKKWKDCKLRIYVGGKINRIEEEKIVMASLLSKFRIKFADIHIIGDINIRPNKESWKVFEEMIEPYRLHESCKDLTTAEKLKRETPWKITDAELEAVKEKSYRQVRLNELLQEHSRAANLIVLSLPVARKGSISDLLYMAWLEILTKNLPPVLLVRGNHKNVLTFYS

SEQ ID NO: 63998 - protein, 593 aa, Homo sapiens
MLNIWGVMLFIRLSWIVGEAGIGLGVLIILLSTMVTSITGLSTSAIATNGFVRGGGAYYLISRSLGPEFGGSIGLIFAFANAVAVAMYVVGFAETVVDLLKESDSMMVDPTNDIRIIGSITVVILLGISVAGMEWEAKAQVILLVILLIAIANFFIGTVIPSNNEKKSRGFFNYQASIFAENFGPRFTKGEGFFSVFAIFFPAATGILAGANISGDLEDPQDAIPRGTMLAIFITTVAYLGVAICVGACVVRDATGNMNDTIISGMNCNGSAACGLGYDFSRCRHEPCQYGLMNNFQVMSMVSGFGPLITAGIFSATLSSALASLVSAPKVFQALCKDNIYKALQFFAKGYGKNNEPLRGYILTFLIAMAFILIAELNTIAPIISNFFLASYALINFSCFHASYAKSPGWRPAYGIYNMWVSLFGAVLCCAVMFVINWWAAVITYVIEFFLYVYVTCKKPDVNWGSSTQALSYVSALDNALELTTVEDHVKNFRPQCIVLTGGPMTRPALLDITHAFTKNSGLCICCEVFVGPRKLCVKEMNSGMAKTGLAYKEQNQGFLCCSGGRLFQGWCPKSSSGLRLRKNETKHSGDWI

SEQ ID NO: 63999 - protein, 179 aa, Homo sapiens
MRTMRAVQLQMTILTHHIMKKPLLGMKLRKDSESALGLGIRSAMTISSKQALSYVSALDNALELTTVEDHVKNFRPQCIVLTGGPMTRPALLDITHAFTKNSGLCICCEVFVGPRKLCVKEMNSGMAKKQAWLIKNKIKAFYAAVAADCFRDGVRSLLQASGLGRMKPNTLVIGYKKNW

SEQ ID NO: 64000 - protein, 1099 aa, Homo sapiens; identical to SEQ ID NO: 63996

SEQ ID NO: 64001 - protein, 648 aa, Homo sapiens
MLNIWGVMLFIRLSWIVGEAGIGLGVLIILLSTMVTSITGLSTSAIATNGFVRGGGAYYLISRSLGPEFGGSIGLIFAFANAVAVAMYVVGFAETVVDLLKESDSMMVDPTNDIRIIGSITVVILLGISVAGMEWEAKAQVILLVILLIAIANFFIGTVIPSNNEKKSRGFFNYQASIFAENFGPRFTKGEGFFSVFAIFFPAATGILAGANISGDLEDPQDAIPRGTMLAIFITTVAYLGVAICVGACVVRDATGNMNDTIISGMNCNGSAACGLGYDFSRCRHEPCQYGLMNNFQVMSMVSGFGPLITAGIFSATLSSALASLVSAPKVFQALCKDNIYKALQFFAKGYGKNNEPLRGYILTFLIAMAFILIAELNTIAPIISNFFLASYALINFSCFHASYAKSPGWRPAYGIYNMWVSLFGAVLCCAVMFVINWWAAVITYVIEFFLYVYVTCKKPDVNWGSSTQALSYVSALDNALELTTVEDHVKNFRPQCIVLTGGPMTRPALLDITHAFTKNSGLCICCEVFVGPRKLCVKEMNSGMAKKQAWLIKNKIKAFYAAVAADCFRDGVRSLLQASGLGRMKPNTLVIGYKKNWRKAPLTEIENYVGIIHDAFDFEIGVVIVRISQGFDISQVLQVQEELERLE

SEQ ID NO: 64002 - protein, 1212 aa, Homo sapiens
MEPRPTAPSSGAPGLAGVGETPSAAALAAARVELPGTAVPSVPEDAAPASRDGGGVRDEGPAAAGDGLGRPLGPTPSQSRFQVDLVSENAGRAAAAAAAAAAAAAAAGAGAGAKQTPADGEASGESEPAKGSEEAKGRFRVNFVDPAASSSAEDSLSDAAGVGVDGPNVSFQNGGDTVLSEGSSLHSGGGGGSGHHQHYYYDTHTNTYYLRTFGHNTMDAVPRIDHYRHTAAQLGEKLLRPSLAELHDELEKEPFEDGFANGEESTPTRDAVVTYTAESKGVVKFGWIKGVLVRCMLNIWGVMLFIRLSWIVGQAGIGLSVLVIMMATVVTTITGLSTSAIATNGFVRGGGAYYLISRSLGPEFGGAIGLIFAFANAVAVAMYVVGFAETVVELLKEHSILMIDEINDIRIIGAITVVILLGISVAGMEWEAKAQIVLLVILLLAIGDFVIGTFIPLESKKPKGFFGYKSEIFNENFGPDFREEETFFSVFAIFFPAATGILAGANISGDLADPQSAIPKGTLLAILITTLVYVGIAVSVGSCVVRDATGNVNDTIVTELTNCTSAACKLNFDFSSCESSPCSYGLMNNFQVMSMVSGFTPLISAGIFSATLSSALASLVSAPKIFQALCKDNIYPAFQMFAKGYGKNNEPLRGYILTFLIALGFILIAELNVIAPIISNFFLASYALINFSVFHASLAKSPGWRPAFKYYNMWISLLGAILCCIVMFVINWWAALLTYVIVLGLYIYVTYKKPDVNWGSSTQALTYLNALQHSIRLSGVEDHVKNFRPQCLVMTGAPNSRPALLHLVHDFTKNVGLMICGHVHMGPRRQAMKEMSIDQAKYQRWLIKNKMKAFYAPVHADDLREGAQYLMQAAGLGRMKPNTLVLGFKKDWLQADMRDVDMYINLFHDAFDIQYGVVVIRLKEGLDISHLQGQEELLSSQEKSPGTKDVVVSVEYSKKSDLDTSKPLSEKPITHKVEEEDGKTATQPLLKKESKGPIVPLNVADQKLLEASTQFQKKQGKNTIDVWWLFDDGGLTLLIPYLLTTKKKWKDCKIRVFIGGKINRIDHDRRAMATLLSKFRIDFSDIMVLGDINTKPKKENIIAFEEIIEPYRLHEDDKEQDIADKMKEDEPWRITDNELELYKTKTYRQIRLNELLKEHSSTANIIVMSLPVARKGAVSSALYMAWLEALSKDLPPILLVRGNHQSVLTFYS

SEQ ID NO: 64003 - protein, 1196 aa, Homo sapiens
MEPRPTAPSSGAPGLAGVGETPSAAALAAARVELPGTAVPSVPEDAAPASRDGGGVRDEGPAAAGDGLGRPLGPTPSQSRFQVDLVSENAGRAAAAAAAAAAAAAAAGAGAGAKQTPADGEASGESEPAKGSEEAKGRFRVNFVDPAASSSAEDSLSDAAGVGVDGPNVSFQNGGDTVLSEGSSLHSGGGGGSGHHQHYYYDTHTNTYYLRTFGHNTMDAVPRIDHYRHTAAQLGEKLLRPSLAELHDELEKEPFEDGFANGEESTPTRDAVVTYTAESKGVVKFGWIKGVLVRCMLNIWGVMLFIRLSWIVGQAGIGLSVLVIMMATVVTTITGLSTSAIATNGFVRGGGAYYLISRSLGPEFGGAIGLIFAFANAVAVAMYVVGFAETVVELLKEHSILMIDEINDIRIIGAITVVILLGISVAGMEWEAKAQIVLLVILLLAIGDFVIGTFIPLESKKPKGFFGYKSEIFNENFGPDFREEETFFSVFAIFFPAATGILAGANISGDLADPQSAIPKGTLLAILITTLVYVGIAVSVGSCVVRDATGNVNDTIVTELTNCTSAACKLNFDFSSCESSPCSYGLMNNFQVMSMVSGFTPLISAGIFSATLSSALASLVSAPKIFQALCKDNIYPAFQMFAKGYGKNNEPLRGYILTFLIALGFILIAELNVIAPIISNFFLASYALINFSVFHASLAKSPGWRPAFKYYNMWISLLGAILCCIVMFVINWWAALLTYVIVLGLYIYVTYKKPDVNWGSSTQALTYLNALQHSIRLSGVEDHVKNFRPQCLVMTGAPNSRPALLHLVHDFTKNVGLMICGHVHMGPRRQAMKEMSIDQAKYQRWLIKNKMKAFYAPVHADDLREGAQYLMQAAGLGRMKPNTLVLGFKKDWLQADMRDVDMYINLFHDAFDIQYGVVVIRLKEGLDISHLQGQEELLSSQEKSPGTKDVVVSVEYSKKSDLDTSKPLSEKPITHKESKGPIVPLNVADQKLLEASTQFQKKQGKNTIDVWWLFDDGGLTLLIPYLLTTKKKWKDCKIRVFIGGKINRIDHDRRAMATLLSKFRIDFSDIMVLGDINTKPKKENIIAFEEIIEPYRLHEDDKEQDIADKMKEDEPWRITDNELELYKTKTYRQIRLNELLKEHSSTANIIVMSLPVARKGAVSSALYMAWLEALSKDLPPILLVRGNHQSVLTFYS

SEQ ID NO: 64004 - protein, 595 aa, Homo sapiens
MKFFSYILVYRRFLFVVFTVLVLLPLPIVLHTKEAECAYTLFVVATFWLTEALPLSVTALLPSLMLPMFGIMPSKKVASAYFKDFHLLLIGVICLATSIEKWNLHKRIALKMVMMVGVNPAWLTLGFMSSTAFLSMWLSNTSTAAMVMPIAEAVVQQIINAEAEVEATQMTYFNGSTNHGLEIDESVNGHEINERKEKTKPVPGYNNDTGKISSKVELEKNSGMRTKYRTKKGHVTRKLTCLCIAYSSTIGGLTTITGTSTNLIFAEYFNTRYPDCRCLNFGSWFTFSFPAALIILLLSWIWLQWLFLGFNFKEMFKCGKTKTVQQKACAEVIKQEYQKLGPIRYQEIVTLVLFIIMALLWFSRDPGFVPGWSALFSEYPGFATDSTVALLIGLLFFLIPAKTLTKTTPTGEIVAFDYSPLITWKEFQSFMPWDIAILVGGGFALADGCEESGLSKWIGNKLSPLGSLPAWLIILISSLMVTSLTEVASNPATITLFLPILSPLAEAIHVNPLYILIPSTLCTSFAFLLPVANPPNAIVFSYGHLKVIDMVKAGLGVNIVGVAVVMLGICTWIVPMFDLYTYPSWAPAMSNETMP

SEQ ID NO: 64005 - protein, 161 aa, Homo sapiens
MLPMFGIMPSKKVASAYFKDFHLLLIGVICLATSIEKWNLHKRIALKMVMMVGVNPAWLTLGFMSSTAFLSMWLSNTSTAAMVMPIAEAVVQQIINAEAEVEATQMTYFNGSTNHGLEIDESVNGHEINERKEKTKPVPGYNNDTGKISSKVELEKYLQVR

SEQ ID NO: 64006 - protein, 626 aa, Homo sapiens
MGLLQGLLRVRKLLLVVCVPLLLLPLPVLHPSSEASCAYVLIVTAVYWVSEAVPLGAAALVPAFLYPFFGVLRSNEVAAEYFKNTTLLLVGVICVAAAVEKWNLHKRIALRMVLMAGAKPGMLLLCFMCCTTLLSMWLSNTSTTAMVMPIVEAVLQELVSAEDEQLVAGNSNTEEAEPISLDVKNSQPSLELIFVNEESNADLTTLMHNENLNGVPSITNPIKTANQHQGKKQHPSQEKPQVLTPSPRKQKLNRKYRSHHDQMICKCLSLSISYSATIGGLTTIIGTSTSLIFLEHFNNQYPAAEVVNFGTWFLFSFPISLIMLVVSWFWMHWLFLGCNFKETCSLSKKKKTKREQLSEKRIQEEYEKLGDISYPEMVTGFFFILMTVLWFTREPGFVPGWDSFFEKKGYRTDATVSVFLGFLLFLIPAKKPCFGKKNDGENQEHSLGTEPIITWKDFQKTMPWEIVILVGGGYALASGSKSSGLSTWIGNQMLSLSSLPPWAVTLLACILVSIVTEFVSNPATITIFLPILCSLSETLHINPLYTLIPVTMCISFAVMLPVGNPPNAIVFSYGHCQIKDMVKAGLGVNVIGLVIVMVAINTWGVSLFHLDTYPAWARVSNITDQA

SEQ ID NO: 64007 - protein, 522 aa, Homo sapiens
MASALSYVSKFKSFVILFVTPLLLLPLVILMPAKFVRCAYVIILMAIYWCTEVIPLAVTSLMPVLLFPLFQILDSRQVCVQYMKDTNMLFLGGLIVAVAVERWNLHKRIALRTLLWVGAKPARLMLGFMGVTALLSMWISNTATTAMMVPIVEAILQQMEATSAATEAGLELVDKGKAKELPGSQVIFEGPTLGQQEDQERKRLCKAMTLCICYAASIGGTATLTGTGPNVVLLGQMNELFPDSKDLVNFASWFAFAFPNMLVMLLFAWLWLQFVYMRFNFKKSWGCGLESKKNEKAALKVLQEEYRKLGPLSFAEINVLICFFLLVILWFSRDPGFMPGWLTVAWVEGETKYVSDATVAIFVATLLFIVPSQKPKFNFRSQTEEERKTPFYPPPLLDWKVTQEKVPWGIVLLLGGGFALAKGSEASGLSVWMGKQMEPLHAVPPAAITLILSLLVAVFTECTSNVATTTLFLPIFASMVKTGVIMNIIGVFCVFLAVNTWGRAIFDLDHFPDWANVTHIET

SEQ ID NO: 64008 - protein, 568 aa, Homo sapiens [sequence omitted]

SEQ ID NO: 64009 - protein, 525 aa, Homo sapiens
MASALSYVSKFKSFVILFVTPLLLLPLVILMPAKVCVQYMKDTNMLFLGGLIVAVAVERWNLHKRIALRTLLWVGAKPARLMLGFMGVTALLSMWISNTATTAMMVPIVEAILQQMEATSAATEAGLELVDKGKAKELPGSQVIFEGPTLGQQEDQERKRLCKAMTLCICYAASIGGTATLTGTGPNVVLLGQMNELFPDSKDLVNFASWFAFAFPNMLVMLLFAWLWLQFVYMRFNFKKSWGCGLESKKNEKAALKVLQEEYRKLGPLSFAEINVLICFFLLVILWFSRDPGFMPGWLTVAWVEGETKYVSDATVAIFVATLLFIVPSQKPKFNFRSQTEEERKTPFYPPPLLDWKVTQEKVPWGIVLLLGGGFALAKGSEASGLSVWMGKQMEPLHAVPPAAITLILSLLVAVFTECTSNVATTTLFLPIFASMSRSIGLNPLYIMLPCTLSASFAFMLPVATPPNAIVFTYGHLKVADMVKTGVIMNIIGVFCVFLAVNTWGRAIFDLDHFPDWANVTHIET

SEQ ID NO: 64010 - protein, 522 aa, Homo sapiens; identical to SEQ ID NO: 64007

SEQ ID NO: 64011 - protein, 592 aa, Homo sapiens
MATCWQALWAYRSYLIVFFVPILLLPLPILVPSKEAYCAYAIILMALFWCTEALPLAVTALFPLILFPMMGIVDASEVAVEYLKDSNLLFFGGLLVAIAVEHWNLHKRIALRVLLIVGVRPAPLILGFMLVTAFLSMWISNTATSAMMVPIAHAVLDQLHSSQASSNVEEGSNNPTFELQEPSPQKEVTKLDNGQALPVTSASSEGRAHLSQKHLHLTQCMSLCVCYSASIGGIATLTGTAPNLVLQGQINSLFPQNGNVVNFASWFSFAFPTMVILLLLAWLWLQILFLGFNFRKNFGIGEKMQEQQQAAYCVIQTEHRLLGPMTFAEKAISILFVILVLLWFTREPGFFLGWGNLAFPNAKGESMVSDGTVAIFIGIIMFIIPSKFPGLTQDPENPGKLKAPLGLLDWKTVNQKMPWNIVLLLGGGYALAKGSERSGLSEWLGNKLTPLQSVPAPAIAIILSLLVATFTECTSNVATTTIFLPILASMAQAICLHPLYVMLPCTLATSLAFMLPVATPPNAIVFSFGDLKVLDMARAGFLLNIIGVLIIALAINSWGIPLFSLHSFPSWAQSNTTAQCLPSLANTTTPSP

SEQ ID NO: 64012 - protein, 641 aa, Homo sapiens
MATCWQALWAYRSYLIVFFVPILLLPLPILVPSKEAYCAYAIILMALFWCTEALPLAVTALFPLILFPMMGIVDASEIIQRPFPSSFESPGECQSVGMSVTASHNLGGTVGDSRVFPPLSHVSTCQVAVEYLKDSNLLFFGGLLVAIAVEHWNLHKRIALRVLLIVGVRPAPLILGFMLVTAFLSMWISNTATSAMMVPIAHAVLDQLHSSQASSNVEEGSNNPTFELQEPSPQKEVTKLDNGQALPVTSASSEGRAHLSQKHLHLTQCMSLCVCYSASIGGIATLTGTAPNLVLQGQINSLFPQNGNVVNFASWFSFAFPTMVILLLLAWLWLQILFLGFNFRKNFGIGEKMQEQQQAAYCVIQTEHRLLGPMTFAEKAISILFVILVLLWFTREPGFFLGWGNLAFPNAKGESMVSDGTVAIFIGIIMFIIPSKFPGLTQDPENPGKLKAPLGLLDWKTVNQKMPWNIVLLLGGGYALAKGSERSGLSEWLGNKLTPLQSVPAPAIAIILSLLVATFTECTSNVATTTIFLPILASMAQAICLHPLYVMLPCTLATSLAFMLPVATPPNAIVFSFGDLKVLDMARAGFLLNIIGVLIIALAINSWGIPLFSLHSFPSWAQSNTTAQCLPSLANTTTPSP

SEQ ID NO: 64013 - protein, 521 aa, Homo sapiens
MPVCGNVAVEYLKDSNLLFFGGLLVAIAVEHWNLHKRIALRVLLIVGVRPAPLILGFMLVTAFLSMWISNTATSAMMVPIAHAVLDQLHSSQASSNVEEGSNNPTFELQEPSPQKEVTKLDNGQALPVTSASSEGRAHLSQKHLHLTQCMSLCVCYSASIGGIATLTGTAPNLVLQGQINSLFPQNGNVVNFASWFSFAFPTMVILLLLAWLWLQILFLGFNFRKNFGIGEKMQEQQQAAYCVIQTEHRLLGPMTFAEKAISILFVILVLLWFTREPGFFLGWGNLAFPNAKGESMVSDGTVAIFIGIIMFIIPSKFPGLTQDPENPGKLKAPLGLLDWKTVNQKMPWNIVLLLGGGYALAKGSERSGLSEWLGNKLTPLQSVPAPAIAIILSLLVATFTECTSNVATTTIFLPILASMAQAICLHPLYVMLPCTLATSLAFMLPVATPPNAIVFSFGDLKVLDMARAGFLLNIIGVLIIALAINSWGIPLFSLHSFPSWAQSNTTAQCLPSLANTTTPSP

SEQ ID NO: 64014 - protein, 344 aa, Homo sapiens
MALFWCTEALPLAVTALFPLILFPMMGIVDASEVAVEYLKDSNLLFFGGLLVAIAVEHWNLHKRIALRVLLIVGVRPAPLILGFMLVTAFLSMWISNTATSAMMVPIAHAVLDQLHSSQASSNVEEGSNNPTFELQEPSPQKEVTKLDNGQALPVTSASSEGRAHLSQKHLHLTQCMSLCVCYSASIGGIATLTGTAPNLVLQGQINSLFPQNGNVVNFASWFSFAFPTMVILLLLAWLWLQILFLGFNFRKNFGIGEKMQEQQQAAYCVIQTEHRLLGPMTFAEKAISILFVILVLLWFTREPGFFWLGQFGFSQCQGGEVRVAGVGRRTHLGLTCSGRREGY

SEQ ID NO: 64015 - protein, 549 aa, Homo sapiens
MATCWQALWAYRSYLIVFFVPILLLPLPILVPSKVAVEYLKDSNLLFFGGLLVAIAVEHWNLHKRIALRVLLIVGVRPAPLILGFMLVTAFLSMWISNTATSAMMVPIAHAVLDQLHSSQASSNVEEGSNNPTFELQEPSPQKEVTKLDNGQALPVTSASSEGRAHLSQKHLHLTQCMSLCVCYSASIGGIATLTGTAPNLVLQGQINSLFPQNGNVVNFASWFSFAFPTMVILLLLAWLWLQILFLGFNFRKNFGIGEKMQEQQQAAYCVIQTEHRLLGPMTFAEKAISILFVILVLLWFTREPGFFLGWGNLAFPNAKGESMVSDGTVAIFIGIIMFIIPSKFPGLTQDPENPGKLKAPLGLLDWKTVNQKMPWNIVLLLGGGYALAKGSERSGLSEWLGNKLTPLQSVPAPAIAIILSLLVATFTECTSNVATTTIFLPILASMAQAICLHPLYVMLPCTLATSLAFMLPVATPPNAIVFSFGDLKVLDMARAGFLLNIIGVLIIALAINSWGIPLFSLHSFPSWAQSNTTAQCLPSLANTTTPSP

SEQ ID NO: 64016 - protein, 602 aa, Homo sapiens
MAALAAAAKKVWSARRLLVLLFTPLALLPVVFALPPKEGRCLFVILLMAVYWCTEALPLSVTALLPIVLFPFMGILPSNKVCPQYFLDTNFLFLSGLIMASAIEEWNLHRRIALKILMLVGVQPARLILGMMVTTSFLSMWLSNTASTAMMLPIANAILKSLFGQKEVRKDPSQESEENTAAVRRNGLHTVPTEMQFLASTEAKDHPGETEVPLDLPADSRKEDEYRRNIWKGFLISIPYSASIGGTATLTGTAPNLILLGQLKSFFPQCDVVNFGSWFIFAFPLMLLFLLAGWLWISFLYGGLSFRGWRKNKSEIRTNAEDRARAVIREEYQNLGPIKFAEQAVFILFCMFAILLFTRDPKFIPGWASLFNPGFLSDAVTGVAIVTILFFFPSQRPSLKWWFDFKAPNTETEPLLTWKKAQETVPWNIILLLGGGFAMAKGCEESGLSVWIGGQLHPLENVPPALAVLLITVVIAFFTEFASNTATIIIFLPVLAELAIRLRVHPLYLMIPGTVGCSFAFMLPVSTPPNSIAFASGHLLVKDMVRTGLLMNLMGVLLLSLAMNTWAQTIFQLGTFPDWADMYSVNVTALPPTLANDTFRTL

SEQ ID NO: 64017 - protein, 555 aa, Homo sapiens
MAVYWCTEALPLSVTALLPIVLFPFMGILPSNKVCPQYFLDTNFLFLSGLIMASAIEEWNLHRRIALKILMLVGVQPARLILGMMVTTSFLSMWLSNTASTAMMLPIANAILKSLFGQKEVRKDPSQESEENTAAVRRNGLHTVPTEMQFLASTEAKDHPGETEVPLDLPADSRKEDEYRRNIWKGFLISIPYSASIGGTATLTGTAPNLILLGQLKSFFPQCDVVNFGSWFIFAFPLMLLFLLAGWLWISFLYGGLSFRGWRKNKSEIRTNAEDRARAVIREEYQNLGPIKFAEQAVFILFCMFAILLFTRDPKFIPGWASLFNPGFLSDAVTGVAIVTILFFFPSQRPSLKWWFDFKAPNTETEPLLTWKKAQETVPWNIILLLGGGFAMAKGCEESGLSVWIGGQLHPLENVPPALAVLLITVVIAFFTEFASNTATIIIFLPVLAELAIRLRVHPLYLMIPGTVGCSFAFMLPVSTPPNSIAFASGHLLVKDMVRTGLLMNLMGVLLLSLAMNTWAQTIFQLGTFPDWADMYSVNVTALPPTLANDTFRTL

SEQ ID NO: 64018 - protein, 232 aa, Homo sapiens
MAALAAAAKKVWSARRLLVLLFTPLALLPVVFALPPKEGRCLFVILLMAVYWCTEALPLSVTALLPIVLFPFMGILPSNKVCPQYFLDTNFLFLSGLIMASAIEEWNLHRRIALKILMLVGVQPARLILGMMVTTSFLSMWLSNTASTAMMLPIANAILKSLFGQKEVRKDPSQESEENTGIEPNTFLSEERLKLQAPLVIRLGQITESGQWNMSGNDVCNFRVLSFLPGGM

SEQ ID NO: 64019 - protein, 338 aa, Homo sapiens
MAALAAAAKKVWSARRLLVLLFTPLALLPVVFALPPKEGRCLFVILLMAVYWCTEALPLSVTALLPIVLFPFMGILPSNKVCPQYFLDTNFLFLSGLIMASAIEEWNLHRRIALKILMLVGVQPARLILGMMVTTSFLSMWLSNTASTAMMLPIANAILKSLFGQKEVRKDPSQESEENTAKTTLGRQRFHWICRLTPGRRMNIVGTSGRASSSPSPTQPVLGAQPHSRAQPLTSSCLASSRGWLWISFLYGGLSFRGWRKNKSEIRTNAEDRARAVIREEYQNLGPIKFAEQAVFILFCMFAILLFTRDPKFIPGWASLFNPGCKMGIISISTIQKM

SEQ ID NO: 64020 - protein, 520 aa, Homo sapiens
MAVYWCTEALPLSVTALLPIVLFPFMGILPSNKVCPQYFLDTNFLFLSGLIMASAIEEWNLHRRIALKILMLVGVQPARLILGMMVTTSFLSMWLSNTASTAMMLPIANAILKSLFGQKEVRKDPSQESEENTAAVRRNGLHTVPTEMQFLASTEAKDHPGETEVPLDLPADSRKEDEYRRNIWKGFLISIPYSASIGGTATLTGTAPNLILLGQLKSFFPQCDVVNFGSWFIFAFPLMLLFLLAGWLWISFLYGGLSFRGWRKNKSEIRTNAEDRARAVIREEYQNLGPIKFLSDAVTGVAIVTILFFFPSQRPSLKWWFDFKAPNTETEPLLTWKKAQETVPWNIILLLGGGFAMAKGCEESGLSVWIGGQLHPLENVPPALAVLLITVVIAFFTEFASNTATIIIFLPVLAELAIRLRVHPLYLMIPGTVGCSFAFMLPVSTPPNSIAFASGHLLVKDMVRTGLLMNLMGVLLLSLAMNTWAQTIFQLGTFPDWADMYSVNVTALPPTLANDTFRTL

SEQ ID NO: 64021 - protein, 552 aa, Homo sapiens
MAALAAAAKKVWSARRLLVLLFTPLALLPVVFALPPKEGRCLFVILLMAVYWCTEALPLSVTALLPIVLFPFMGILPSNKVCPQYFLDTNFLFLSGLIMASAIEEWNLHRRIALKILMLVGVQPARLILGMMVTTSFLSMWLSNTASTAMMLPIANAILKSLFGQKEVRKDPSQESEENTAKTTLGRQRFHWICRLTPGRRMNIVGTSGRASSSPSPTQPVLGAQPHSRAQPLTSSCLASSRGWLWISFLYGGLSFRGWRKNKSEIRTNAEDRARAVIREEYQNLGPIKFAEQAVFILFCMFAILLFTRDPKFIPGWASLFNPGFLSDAVTGVAIVTILFFFPSQRPSLKWWFDFKAPNTETEPLLTWKKAQETVPWNIILLLGGGFAMAKGCEESGLSVWIGGQLHPLENVPPALAVLLITVVIAFFTEFASNTATIIIFLPVLAELAIRLRVHPLYLMIPGTVGCSFAFMLPVSTPPNSIAFASGHLLVKDMVRTGLLMNLMGVLLLSLAMNTWAQTIFQLGTFPDWADMYSVNVTALPPTLANDTFRTL

SEQ ID NO: 64022 - protein, 185 aa, Homo sapiens
MAVYWCTEALPLSVTALLPIVLFPFMGILPSNKVCPQYFLDTNFLFLSGLIMASAIEEWNLHRRIALKILMLVGVQPARLILGMMVTTSFLSMWLSNTASTAMMLPIANAILKSLFGQKEVRKDPSQESEENTGIEPNTFLSEERLKLQAPLVIRLGQITESGQWNMSGNDVCNFRVLSFLPGGM

SEQ ID NO: 64023 - protein, 187 aa, Homo sapiens
MLSPAWLLSPSCSSSRPKGPLSSGGLTSKESGLSVWIGGQLHPLENVPPALAVLLITVVIAFFTEFASNTATIIIFLPVLAELAIRLRVHPLYLMIPGTVGCSFAFMLPVSTPPNSIAFASGHLLVKDMVRTGLLMNLMGVLLLSLAMNTWAQTIFQLGTFPDWADMYSVNVTALPPTLANDTFRTL

SEQ ID NO: 64024 - protein, 409 aa, Homo sapiens
MAVYWCTEALPLSVTALLPIVLFPFMGILPSNKVCPQYFLDTNFLFLSGLIMASAIEEWNLHRRIALKILMLVGVQPARLILGMMVTTSFLSMWLSNTASTAMMLPIANAILKSLFGQKEVRKDPSQESEENTAAVRRNGLHTVPTEMQFLASTEAKDHPGETEVPLDLPADSRKEDEYRRNIWKGFLISIPYSASIGGTATLTGTAPNLILLGQLKSFFPQCDVVNFGSWFIFAFPLMLLFLLAGWLWISFLYGGLSFRGWRKNKSEIRTNAEDRARAVIREEYQNLGPIKFAEQAVFILFCMFAILLFTRDPKFIPGWASLFNPGFLSDAVTGVAIVTILFFFPSQRPSLKWWFDFKAPNTETEPLLTWKKAQETVPWNIILLLGGGFAMAKGCEESGLSVWIGGQL

SEQ ID NO: 64025 - protein, 555 aa, Homo sapiens; identical to SEQ ID NO: 64017

SEQ ID NO: 64026 - protein, 920 aa, Homo sapiens
MSDPHSSPLLPEPLSSRYKLYEAEFTSPSWPSTSPDTHPALPLLEMPEEKDLRSSNEDSHIVKIEKLNERSKRKDDGVAHRDSAGQRCICLSKAVGYLTGDMKEYRIWLKDKHLALQFIDWVLRGTAQVMFINNPLSGLIIFIGLLIQNPWWTITGGLGTVVSTLTALALGQDRSAIASGLHGYNGMLVGLLMAVFSEKLDYYWWLLFPVTFTAMSCPVLSSALNSIFSKWDLPVFTLPFNIAVTLYLAATGHYNLFFPTTLVEPVSSVPNITWTEMEMPLLLQAIPVGVGQVYGCDNPWTGGVFLVALFISSPLICLHAAIGSIVGLLAALSVATPFETIYTGLWSYNCVLSCIAIGGMFYALTWQTHLLALICALFCAYMEAAISNIMSVVGVPPGTWAFCLATIIFLLLTTNNPAIFRLPLSKVTYPEANRIYYLTVKSGEEEKAPSGGGGEHPPTAGPKVEEGSEAVLSKHRSVFHIEWSSIRRRSKVFGKGEHQERQNKDPFPYRYRKPTVELLDLDTMEESSEIKVETNISKTSWIRSSMAASGKRVSKALSYITGEMKECGEGLKDKSPVFQFFDWVLRGTSQVMFVNNPLSGILIILGLFIQNPWWAISGCLGTIMSTLTALILSQDKSAIAAGFHGYNGVLVGLLMAVFSDKGDYYWWLLLPVIIMSMSCPILSSALGTIFSKWDLPVFTLPFNITVTLYLAATGHYNLFFPTTLLQPASAMPNITWSEVQVPLLLRAIPVGIGQVYGCDNPWTGGIFLIALFISSPLICLHAAIGSTMGMLAALTIATPFDSIYFGLCGFNSTLACIAIGGMFYVITWQTHLLAIACALFAAYLGAALANMLSVFGLPPCTWPFCLSALTFLLLTTNNPAIYKLPLSKVTYPEANRIYYLSQERNRRASIITKYQAYDVS

SEQ ID NO: 64027 - protein, 389 aa, Homo sapiens
MEDSPTMVRVDSPTMVRGENQVSPCQGRRCFPKALGYVTGDMKELANQLKDKPVVLQFIDWILRGISQVVFVNNPVSGILILVGLLVQNPWWALTGWLGTVVSTLMALLLSQDRSLIASGLYGYNATLVGVLMAVFSDKGDYFWWLLLPVCAMSMTCPIFSSALNSMLSKWDLPVFTLPFNMALSMYLSATGHYNPFFPAKLVIPITTAPNISWSDLSALELLKSIPVGVGQIYGCDNPWTGGIFLGAILLSSPLMCLHAAIGSLLGIAAGLSLSAPFEDIYFGLWGFNSSLACIAMGGMFMALTWQTHLLALGCALFTAYLGVGMANFMAEVGLPACTWPFCLATLLFLIMTTKNSNIYKMPLSKVTYPEENRIFYLQAKKRMVESPL

SEQ ID NO: 64028 - protein, 284 aa, Homo sapiens
MALLLSQDRSLIASGLYGYNATLVGVLMAVFSDKGDYFWWLLLPVCAMSMTCPIFSSALNSMLSKWDLPVFTLPFNMALSMYLSATGHYNPFFPAKLVIPITTAPNISWSDLSALELLKSIPVGVGQIYGCDNPWTGGIFLGAILLSSPLMCLHAAIGSLLGIAAGLSLSAPFEDIYFGLWGFNSSLACIAMGGMFMALTWQTHLLALGCALFTAYLGVGMANFMAEVGLPACTWPFCLATLLFLIMTTKNSNIYKMPLSKVTYPEENRIFYLQAKKRMVESPL

SEQ ID NO: 64029 - protein, 445 aa, Homo sapiens
MNGRSLIGGAGDARHGPVWKDPFGTKAGDAARRGIARLSLALADGSQEQEPEEEIAMEDSPTMVRVDSPTMVRGENQVSPCQGRRCFPKALGYVTGDMKELANQLKDKPVVLQFIDWILRGISQVVFVNNPVSGILILVGLLVQNPWWALTGWLGTVVSTLMALLLSQDRSLIASGLYGYNATLVGVLMAVFSDKGDYFWWLLLPVCAMSMTCPIFSSALNSMLSKWDLPVFTLPFNMALSMYLSATGHYNPFFPAKLVIPITTAPNISWSDLSALELLKSIPVGVGQIYGCDNPWTGGIFLGAILLSSPLMCLHAAIGSLLGIAAGLSLSAPFEDIYFGLWGFNSSLACIAMGGMFMALTWQTHLLALGCALFTAYLGVGMANFMAEVGLPACTWPFCLATLLFLIMTTKNSNIYKMPLSKVTYPEENRIFYLQAKKRMVESPL

SEQ ID NO: 64030 - protein, 445 aa, Homo sapiens; identical to SEQ ID NO: 64029

SEQ ID NO: 64031 - protein, 214 aa, Homo sapiens
MNGRSLIGGAGDARHGPVWKDPFGTKAGDAARRGIARLSLALADGSQEQEPEEEIAMEDSPTMVRVDSPTMVRGENQVSPCQGRRCFPKALGYVTGDMKELANQLKDKPVVLQFIDWILRGISQVVFVNNPVSGILILVGLLVQNPWWALTGWLGTVVSTLMALLLSQDRSLIASGLYGYNATLVGVLMAVFSDKGDYFWWLLLPVCAMSMTCC

SEQ ID NO: 64032 - protein, 281 aa, Homo sapiens
MGRRNRSLIASGLYGYNATLVGVLMAVFSDKGDYFWWLLLPVCAMSMTCPIFSSALNSMLSKWDLPVFTLPFNMALSMYLSATGHYNPFFPAKLVIPITTAPNISWSDLSALELLKSIPVGVGQIYGCDNPWTGGIFLGAILLSSPLMCLHAAIGSLLGIAAGLSLSAPFEDIYFGLWGFNSSLACIAMGGMFMALTWQTHLLALGCALFTAYLGVGMANFMAEVGLPACTWPFCLATLLFLIMTTKNSNIYKMPLSKVTYPEENRIFYLQAKKRMVESPL

SEQ ID NO: 64033 - protein, 257 aa, Homo sapiens
MAVFSDKGDYFWWLLLPVCAMSMTCPIFSSALNSMLSKWDLPVFTLPFNMALSMYLSATGHYNPFFPAKLVIPITTAPNISWSDLSALELLKSIPVGVGQIYGCDNPWTGGIFLGAILLSSPLMCLHAAIGSLLGIAAGLSLSAPFEDIYFGLWGFNSSLACIAMGGMFMALTWQTHLLALGCALFTAYLGVGMANFMAEVGLPACTWPFCLATLLFLIMTTKNSNIYKMPLSKVTYPEENRIFYLQAKKRMVESPL

SEQ ID NO: 64034 - protein, 920 aa, Homo sapiens; identical to SEQ ID NO: 64026

SEQ ID NO: 64035 - protein, 235 aa, Homo sapiens
MSDPHSSPLLPEPLSSRYKLYEAEFTSPSWPSTSPDTHPALPLLEMPEEKDLRSSNEDSHIVKIEKLNERSKRKDDGVAHRDSAGQRCICLSKAVGYLTGDMKEYRIWLKDKHLALQFIDWVLRGTAQVMFINNPLSGLIIFIGLLIQNPWWTITGGLGTVVSTLTALALGQDRSAIASGLHGYNGMLVGLLMAVFSEKLDYYWWLLFPVTFTAMSWMETDFNWSKSGCWKHLLQ

SEQ ID NO: 64036 - protein, 208 aa, Homo sapiens
MDQWGVYFNPVLVSFCQSFFGYPLSIFFIVVNEFCERFSYYGMRAILILYFTNFISWDDNLSTAIYHTFVALCYLTPILGALIADSWLGKFKTIVSLSIVYTIGQAVTSVSSINDLTDHNHDGTPDSLPVHVVLSLIGLALIALGTGGIKPCVSAFGGDQFEEGQEKQRNRFFSIFYLAINAGSLLSTIITPMLRGKRYLKGTSVGLF

SEQ ID NO: 64037 - protein, 282 aa, Homo sapiens
MRAILILYFTNFISWDDNLSTAIYHTFVALCYLTPILGALIADSWLGKFKTIVSLSIVYTIGQAVTSVSSINDLTDHNHDGTPDSLPVHVVLSLIGLALIALGTGGIKPCVSAFGGDQFEEGQEKQRNRFFSIFYLAINAGSLLSTIITPMLRGKRYLKGTSVGLFLVRPSPCLLRFVLFFPSALFSSCQLHAGMHVGIWSKCFLPCEFHLLFVLFKSLIPVTTGESKPSLAWASIFLNCYSCKVMLVVRGKRQERCLGSQAGGRSCHFSLQALLPSDISVT

SEQ ID NO: 64038 - protein, 708 aa, Homo sapiens
MGMSKSHSFFGYPLSIFFIVVNEFCERFSYYGMRAILILYFTNFISWDDNLSTAIYHTFVALCYLTPILGALIADSWLGKFKTIVSLSIVYTIGQAVTSVSSINDLTDHNHDGTPDSLPVHVVLSLIGLALIALGTGGIKPCVSAFGGDQFEEGQEKQRNRFFSIFYLAINAGSLLSTIITPMLRVQQCGIHSKQACYPLAFGVPAALMAVALIVFVLGSGMYKKFKPQGNIMGKVAKCIGFAIKNRFRHRSKAFPKREHWLDWAKEKYDERLISQIKMVTRVMFLYIPLPMFWALFDQQGSRWTLQATTMSGKIGALEIQPDQMQTVNAILIVIMVPIFDAVLYPLIAKCGFNFTSLKKMAVGMVLASMAFVVAAIVQVEIDKTLPVFPKGNEVQIKVLNIGNNTMNISLPGEMVTLGPMSQTNAFMTFDVNKLTRINISSPGSPVTAVTDDFKQGQRHTLLVWAPNHYQVVKDGLNQKPEKGENGIRFVNTFNELITITMSGKVYANISSYNASTYQFFPSGIKGFTISSTEIPPQCQPNFNTFYLEFGSAYTYIVQRKNDSCPEVKVFEDISANTVNMALQIPQYFLLTCGEVVFSVTGLEFSYSQAPSNMKSVLQAGWLLTVAVGNIIVLIVAGAGQFSKQWAEYILFAALLLVVCVIFAIMARFYTYINPAEIEAQFDEDEKKNRLEKSNPYFMSGANSQKQM

SEQ ID NO: 64039 - protein, 500 aa, Homo sapiens
MPPAVGGPVGYTPPDGGWGWAVVIGAFISIGFSYAFPKSITVFFKEIEGIFHATTSEVSWISSIMLAVMYGGGPISSILVNKYGSRIVMIVGGCLSGCGLIAASFCNTVQQLYVCIGVIGGLGLAFNLNPALTMIGKYFYKRRPLANGLAMAGSPVFLCTLAPLNQVFFGIFGWRGSFLILGGLLLNCCVAGALMRPIGPKPTKAGKDKSKASLEKAGKSGVKKDLHDANTDLIGRHPKQEKRSVFQTINQFLDLTLFTHRGFLLYLSGNVIMFFGLFAPLVFLSSYGKSQHYSSEKSAFLLSILAFVDMVARPSMGLVANTKPIRPRIQYFFAASVVANGVCHMLAPLSTTYVGFCVYAGFFGFAFGWLSSVLFETLMDLVGPQRFSSAVGLVTIVECCPVLLGPPLLGRLNDMYGDYKYTYWACGVVLIISGIYLFIGMGINYRLLAKEQKANEQKKESKEEETSIDVAGKPNEVTKAAESPDQKDTDGGPKEEESPV

SEQ ID NO: 64040 - protein, 215 aa, Homo sapiens
MPPAVGGPVGYTPPDGGWGWAVVIGAFISIGFSYAFPKSITVFFKEIEGIFHATTSEVSWISSIMLAVMYGGGPISSILVNKYGSRIVMIVGGCLSGCGLIAASFCNTVQQLYVCIGVIGGLGLAFNLNPALTMIGKYFYKRRPLANGLAMAGSPVFLCTLAPLNQVFFGIFGWRGSFLILGGLLLNCCVAGALMRPIGPKPTKAGKDKSKASLE

SEQ ID NO: 64041 - protein, 430 aa, Homo sapiens
MPPAVGGPVGYTPPDGGWGWAVVIGAFISIGFSYAFPKSITVFFKEIEGIFHATTSEVSWISSIMLAVMYGGGPISSILVNKYGSRIVMIVGGCLSGCGLIAASFCNTVQQLYVCIGVIGGLGLAFNLNPALTMIGKYFYKRRPLANGLAMAGSPVFLCTLAPLNQVFFGIFGWRGSFLILGGLLLNCCVAGALMRPIGPKPTKAGKDKSKASLEKAGKSGVKKDLHDANTDLIGRHPKQEKRSVFQTINQFLDLTLFTHRGFLLYLSGNVIMFFGLFAPLVFLSSYGKSQHYSSEKSAFLLSILAFVDMVARPSMGLVANTKPIRPRIQYFFAASVVANGVCHMLAPLSTTYVGFCVYAGFFGFAFGWLSSVLFETLMDLVGPQRFSSAVGLVTIVECCPVLLGPPLLGIVYLPTNVGLLQNKHVRWEC

SEQ ID NO: 64042 - protein, 296 aa, Homo sapiens
MPPAVGGPVGYTPPDGGWGWAVVIGAFISIGFSYAFPKSITVFFKEIEGIFHATTSEVSWISSIMLAVMYGGGPISSILVNKYGSRIVMIVGGCLSGCGLIAASFCNTVQQLYVCIGVIGGLGLAFNLNPALTMIGKYFYKRRPLANGLAMAGSPVFLCTLAPLNQVFFGIFGWRGSFLILGGLLLNCCVAGALMRPIGPKPTKAGKDKSKASLEKAGKSGVKKDLHDANTDLIGRHPKQEKRSVFQTINQFLDLTLFTHRGFLLYLSGNVIMFFGLFAPLVFLSSYGKSQHYSSE

SEQ ID NO: 64043 - protein, 456 aa, Homo sapiens
MPPAVGGPVGYTPPDGGWGWAVVIGAFISIGFSYAFPKSITVFFKEIEGIFHATTSEVSWISSIMLAVMYGGGPISSILVNKYGSRIVMIVGGCLSGCGLIAASFCNTVQQLYVCIGVIGGLGLAFNLNPALTMIGKYFYKRRPLANGLAMAGSPVFLCTLAPLNQVFFGIFGWRGSFLILGGLLLNCCVAGALMRPIGPKPTKAGKDKSKASLEKAGKSGVKKDLHDANTDLIGRHPKQEKRSVFQTINQFLDLTLFTHRGFLLYLSGNVIMFFGLFAPLVFLSSYGKSQHYSSEKSAFLLSILAFVDMVARPSMGLVANTKPIRPRIQYFFAASVVANGVCHMLAPLSTTYVGFCVYAGFFGFAFGWLSSVLFETLMDLVGPQRFSSAVGLVTIVECCPVLLGPPLLGRLNDMYGDYKYTYWACGVVLIISGIYLFIGMGINYRLLAKEQKANE

SEQ ID NO: 64044 - protein, 500 aa, Homo sapiens; identical to SEQ ID NO: 64039

SEQ ID NO: 64045 - protein, 201 aa, Homo sapiens
MKHVNERFQDEKNKEVVLMCIGVTSGVGRLLFGRIADYVPGVKKVYLQVLSFFFIGLMSMMIPLCSIFGALIAVCLIMGLFDGCFISIMAPIAFELVGAQDVSQAIGFLLGFMSIPMTVGPPIAGLLRDKLGSYDVAFYLAGVPPLIGGAVLCFIPWIHSKKQREISKTTGKEKMEKMLENQNSLLSSSSGMFKKESDSII

SEQ ID NO: 64046 - protein, 515 aa, Homo sapiens
MVLSQEEPDSARGTSEAQPLGPAPTGAAPPPGPGPSDSPEAAVEKVEVELAGPATAEPHEPPEPPEGGWGWLVMLAAMWCNGSVFGIQNACGVLFVSMLETFGSKDDDKMVFKTAWVGSLSMGMIFFCCPIVSVFTDLFGCRKTAVVGAAVGFVGLMSSSFVSSIEPLYLTYGIIFACGCSFAYQPSLVILGHYFKKRLGLVNGIVTAGSSVFTILLPLLLRVLIDSVGLFYTLRVLCIFMFVLFLAGFTYRPLATSTKDKESGGSGSSLFSRKKFSPPKKIFNFAIFKVTAYAVWAVGIPLALFGYFVPYVHLMKHVNERFQDEKNKEVVLMCIGVTSGVGRLLFGRIADYVPGVKKVYLQVLSFFFIGLMSMMIPLCSIFGALIAVCLIMGLFDGCFISIMAPIAFELVGAQDVSQAIGFLLGFMSIPMTVGPPIAGLLRDKLGSYDVAFYLAGVPPLIGGAVLCFIPWIHSKKQREISKTTGKEKMEKMLENQNSLLSSSSGMFKKESDSII

SEQ ID NO: 64047 - protein, 216 aa, Homo sapiens
MVFKTAWVGSLSMGMIFFCCPIVSVFTDLFGCRKTAVVGAAVGFVGLMSSSFVSSIEPLYLTYGIIFACGCSFAYQPSLVILGHYFKKRLGLVNGIVTAGSSVFTILLPLLLRVLIDSVGLFYTLRVLCIFMFVLFLAGFTYRPLATSTKDKESGGSGSSLFSRKKFSPPKKIFNFAIFKVTAYAVWAVGIPLALFGYFVPYVHLAKFSFVILKYE

SEQ ID NO: 64048 - protein, 211 aa, Homo sapiens
  VARIANT 1: note = MOD_RES - Any amino acid
XWVGSLSMGMIFFCCPIVSVFTDLFGCRKTAVVGAAVGFVGLMSSSFVSSIEPLYLTYGIIFACGCSFAYQPSLVILGHYFKKRLGLVNGIVTAGSSVFTILLPLLLRVLIDSVGLFYTLRVLCIFMFVLFLAGFTYRPLATSTKDKESGGSGSSLFSRKKFSPPKKIFNFAIFKVTAYAVWAVGIPLALFGYFVPYVHLAKFSFVILKYE

SEQ ID NO: 64049 - protein, 206 aa, Homo sapiens
  VARIANT 1: note = MOD_RES - Any amino acid
XWVGSLSMGMIFFCCPIVSVFTDLFGCRKTAVVGAAVGFVGLMSSSFVSSIEPLYLTYGIIFACGCSFAYQPSLVILGHYFKKRLGLVNGIVTAGSSVFTILLPLLLRVLIDSVGLFYTLRVLCIFMFVLFLAGFTYRPLATSTKDKESGGSGSSLFSRKKFSPPKKIFNFAIFKVTAYAVWAVGIPLALFGYFVPYVHLVSMLLH

SEQ ID NO: 64050 - protein, 326 aa, Homo sapiens
MVLSQEEPDSARGTSEAQPLGPAPTGAAPPPGPGPSDSPEAAVEKVEVELAGPATAEPHEPPEPPEGGWGWLVMLAAMWCNGSVFGIQNACGVLFVSMLETFGSKDDDKMVFKTAWVGSLSMGMIFFCCPIVSVFTDLFGCRKTAVVGAAVGFVGLMSSSFVSSIEPLYLTYGIIFACGCSFAYQPSLVILGHYFKKRLGLVNGIVTAGSSVFTILLPLLLRVLIDSVGLFYTLRVLCIFMFVLFLAGFTYRPLATSTKDKESGGSGSSLFSRKKFSPPKNFQFCHLQGDSLCSVGSWNTTCTFWILCALCSLGEYAPSLIMNITI

SEQ ID NO: 64051 - protein, 486 aa, Homo sapiens
MAKVNRARSTSPPDGGWGWMIVAGCFLVTICTRAVTRCISIFFVEFQTYFTQDYAQTAWIHSIVDCVTMLCAPLGSVVSNHLSCQVGIMLGGLLASTGLILSSFATSLKHLYLTLGVLTGLGFALCYSPAIAMVGKYFSRRKALAYGIAMSGSGIGTFILAPVVQLLIEQFSWRGALLILGGFVLNLCVCGALMRPITLKEDHTTPEQNHVCRTQKEDIKRVSPYSSLTKEWAQTCLCCCLQQEYSFLLMSDFVVLAVSVLFMAYGCSPLFVYLVPYALSVGVSHQQAAFLMSILGVIDIIGNITFGWLTDRRCLKNYQYVCYLFAVGMDGLCYLCLPMLQSLPLLVPFSCTFGYFDGAYVTLIPVVTTEIVGTTSLSSALGVVYFLHAVPYLVSPPIAGRLVDTTGSYTAAFLLCGFSMIFSSVLLGFARLIKRMRKTQLQFIAKESDPKLQLWTNGSVAYSVARELDQKHGEPVATAVPGYSLT

SEQ ID NO: 64052 - protein, 516 aa, Homo sapiens
MPSGSHWTANSSKIITWLLEQPGKEEKRKTMAKVNRARSTSPPDGGWGWMIVAGCFLVTICTRAVTRCISIFFVEFQTYFTQDYAQTAWIHSIVDCVTMLCAPLGSVVSNHLSCQVGIMLGGLLASTGLILSSFATSLKHLYLTLGVLTGLGFALCYSPAIAMVGKYFSRRKALAYGIAMSGSGIGTFILAPVVQLLIEQFSWRGALLILGGFVLNLCVCGALMRPITLKEDHTTPEQNHVCRTQKEDIKRVSPYSSLTKEWAQTCLCCCLQQEYSFLLMSDFVVLAVSVLFMAYGCSPLFVYLVPYALSVGVSHQQAAFLMSILGVIDIIGNITFGWLTDRRCLKNYQYVCYLFAVGMDGLCYLCLPMLQSLPLLVPFSCTFGYFDGAYVTLIPVVTTEIVGTTSLSSALGVVYFLHAVPYLVSPPIAGRLVDTTGSYTAAFLLCGFSMIFSSVLLGFARLIKRMRKTQLQFIAKESDPKLQLWTNGSVAYSVARELDQKHGEPVATAVPGYSLT

SEQ ID NO: 64053 - protein, 25 aa, Homo sapiens
MPSGSHWTANSSKIITWLLEQPGKE

SEQ ID NO: 64054 - protein, 150 aa, Homo sapiens
MRPITLKEDHTTPEQNHVCRTQKEDIKRVSPYSSLTKEWAQTCLCCCLQQEYSFLLMSDFVVLAVSVLFMAYGCSPLFVYLVPYALSVGVSHQQAAFLMSILGVIDIIGNITFGWLTDRRFCIKTFGIFRKSVRKMYILRSTILHFYTEF

SEQ ID NO: 64055 - protein, 613 aa, Homo sapiens
MGRGGGGLDVGGGGEGSRDRLSRDGLASWGAEPGGGGSGSGSSSPPSSSSCSSRNKYQPQSGSSGPSSHSPPAAMALQSQASEEAKGPWQEADQEQQEPVGSPEPESEPEPEPEPEPVPVPPPEPQPEPQPLPDPAPLPELEFESERVHEPEPTPTVETRGTARGFQPPEGGFGWVVVFAATWCNGSIFGIHNSVGILYSMLLEEEKEKNRQVEFQAAWVGALAMGMIFFCSPIVSIFTDRLGCRITATAGAAVAFIGLHTSSFTSSLSLRYFTYGILFGCGCSFAFQPSLVILGHYFQRRLGLANGVVSAGSSIFSMSFPFLIRMLGDKIKLAQTFQVLSTFMFVLMLLSLTYRPLLPSSQDTPSKRGVRTLHQRFLAQLRKYFNMRVFRQRTYRIWAFGIAAAALGYFVPYVHLMKYVEEEFSEIKETWVLLVCIGATSGLGRLVSGHISDSIPGLKKIYLQVLSFLLLGLMSMMIPLCRDFGGLIVVCLFLGLCDGFFITIMAPIAFELVGPMQASQAIGYLLGMMALPMIAGPPIAGLLRNCFGDYHVAFYFAGVPPIIGAVILFFVPLMHQRMFKKEQRDSSKDKMLAPDPDPNGELLPGSPNPEEPI

SEQ ID NO: 64056 - protein, 478 aa, Homo sapiens
MPPMPSAPPVHPPPDGGWGWIVVGAAFISIGFSYAFPKAVTVFFKEIQQIFHTTYSEIAWISSIMLAVMYAGGPVSSVLVNKYGSRPVVIAGGLLCCLGMVLASFSSSVVQLYLTMGFITGLGLAFNLQPALTIIGKYFYRKRPMANGLAMAGSPVFLSSLAPFNQYLFNTFGWKGSFLILGSLLLNACVAGSLMRPLGPNQTTSKSKNKTGKTEDDSSPKKIKTKKSTWEKVNKYLDFSLFKHRGFLIYLSGNVIMFLGFFAPIIFLAPYAKDQGIDEYSAAFLLSVMAFVDMFARPSVGLIANSKYIRPRIQYFFSFAIMFNGVCHLLCPLAQDYTSLVLYAVFFGLGFGSVSSVLFETLMDLVGAPRFSSAVGLVTIVECGPVLLGPPLAGKLVDLTGEYKYMYMSCGAIVVAASVWLLIGNAINYRLLAKERKEENARQKTRESEPLSKSKHSEDVNVKVSNAQSVTSERETNI

SEQ ID NO: 64057 - protein, 379 aa, Homo sapiens
MVLASFSSSVVQLYLTMGFITGLGLAFNLQPALTIIGKYFYRKRPMANGLAMAGSPVFLSSLAPFNQYLFNTFGWKGSFLILGSLLLNACVAGSLMRPLGPNQTTSKSKNKTGKTEDDSSPKKIKTKKSTWEKVNKYLDFSLFKHRGFLIYLSGNVIMFLGFFAPIIFLAPYAKDQGIDEYSAAFLLSVMAFVDMFARPSVGLIANSKYIRPRIQYFFSFAIMFNGVCHLLCPLAQDYTSLVLYAVFFGLGFGSVSSVLFETLMDLVGAPRFSSAVGLVTIVECGPVLLGPPLAGKLVDLTGEYKYMYMSCGAIVVAASVWLLIGNAINYRLLAKERKEENARQKTRESEPLSKSKHSEDVNVKVSNAQSVTSERETNI

SEQ ID NO: 64058 - protein, 478 aa, Homo sapiens; identical to SEQ ID NO: 64056

SEQ ID NO: 64059 - protein, 478 aa, Homo sapiens; identical to SEQ ID NO: 64056

SEQ ID NO: 64060 - protein, 478 aa, Homo sapiens; identical to SEQ ID NO: 64056

SEQ ID NO: 64061 - protein, 509 aa, Homo sapiens
MELKKSPDGGWGWVIVFVSFLTQFLCYGSPLAVGVLYIEWLDAFGEGKGKTAWVGSLASGVGLLASPVCSLCVSSFGARPVTIFSGFMVAGGLMLSSFAPNIYFLFFSYGIVVGLGCGLLYTATVTITCQYFDDRRGLALGLISTGSSVGLFIYAALQRMLVEFYGLDGCLLIVGALALNILACGSLMRPLQSSDCPLPKKIAPEDLPDKYSIYNEKGKNLEENINILDKSYSSEEKCRITLANGDWKQDSLLHKNPTVTHTKEPETYKKKVAEQTYFCKQLAKRKWQLYKNYCGETVALFKNKVFSALFIAILLFDIGGFPPSLLMEDVARSSNVKEEEFIMPLISIIGIMTAVGKLLLGILADFKWINTLYLYVATLIIMGLALCAIPFAKSYVTLALLSGILGFLTGNWSIFPYVTTKTVGIEKLAHAYGILMFFAGLGNSLGPPIVGWFYDWTQTYDIAFYFSGFCVLLGGFILLLAALPSWDTCNKQLPKPAPTTFLYKVASNV

SEQ ID NO: 64062 - protein, 509 aa, Homo sapiens; identical to SEQ ID NO: 64061

SEQ ID NO: 64063 - protein, 65 aa, Homo sapiens
MELKKSPDGGWGWVIVFVSFLTQFLCYGSPLAVGVLYIEWLDAFGEGKGKTAWVGSLASGVGLLA

SEQ ID NO: 64064 - protein, 495 aa, Homo sapiens
MRSPVRDLARNDGEESTDRTPLLPGAPRAEAAPVCCSARYNLAILAFFGFFIVYALRVNLSVALVDMVDSNTTLEDNRTSKACPEHSAPIKVHHNQTGKKYQWDAETQGWILGSFFYGYIITQIPGGYVASKIGGKMLLGFGILGTAVLTLFTPIAADLGVGPLIVLRALEGLGEGVTFPAMHAMWSSWAPPLERSKLLSISYAGAQLGTVISLPLSGIICYYMNWTYVFYFFGTIGIFWFLLWIWLVSDTPQKHKRISHYEKEYILSSLRNQLSSQKSVPWVPILKSLPLWAIVVAHFSYNWTFYTLLTLLPTYMKEILRFNVQENGFLSSLPYLGSWLCMILSGQAADNLRAKWNFSTLCVRRIFSLIGMIGPAVFLVAAGFIGCDYSLAVAFLTISTTLGGFCSSGFSINHLDIAPSYAGILLGITNTFATIPGMVGPVIAKSLTPDNTVGEWQTVFYIAAAINVFGAIFFTLFAKGEVQNWALNDHHGHRH

SEQ ID NO: 64065 - protein, 181 aa, Homo sapiens
MRSPVRDLARNDGEESTDRTPLLPGAPRAEAAPVCCSARYNLAILAFFGFFIVYALRVNLSVALVDMVDSNTTLEDNRTSKACPEHSAPIKVHHNQTGKKYQWDAETQGWILGSFFYGYIITQIPGGYVASKIGGKMLLGFGILGTAVLTLFTPIAADLGVGPLIVLRALEGLGEEHSLGQ

SEQ ID NO: 64066 - protein, 467 aa, Homo sapiens
MQMDNRLPPKKVPGFCSFRYGLSFLVHCCNVIITAQRACLNLTMVVMVNSTDPHGLPNTSTKKLLDNIKNPMYNWSPDIQGIILSSTSYGVIIIQVPVGYFSGIYSTKKMIGFALCLSSVLSLLIPPAAGIGVAWVVVCRAVQGAAQGIVATAQFEIYVKWAPPLERGRLTSMSTSGFLLGPFIVLLVTGVICESLGWPMVFYIFGACGCAVCLLWFVLFYDDPKDHPCISISEKEYITSSLVQQVSSSRQSLPIKAILKSLPVWAISTGSFTFFWSHNIMTLYTPMFINSMLHVNIKENGFLSSLPYLFAWICGNLAGQLSDFFLTRNILSVIAVRKLFTAAGFLLPAIFGVCLPYLSSTFYSIVIFLILAGATGSFCLGGVFINGLDIAPRYFGFIKACSTLTGMIGGLIASTLTGLILKQDPESAWFKTFILMAAINVTGLIFYLIVATAEIQDWAKEKQHTRL

SEQ ID NO: 64067 - protein, 209 aa, Homo sapiens
MQMDNRLPPKKVPGFCSFRYGLSFLVHCCNVIITAQRACLNLTMVVMVNSTDPHGLPNTSTKKLLDNIKNPMYNWSPDIQGIILSSTSYGVIIIQVPVGYFSGIYSTKKMIGFALCLSSVLSLLIPPAAGIGVAWVVVCRAVQGAAQGIVATAQFEIYVKWAPPLERGRLTSMSTSGFLLGPFIVLLVTGVICESLGWPMVFYIFGQFK

SEQ ID NO: 64068 - protein, 413 aa, Homo sapiens
MQMDNRLPPKKVPGFCSFRYGLSFLVHCCNVIITAQRACLNLTMVVMVNSTDPHGLPNTSTKKLLDNIKNPMYNWSPDIQGIILSSTSYGVIIIQVPVGYFSGIYSTKKMIGFALCLSSVLSLLIPPAAGIGVAWVVVCRAVQGAAQGIVATAQFEIYVKWAPPLERGRLTSMSTSGFLLGPFIVLLVTGVICESLGWPMVFYIFGACGCAVCLLWFVLFYDDPKDHPCISISEKEYITSSLVQQNGFLSSLPYLFAWICGNLAGQLSDFFLTRNILSVIAVRKLFTAAGFLLPAIFGVCLPYLSSTFYSIVIFLILAGATGSFCLGGVFINGLDIAPRYFGFIKACSTLTGMIGGLIASTLTGLILKQDPESAWFKTFILMAAINVTGLIFYLIVATAEIQDWAKEKQHTRL

SEQ ID NO: 64069 - protein, 413 aa, Homo sapiens; identical to SEQ ID NO: 64068

SEQ ID NO: 64070 - protein, 467 aa, Homo sapiens; identical to SEQ ID NO: 64066

SEQ ID NO: 64071 - protein, 439 aa, Homo sapiens
MDGKPATRKGPDFCSLRYGLALIMHFSNFTMITQRVSLSIAIIAMVNTTQQQGLSNASTEGPVADAFNNSSISIKEFDTKASVYQWSPETQGIIFSSINYGIILTLIPSGYLAGIFGAKKMLGAGLLISSLLTLFTPLAADFGVILVIMVRTVQGMAQGMAWTGQFTIWAKWAPPLERSKLTTIAGSGSAFGSFIILCVGGLISQALSWPFIFYIFGSTGCVCCLLWFTVIYDDPMHHPCISVREKEHILSSLAQQPSSPGRAVPIKAMVTCLPLWAIFLGFFSHFWLCTIILTYLPTYISTLLHVNIRDSGVLSSLPFIAAASCTILGGQLADFLLSRNLLRLITVRKLFSSLGLLLPSICAVALPFVASSYVITIILLILIPGTSNLCDSGFIINTLDIAPRYASFLMGISRGFGLIAGIISSTATGFLISQVGPVY

SEQ ID NO: 64072 - protein, 436 aa, Homo sapiens
MDGKPATRKGPDFCSLRYGLALIMHFSNFTMITQRVSLSIAIIAMVNTTQQQGLSNASTEGPVADAFNNSSISIKEFDTKASVYQWSPETQGIIFSSINYGIILTLIPSGYLAGIFGAKKMLGAGLLISSLLTLFTPLAADFGVILVIMVRTVQGMAQGMAWTGQFTIWAKWAPPLERSKLTTIAGSGSAFGSFIILCVGGLISQALSWPFIFYIFGSTGCVCCLLWFTVIYDDPMHHPCISVREKEHILSSLAQQPSSPGRAVPIKAMVTCLPLWAIFLGFFSHFWLCTIILTYLPTYISTLLHVNIRDSGVLSSLPFIAAASCTILGGQLADFLLSRNLLRLITVRKLFSSLDMQVSSWESQGDLGSSQESSLPLPLDSSSVRILSLVGGMSFSCLLQSTCLAWSFTSRLDKQNFKTGPKRGPLPASEDIKLQT

SEQ ID NO: 64073 - protein, 478 aa, Homo sapiens
MDGKPATRKGPDFCSLRYGLALIMHFSNFTMITQRVSLSIAIIAMVNTTQQQGLSNASTEGPVADAFNNSSISIKEFDTKASVYQWSPETQGIIFSSINYGIILTLIPSGYLAGIFGAKKMLGAGLLISSLLTLFTPLAADFGVILVIMVRTVQGMAQGMAWTGQFTIWAKWAPPLERSKLTTIAGSGSAFGSFIILCVGGLISQALSWPFIFYIFGSTGCVCCLLWFTVIYDDPMHHPCISVREKEHILSSLAQQPSSPGRAVPIKAMVTCLPLWAIFLGFFSHFWLCTIILTYLPTYISTLLHVNIRDSGVLSSLPFIAAASCTILGGQLADFLLSRNLLRLITVRKLFSSLGLLLPSICAVALPFVASSYVITIILLILIPGTSNLCDSGFIINTLDIAPRYASFLMGISRGFGLIAGIISSTATGFLISQDFESGWRNVFFLSAAVNMFGLVFYLTFGQAELQDWAKERTLTRL

SEQ ID NO: 64074 - protein, 420 aa, Homo sapiens
MATKTELSPTARESKNAQDMQVDETLIPRKVPSLCSARYGIALVLHFCNFTTIAQNVIMNITMVAMVNSTSPQSQLNDSSEVLPVDSFGGLSKAPKSLPAKSSILGGQFAIWEKWGPPQERSRLCSIALSGMLLGCFTAILIGGFISETLGWPFVFYIFGGVGCVCCLLWFVVIYDDPVSYPWISTSEKEYIISSLKQQVGSSKQPLPIKAMLRSLPIWSICLGCFSHQWLVSTMVVYIPTYISSVYHVNIRDNGLLSALPFIVAWVIGMVGGYLADFLLTKKFRLITVRKIATILGSLPSSALIVSLPYLNSGYITATALLTLSCGLSTLCQSGIYINVLDIAPRYSSFLMGASRGFSSIAPVIVPTVSGFLLSQDPEFGWRNVFFLLFAVNLLGLLFYLIFGEADVQEWAKERKLTRL

SEQ ID NO: 64075 - protein, 420 aa, Homo sapiens; identical to SEQ ID NO: 64074

SEQ ID NO: 64076 - protein, 498 aa, Homo sapiens
MATKTELSPTARESKNAQDMQVDETLIPRKVPSLCSARYGIALVLHFCNFTTIAQNVIMNITMVAMVNSTSPQSQLNDSSEVLPVDSFGGLSKAPKSLPAKAPVYDWSPQIQGIIFGAVGYGGILTMAPSGYLAGRVGTKRVVGISLFATSFLTLCIPLATDFGIVLLIVTRIVQGLSQSSILGGQFAIWEKWGPPQERSRLCSIALSGMLLGCFTAILIGGFISETLGWPFVFYIFGGVGCVCCLLWFVVIYDDPVSYPWISTSEKEYIISSLKQQVGSSKQPLPIKAMLRSLPIWSICLGCFSHQWLVSTMVVYIPTYISSVYHVNIRDNGLLSALPFIVAWVIGMVGGYLADFLLTKKFRLITVRKIATILGSLPSSALIVSLPYLNSGYITATALLTLSCGLSTLCQSGIYINVLDIAPRYSSFLMGASRGFSSIAPVIVPTVSGFLLSQDPEFGWRNVFFLLFAVNLLGLLFYLIFGEADVQEWAKERKLTRL

SEQ ID NO: 64077 - protein, 99 aa, Homo sapiens
  VARIANT 1: note = MOD_RES - Any amino acid
XTLSCGLSTLCQSGIYINVLDIAPRYSSFLMGASRGFSSIAPVIVPTVSGFLLSQDPEFGWRNVFFLLFAVNLLGLLFYLIFGEADVQEWAKERKLTRL

SEQ ID NO: 64078 - protein, 51 aa, Homo sapiens
SGFLLSQDPEFGWRNVFFLLFAVNLLGLLFYLIFGEADVQEWAKERKLTRL

SEQ ID NO: 64079 - protein, 497 aa, Homo sapiens
MSTGPDVKATVGDISSDGNLNVAQEECSRKGFCSVRHGLALILQLCNFSIYTQQMNLSIAIPAMVNNTAPPSQPNASTERPSTDSQGYWNETLKEFKAMAPAYDWSPEIQGIILSSLNYGSFLAPIPSGYVAGIFGAKYVVGAGLFISSFLTLFIPLAANAGVALLIVLRIVQGIAQVMVLTGQYSIWVKWAPPLERSQLTTIAGSGSMLGSFIVLLAGGLLCQTIGWPYVFYIFGGIGCACCPLWFPLIYDDPVNHPFISAGEKRYIVCSLAQQDCSPGWSLPIRAMIKSLPLWAILVSYFCEYWLFYTIMAYTPTYISSVLQANLRDSGILSALPFVVGCICIILGGLLADFLLSRKILRLITIRKLFTAIGVLFPSVILVSLPWVRSSHSMTMTFLVLSSAISSFCESGALVNFLDIAPRYTGFLKGLLQVFAHIAGAISPTAAGFFISQDSEFGWRNVFLLSAAVNISGLVFYLIFGRADVQDWAKEQTFTHL

SEQ ID NO: 64080 - protein, 221 aa, Homo sapiens
MNLSIAIPAMVNNTAPPSQPNASTERPSTDSQGYWNETLKEFKAMDCSPGWSLPIRAMIKSLPLWAILVSYFCEYWLFYTIMAYTPTYISSVLQANLRDSGILSALPFVVGCICIILGGLLADFLLSRKILRLITIRKLFTAIGKGETGHRGERGKLRAAFSLLCVCPPTPGVLFPSVILVSLPWVRSSHSMTMTFLVLSSAISSFCESGALVNFLDIAPR

SEQ ID NO: 64081 - protein, 267 aa, Homo sapiens
MSTGPDVKATVGDISSDGNLNVAQEECSRKGFCSVRHGLALILQLCNFSIYTQQMNLSIAIPAMVNNTAPPSQPNASTERPSTDSQGYWNETLKEFKAMSGILSALPFVVGCICIILGGLLADFLLSRKILRLITIRKLFTAIGVLFPSVILVSLPWVRSSHSMTMTFLVLSSAISSFCESGALVNFLDIAPRYTGFLKGLLQVFAHIAGAISPTAAGFFISQDSEFGWRNVFLLSAAVNISGLVFYLIFGRADVQDWAKEQTFTHL

SEQ ID NO: 64082 - protein, 582 aa, Homo sapiens
MESVKQRILAPGKEGLKNFAGKSLGQIYRVLEKKQDTGETIELTEDGKPLEVPERKAPLCDCTCFGLPRRYIIAIMSGLGFCISFGIRCNLGVAIVDMVNNSTIHRGGKVIKEKAKFNWDPETVGMIHGSFFWGYIITQIPGGYIASRLAANRVFGAAILLTSTLNMLIPSAARVHYGCVIFVRILQGLVEGVTYPACHGIWSKWAPPLERSRLATTSFCGSYAGAVIAMPLAGILVQYTGWSSVFYVYGSFGMVWYMFWLLVSYESPAKHPTITDEERRYIEESIGESANLLGAMEKFKTPWRKFFTSMPVYAIIVANFCRSWTFYLLLISQPAYFEEVFGFEISKVGMLSAVPHLVMTIIVPIGGQIADFLRSKQILSTTTVRKIMNCGGFGMEATLLLVVGYSHTRGVAISFLVLAVGFSGFAISGFNVNHLDIAPRYASILMGISNGVGTLSGMVCPIIVGAMTKNKSREEWQYVFLIAALVHYGGVIFYAIFASGEKQPWADPEETSEEKCGFIHEDELDEETGDITQNYINYGTTKSYGATTQANGGWPSGWEKKEEFVQGEVQDSHSYKDRVDYS

SEQ ID NO: 64083 - protein, 470 aa, Homo sapiens [sequence omitted]

SEQ ID NO: 64084 - protein, 560 aa, Homo sapiens
MEFRQEEFRKLAGRALGKLHRLLEKRQEGAETLELSADGRPVTTQTRDPPVVDCTCFGLPRRYIIAIMSGLGFCISFGIRCNLGVAIVSMVNNSTTHRGGHVVVQKAQFSWDPETVGLIHGSFFWGYIVTQIPGGFICQKFAANRVFGFAIVATSTLNMLIPSAARVHYGCVIFVRILQGLVEGVTYPACHGIWSKWAPPLERSRLATTAFCGSYAGAVVAMPLAGVLVQYSGWSSVFYVYGSFGIFWYLFWLLVSYESPALHPSISEEERKYIEDAIGESAKLMNPLTKFSTPWRRFFTSMPVYAIIVANFCRSWTFYLLLISQPAYFEEVFGFEISKVGLVSALPHLVMTIIVPIGGQIADFLRSRRIMSTTNVRKLMNCGGFGMEATLLLVVGYSHSKGVAISFLVLAVGFSGFAISGFNVNHLDIAPRYASILMGISNGVGTLSGMVCPIIVGAMTKHKTREEWQYVFLIASLVHYGGVIFYGVFASGEKQPWAEPEEMSEEKCGFVGHDQLAGSDDSEMEDEAEPPGAPPAPPPSYGATHSTFQPPRPPPPVRDY

SEQ ID NO: 64085 - protein, 548 aa, Homo sapiens
MGSQLALAGLLEKRQEGAETLELSADGRPVTTQTRDPPVVDCTCFGLPRRYIIAIMSGLGFCISFGIRCNLGVAIVSMVNNSTTHRGGHVVVQKAQFSWDPETVGLIHGSFFWGYIVTQIPGGFICQKFAANRVFGFAIVATSTLNMLIPSAARVHYGCVIFVRILQGLVEGVTYPACHGIWSKWAPPLERSRLATTAFCGSYAGAVVAMPLAGVLVQYSGWSSVFYVYGSFGIFWYLFWLLVSYESPALHPSISEEERKYIEDAIGESAKLMNPLTKFSTPWRRFFTSMPVYAIIVANFCRSWTFYLLLISQPAYFEEVFGFEISKVGLVSALPHLVMTIIVPIGGQIADFLRSRRIMSTTNVRKLMNCGGFGMEATLLLVVGYSHSKGVAISFLVLAVGFSGFAISGFNVNHLDIAPRYASILMGISNGVGTLSGMVCPIIVGAMTKHKTREEWQYVFLIASLVHYGGVIFYGVFASGEKQPWAEPEEMSEEKCGFVGHDQLAGSDDSEMEDEAEPPGAPPAPPPSYGATHSTFQPPRPPPPVRDY

SEQ ID NO: 64086 - protein, 589 aa, Homo sapiens
MPFKAFDTFKEKILKPGKEGVKNAVGDSLGILQRKIDGTTEEEDNIELNEEGRPVQTSRPSPPLCDCHCCGLPKRYIIAIMSGLGFCISFGIRCNLGVAIVEMVNNSTVYVDGKPEIQTAQFNWDPETVGLIHGSFFWGYIMTQIPGGFISNKFAANRVFGAAIFLTSTLNMFIPSAARVHYGCVMCVRILQGLVEGVTYPACHGMWSKWAPPLERSRLATTSFCGSYAGAVVAMPLAGVLVQYIGWSSVFYIYGMFGIIWYMFWLLQAYECPAAHPTISNEEKTYIETSIGEGANVVSLSKFSTPWKRFFTSLPVYAIIVANFCRSWTFYLLLISQPAYFEEVFGFAISKVGLLSAVPHMVMTIVVPIGGQLADYLRSRQILTTTAVRKIMNCGGFGMEATLLLVVGFSHTKGVAISFLVLAVGFSGFAISGFNVNHLDIAPRYASILMGISNGVGTLSGMVCPLIVGAMTRHKTREEWQNVFLIAALVHYSGVIFYGVFASGEKQEWADPENLSEEKCGIIDQDELAEEIELNHESFASPKKKMSYGATSQNCEVQKKEWKGQRGATLDEEELTSYQNEERNFSTIS

SEQ ID NO: 64087 - protein, 539 aa, Homo sapiens
MPFKAFDTFKEKILKPGKEGVKNAVGDSLGILQRKIDGTTEEEDNIELNEEGRPVQTSRPSPPLCDCHCCGLPKRYIIAIMSGLGFCISFGIRCNLGVAIVEMVNNSTVYVDGKPEIQTAQFNWDPETVGLIHGSFFWGYIMTQIPGGFISNKFAANRVFGAAIFLTSTLNMFIPSAARVHYGCVMCVRILQGLVEGVTYPACHGMWSKWAPPLERSRLATTSFCGSYAGAVVAMPLAGVLVQYIGWSSVFYIYGMFGIIWYMFWLLQAYECPAAHPTISNEEKTYIETSIGEGANVVSLSVGLLSAVPHMVMTIVVPIGGQLADYLRSRQILTTTAVRKIMNCGGFGMEATLLLVVGFSHTKGVAISFLVLAVGFSGFAISGFNVNHLDIAPRYASILMGISNGVGTLSGMVCPLIVGAMTRHKTREEWQNVFLIAALVHYSGVIFYGVFASGEKQEWADPENLSEEKCGIIDQDELAEEIELNHESFASPKKKMSYGATSQNCEVQKKEWKGQRGATLDEEELTSYQNEERNFSTIS

SEQ ID NO: 64088 - protein, 430 aa, Homo sapiens
MTLTSRRQDSQEARPECQAWTGTLLLGTCLLYCARSSMPICTVSMSQDFGWNKKEAGIVLSSFFWGYCLTQVVGGHLGDRIGGEKVILLSASAWGSITAVTPLLAHLSSAHLAFMTFSRILMGLLQGVYFPALTSLLSQKVRESERAFTYSIVGAGSQFGTLLTGAVGSLLLEWYGWQSIFYFSGGLTLLWVWYVYRYLLSEKDLILALGVLAQSRPVSRHNRVPWRRLFRKPAVWAAVVSQLSAACSFFILLSWLPTFFEETFPDAKGWIFNVVPWLVAIPASLFSGFLSDHLINQGYRAITVRKLMQGMGLGLSSVFALCLGHTSSFCESVVFASASIGLQTFNHSGISVNIQDLAPSCAGFLFGVANTAGALAGVVGVCLGGYLMETTGSWTCLFNLVAIISNLGLCTFLVFGQAQRVDLSSTHEDL

SEQ ID NO: 64089 - protein, 436 aa, Homo sapiens
MQPPPDEARRDMAGDTQWSRPECQAWTGTLLLGTCLLYCARSSMPICTVSMSQDFGWNKKEAGIVLSSFFWGYCLTQVVGGHLGDRIGGEKVILLSASAWGSITAVTPLLAHLSSAHLAFMTFSRILMGLLQGVYFPALTSLLSQKVRESERAFTYSIVGAGSQFGTLLTGAVGSLLLEWYGWQSIFYFSGGLTLLWVWYVYRYLLSEKDLILALGVLAQSRPVSRHNRVPWRRLFRKPAVWAAVVSQLSAACSFFILLSWLPTFFEETFPDAKGWIFNVVPWLVAIPASLFSGFLSDHLINQGYRAITVRKLMQGMGLGLSSVFALCLGHTSSFCESVVFASASIGLQTFNHSGISVNIQDLAPSCAGFLFGVANTAGALAGVVGVCLGGYLMETTGSWTCLFNLVAIISNLGLCTFLVFGQAQRVDLSSTHEDL

SEQ ID NO: 64090 - protein, 152 aa, Homo sapiens
MFPRPGALSWTVRRHTPRQVEPPCVCMTLTSRRQDSQEARPECQAWTGTLLLGTCLLYCARSSMPICTVSMSQDFGWNKKEAGIVLSSFFWGYCLTQVVGGHLGDRIGGEKVILLSASAWGSITAVTPLLAHLSSAHLAFMTFSRILMGLLQ

SEQ ID NO: 64091 - protein, 532 aa, Homo sapiens
MESAEPAGQARAAATKLSEAVGAALQEPRRQRRLVLVIVCVALLLDNMLYMVIVPIVPDYIAHMRGGGEGPTRTPEVWEPTLPLPTPANASAYTANTSASPTAAWPAGSALRPRYPTESEDVKIGVLFASKAILQLLVNPLSGPFIDRMSYDVPLLIGLGVMFASTVLFAFAEDYATLFAARSLQGLGSAFADTSGIAMIADKYPEEPERSRALGVALAFISFGSLVAPPFGGILYEFAGKRVPFLVLAAVSLFDALLLLAVAKPFSAAARARANLPVGTPIHRLMLDPYIAVVAGALTTCNIPLAFLEPTIATWMKHTMAASEWEMGMAWLPAFVPHVLGVYLTVRLAARYPHLQWLYGALGLAVIGASSCIVPACRSFAPLVVSLCGLCFGIALVDTALLPTLAFLVDVRHVSVYGSVYAIADISYSVAYALGPIVAGHIVHSLGFEQLSLGMGLANLLYAPVLLLLRNVGLLTRSRSERDVLLDEPPQGLYDAVRLRERPVSGQDGEPRSPPGPFDACEDDYNYYYTRS

SEQ ID NO: 64092 - protein, 493 aa, Homo sapiens
MLRTILDAPQRLLKEGRASRQLVLVVVFVALLLDNMLFTVVVPIVPTFLYDMEFKEVNSSLHLGHAGSSPHALASPAFSTIFSFFNNNTVAVEESVPSGIAWMNDTASTIPPPATEAISAHKNNCLQGTGFLEEEITRVGVLFASKAVMQLLVNPFVGPLTNRIGYHIPMFAGFVIMFLSTVMFAFSGTYTLLFVARTLQGIGSSFSSVAGLGMLASVYTDDHERGRAMGTALGGLALGLLVGAPFGSVMYEFVGKSAPFLILAFLALLDGALQLCILQPSKVSPESAKGTPLFMLLKDPYILVAAGLAFLPASVSYLIGTNLFGVLANKMGRWLCSLIGMLVVGTSLLCVPLAHNIFGLIGPNAGLGLAIGMVDSSMMPIMGHLVDLRHTSVYGSVYAIADVAFCMGFAIGPSTGGAIVKAIGFPWLMVITGVINIVYAPLCYYLRSPPAKEEKLAILSQDCPMETRMYATQKPTKEFPLGEDSDEEPDHEE

SEQ ID NO: 64093 - protein, 525 aa, Homo sapiens
MLRTILDAPQRLLKEGRASRQLVLVVVFVALLLDNMLFTVVVPIVPTFLYDMEFKEVNSSLHLGHAGSSPHALASPAFSTIFSFFNNNTVAVEESVPSGIAWMNDTASTIPPPATEAISAHKNNCLQGTGFLEEEITRVGVLFASKAVMQLLVNPFVGPLTNRIGYHIPMFAGFVIMFLSTVMFAFSGTYTLLFVARTLQGIGSSFSSVAGLGMLASVYTDDHERGRAMGTALGGLALGLLVGAPFGSVMYEFVGKSAPFLILAFLALLDGALQLCILQPSKVSPESAKGTPLFMLLKDPYILVAAGSICFANMGVAILEPTLPIWMMQTMCSPKWQLGLAFLPASVSYLIGTNLFGVLANKMGRWLCSLIGMLVVGTSLLCVPLAHNIFGLIGPNAGLGLAIGMVDSSMMPIMGHLVDLRHTSVYGSVYAIADVAFCMGFAIGPSTGGAIVKAIGFPWLMVITGVINIVYAPLCYYLRSPPAKEEKLAILSQDCPMETRMYATQKPTKEFPLGEDSDEEPDHEE

SEQ ID NO: 64094 - protein, 472 aa, Homo sapiens
MLRTILDAPQRLLKEGRASRQLVLVVVFVALLLDNMLFTVVVPIVPTFLYDMEFKEVNSSLHLGHAGSSPHALASPAFSTIFSFFNNNTVAVEESVPSGIAWMNDTASTIPPPATEAISAHKNNCLQGTGFLEEEITRVGVLFASKAVMQLLVNPFVGPLTNRIGYHIPMFAGFVIMFLSTVMFAFSGTYTLLFVARTLQGIGSSFSSVAGLGMLASVYTDDHERGRAMGTALGGLALGLLVGAPFGSVMYEFVGKSAPFLILAFLALLDGALQLCILQPSKVSPESAKGTPLFMLLKDPYILVAAGSICFANMGVAILEPTLPIWMMQTMCSPKWQLGLAFLPASVSYLIGTNLFGVLANKMGRWLCSLIGMLVVGTSLLCVPLAHNIFGLIGPNAGLGLAIGMVDSSMMPIMGHLVDLRHTSVYGSVYAIADVAFCMGFAIGYSESGLPHGDPDVCNPEAHEGISSGGGQ

SEQ ID NO: 64095 - protein, 525 aa, Homo sapiens; identical to SEQ ID NO: 64093

SEQ ID NO: 64096 - protein, 385 aa, Homo sapiens
MLRTILDAPQRLLKEGRASRQLVLVVVFVALLLDNMLFTVVVPIVPTFLYDMEFKEVNSSLHLGHAGSSPHALASPAFSTIFSFFNNNTVAVEESVPSGIAWMNDTASTIPPPATEAISAHKNNCLQGTGFLEEEITRVGVLFASKAVMQLLVNPFVGPLTNRIGYHIPMFAGFVIMFLSTVMFAFSGTYTLLFVARTLQGIGSSFSSVAGLGMLASVYTDDHERGRAMGTALGGLALGLLVGAPFGSVMYEFVGKSAPFLILAFLALLDGALQLCILQPSKVSPESAKGTPLFMLLKDPYILVAAGSICFANMGVAILEPTLPIWMMQTMCSPKWQLGLAFLPASVSYLIGTNLFGVLANKMGRWLCSLIGMLVVGTSLLCLPS

SEQ ID NO: 64097 - protein, 493 aa, Homo sapiens; identical to SEQ ID NO: 64092

SEQ ID NO: 64098 - protein, 514 aa, Homo sapiens
MALSELALVRWLQESRRSRKLILFIVFLALLLDNMLLTVVVPIIPSYLYSIKHEKNATEIQTARPVHTASISDSFQSIFSYYDNSTMVTGNATRDLTLHQTATQHMVTNASAVPSDCPSEDKDLLNENVQVGLLFASKATVQLITNPFIGLLTNRIGYPIPIFAGFCIMFVSTIMFAFSSSYAFLLIARSLQGIGSSCSSVAGMGMLASVYTDDEERGNVMGIALGGLAMGVLVGPPFGSVLYEFVGKTAPFLVLAALVLLDGAIQLFVLQPSRVQPESQKGTPLTTLLKDPYILIAAGSICFANMGIAMLEPALPIWMMETMCSRKWQLGVAFLPASISYLIGTNIFGILAHKMGRWLCALLGMIIVGVSILCIPFAKNIYGLIAPNFGVGFAIGMVDSSMMPIMGYLVDLRHVSVYGSVYAIADVAFCMGYAIGPSAGGAIAKAIGFPWLMTIIGIIDILFAPLCFFLRSPPAKEEKMAILMDHNCPIKTKMYTQNNIQSYPIGEDEESESD

SEQ ID NO: 64099 - protein, 497 aa, Homo sapiens
MDVPGPVSRRAAAAAATVLLRTARVRRECWFLPTALLCAYGFFASLRPSEPFLTPYLLGPDKNLTEREVFNEIYPVWTYSYLVLLFPVFLATDYLRYKPVVLLQGLSLIVTWFMLLYAQGLLAIQFLEFFYGIATATEIAYYSYIYSVVDLGMYQKVTSYCRSATLVGFTVGSVLGQILVSVAGWSLFSLNVISLTCVSVAFAVAWFLPMPQKSLFFHHIPSTCQRVNGIKVQNGGIVTDTPASNHLPGWEDIESKIPLNMEEPPVEEPEPKPDRLLVLKVLWNDFLMCYSSRPLLCWSVWWALSTCGYFQVVNYTQGLWEKVMPSRYAAIYNGGVEAVSTLLGAVAVFAVGYIKISWSTWGEMTLSLFSLLIAAAVYIMDTVGNIWVCYASYVVFRIIYMLLITIATFQIAANLSMERYALVFGVNTFIALALQTLLTLIVVDASGLGLEITTQFLIYASYFALIAVVFLASGAVSVMKKCRKLEDPQSSSQVTTS

SEQ ID NO: 64100 - protein, 459 aa, Homo sapiens
MDVPGPVSRRAAAAAATVLLRTARVRRECWFLPTALLCAYGFFASLRPSEPFLTPYLLGPDKNLTEREVFNEIYPVWTYSYLVLLFPVFLATDYLRYKPVVLLQGLSLIVTWFMLLYAQGLLAIQFLEFFYGIATATEIAYYSYIYSVVDLGMYQKVTSYCRSATLVGFTVGSVLGQILVSVAGWSLFSLNVISLTCVSVAFAVAWFLPMPQKSLFFHHIPSTCQRVNGIKEPKPDRLLVLKVLWNDFLMCYSSRPLLCWSVWWALSTCGYFQVVNYTQGLWEKVMPSRYAAIYNGGVEAVSTLLGAVAVFAVGYIKISWSTWGEMTLSLFSLLIAAAVYIMDTVGNIWVCYASYVVFRIIYMLLITIATFQIAANLSMERYALVFGVNTFIALALQTLLTLIVVDASGLGLEITTQFLIYASYFALIAVVFLASGAVSVMKKCRKLEDPQSSSQVTTS

SEQ ID NO: 64101 - protein, 296 aa, Homo sapiens
MDVPGPVSRRAAAAAATVLLRTARVRRECWFLPTALLCAYGFFASLRPSEPFLTPYLLGPDKNLTEREEPKPDRLLVLKVLWNDFLMCYSSRPLLCWSVWWALSTCGYFQVVNYTQGLWEKVMPSRYAAIYNGGVEAVSTLLGAVAVFAVGYIKISWSTWGEMTLSLFSLLIAAAVYIMDTVGNIWVCYASYVVFRIIYMLLITIATFQIAANLSMERYALVFGVNTFIALALQTLLTLIVVDASGLGLEITTQFLIYASYFALIAVVFLASGAVSVMKKCRKLEDPQSSSQVTTS

SEQ ID NO: 64102 - protein, 496 aa, Homo sapiens
MDCYRTSLSSSWIYPTVILCLFGFFSMMRPSEPFLIPYLSGPDKNLTSAEITNEIFPVWTYSYLVLLLPVFVLTDYVRYKPVIILQGISFIITWLLLLFGQGVKTMQVVEFFYGMVTAAEVAYYAYIYSVVSPEHYQRVSGYCRSVTLAAYTAGSVLAQLLVSLANMSYFYLNVISLASVSVAFLFSLFLPMPKKSMFFHAKPSREIKKSSSVNPVLEETHEGEAPGCEEQKPTSEILSTSGKLNKGQLNSLKPSNVTVDVFVQWFQDLKECYSSKRLFYWSLWWAFATAGFNQVLNYVQILWDYKAPSQDSSIYNGAVEAIATFGGAVAAFAVGYVKVNWDLLGELALVVFSVVNAGSLFLMHYTANIWACYAGYLIFKSSYMLLITIAVFQIAVNLNVERYALVFGINTFIALVIQTIMTVIVVDQRGLNLPVSIQFLVYGSYFAVIAGIFLMRSMYITYSTKSQKDVQSPAPSENPDVSHPEEESNIIMSTKL

SEQ ID NO: 64103 - protein, 54 aa, Homo sapiens
MDCYRTSLSSSWIYPTVILCLFGFFSMMRPSEPFLIPYLSGPDKNLTSAEITNE

SEQ ID NO: 64104 - protein, 64 aa, Homo sapiens
MDCYRTSLSSSWIYPTVILCLFGFFSMMRPSEPFLIPYLSGPDKNLTSAEITNEIFPVWTYSYL

SEQ ID NO: 64105 - protein, 496 aa, Homo sapiens; identical to SEQ ID NO: 64102

SEQ ID NO: 64106 - protein, 132 aa, Homo sapiens
MDCYRTSLSSSWIYPTVILCLFGFFSMMRPSEPFLIPYLSGPDKNLTSAEITNEIFPVWTYSYLVLLLPVFVLTDYVRYKPVIILQGISFIITWLLLLFGQGVKTMQVVEFFYGMVTAAEVAYYAYIYSVVS

SEQ ID NO: 64107 - protein, 492 aa, Homo sapiens
MNPLGSASRATVDQLTDLPSKEQLSCVVFALWPPAFSSNLSDPGVKITNEIFPVWTYSYLVLLLPVFVLTDYVRYKPVIILQGISFIITWLLLLFGQGVKTMQVVEFFYGMVTAAEVAYYAYIYSVVSPEHYQRVSGYCRSVTLAAYTAGSVLAQLLVSLANMSYFYLNVISLASVSVAFLFSLFLPMPKKSMFFHAKPSREIKKSSSVNPVLEETHEGEAPGCEEQKPTSEILSTSGKLNKGQLNSLKPSNVTVDVFVQWFQDLKECYSSKRLFYWSLWWAFATAGFNQVLNYVQILWDYKAPSQDSSIYNGAVEAIATFGGAVAAFAVGYVKVNWDLLGELALVVFSVVNAGSLFLMHYTANIWACYAGYLIFKSSYMLLITIAVFQIAVNLNVERYALVFGINTFIALVIQTIMTVIVVDQRGLNLPVSIQFLVYGSYFAVIAGIFLMRSMYITYSTKSQKDVQSPAPSENPDVSHPEEESNIIMSTKL

SEQ ID NO: 64108 - protein, 541 aa, Homo sapiens
MGHSPPVLPLCASVSLLGGLTFGYELAVISGALLPLQLDFGLSCLEQEFLVGSLLLGALLASLVGGFLIDCYGRKQAILGSNLVLLAGSLTLGLAGSLAWLVLGRAVVGFAISLSSMACCIYVSELVGPRQRGVLVSLYEAGITVGILLSYALNYALAGTPWGWRHMFGWATAPAVLQSLSLLFLPAGTDETATHKDLIPLQGGEAPKLGPGRPRYSFLDLFRARDNMRGRTTVGLGLVLFQQLTGQPNVLCYASTIFSSVGFHGGSSAVLASVGLGAVKVAATLTAMGLVDRAGRRALLLAGCALMALSVSGIGLVSFAVPMDSGPSCLAVPNATGQTGLPGDSGLLQDSSLPPIPRTNEDQREPILSTAKKTKPHPRSGDPSAPPRLALSSALPGPPLPARGHALLRWTALLCLMVFVSAFSFGFGPVTWLVLSEIYPVEIRGRAFAFCNSFNWAANLFISLSFLDLIGTIGLSWTFLLYGLTAVLGLGFIYLFVPETKGQSLAEIDQQFQKRRFTLSFGHRQNSTGIPYSRIEISAAS

SEQ ID NO: 64109 - protein, 648 aa, Homo sapiens
MSRKASENVEYTLRSLSSLMGERRRKQPEPDAASAAGECSLLAAAESSTSLQSAGAGGGGVGDLERAARRQFQQDETPAFVYVVAVFSALGGFLFGYDTGVVSGAMLLLKRQLSLDALWQELLVSSTVGAAAVSALAGGALNGVFGRRAAILLASALFTAGSAVLAAANNKETLLAGRLVVGLGIGIASMTVPVYIAEVSPPNLRGRLVTINTLFITGGQFFASVVDGAFSYLQKDGWRYMLGLAAVPAVIQFFGFLFLPESPRWLIQKGQTQKARRILSQMRGNQTIDEEYDSIKNNIEEEEKEVGSAGPVICRMLSYPPTRRALIVGCGLQMFQQLSGINTIMYYSATILQMSGVEDDRLAIWLASVTAFTNFIFTLVGVWLVEKVGRRKLTFGSLAGTTVALIILALGFVLSAQVSPRITFKPIAPSGQNATCTRYSYCNECMLDPDCGFCYKMNKSTVIDSSCVPVNKASTNEAAWGRCENETKFKTEDIFWAYNFCPTPYSWTALLGLILYLVFFAPGMGPMPWTVNSEIYPLWARSTGNACSSGINWIFNVLVSLTFLHTAEYLTYYGAFFLYAGFAAVGLLFIYGCLPETKGKKLEEIESLFDNRLCTCGTSDSDEGRYIEYIRVKGSNYHLSDNDASDVE

SEQ ID NO: 64110 - protein, 357 aa, Homo sapiens
MSRKASENVEYTLRSLSSLMGERRRKQPEPDAASAAGECSLLAAAESSTSLQSAGAGGGGVGDLERAARRQFQQDETPAFVYVVAVFSALGGFLFGYDTGVVSGAMLLLKRQLSLDALWQELLVSSTVGAAAVSALAGGALNGVFGRRAAILLASALFTAGSAVLAAANNKETLLAGRLVVGLGIGIASMTVPVYIAEVSPPNLRGRLVTINTLFITGGQFFASVVDGAFSYLQKDGWRYMLGLAAVPAVIQFFGFLFLPESPRWLIQKGQTQKARRILSQMRGNQTIDEEYDSIKNNIEEEEKEVGSAGPVICRMLSYPPTRRALIVGCGLQMFQQLSGINTIMYVFLSGFLLKRL

SEQ ID NO: 64111 - protein, 497 aa, Homo sapiens
MDNRQNVTPALIFAITVATIGSFQFGYNTGVINAPETIIKEFINKTLTDKANAPPSEVLLTNLWSLSVAIFSVGGMIGSFSVGLFVNRFGRRNSMLIVNLLAATGGCLMGLCKIAESVEMLILGRLVIGLFCGLCTGFVPMYIGEISPTALRGAFGTLNQLGIVIGILVAQIFGLELILGSEELWPVLLGFTILPAILQSAALPCCPESPRFLLINRKKEENATRILQRLWGTQDVSQDIQEMKDESARMSQEKQVTVLELFRVSSYRQPIIISIVLQLSQQLSGINAVFYYSTGIFKDAGVQQPIYATISAGVVNTIFTLLSLFLVERAGRRTLHMIGLGGMAFCSTLMTVSLLLKNHYNGMSFVCIGAILVFVACFEIGPGPIPWFIVAELFSQGPRPAAMAVAGCSNWTSNFLVGLLFPSAAYYLGAYVFIIFTGFLITFLAFTFFKVPETRGRTFEDITRAFEGQAHGADRSGKDGVMGMNSIEPAKETTTNV

SEQ ID NO: 64112 - protein, 520 aa, Homo sapiens
MEFHNGGHVSGIGGFLVSLTSRMKPHTLAVTPALIFAITVATIGSFQFGYNTGVINAPETIIKEFINKTLTDKANAPPSEVLLTNLWSLSVAIFSVGGMIGSFSVGLFVNRFGRRNSMLIVNLLAATGGCLMGLCKIAESVEMLILGRLVIGLFCGLCTGFVPMYIGEISPTALRGAFGTLNQLGIVIGILVAQIFGLELILGSEELWPVLLGFTILPAILQSAALPCCPESPRFLLINRKKEENATRILQRLWGTQDVSQDIQEMKDESARMSQEKQVTVLELFRVSSYRQPIIISIVLQLSQQLSGINAVFYYSTGIFKDAGVQQPIYATISAGVVNTIFTLLSLFLVERAGRRTLHMIGLGGMAFCSTLMTVSLLLKNHYNGMSFVCIGAILVFVACFEIGPGPIPWFIVAELFSQGPRPAAMAVAGCSNWTSNFLVGLLFPSAAYYLGAYVFIIFTGFLITFLAFTFFKVPETRGRTFEDITRAFEGQAHGADRSGKDGVMGMNSIEPAKETTTNV

SEQ ID NO: 64113 - protein, 497 aa, Homo sapiens; identical to SEQ ID NO: 64111

SEQ ID NO: 64114 - protein, 120 aa, Homo sapiens
MEFHNGGHVSGIGGFLVSLTSRMKPHTLAVTPALIFAITVATIGSFQFGYNTGVINAPETIIKEFINKTLTDKANAPPSEVLLTNLWSLSVAIFSVGGMIGSFSVGLFVNRFGRRNSMLI

SEQ ID NO: 64115 - protein, 411 aa, Homo sapiens
MLLRRRNSMLIVNLLAATGGCLMGLCKIAESVEMLILGRLVIGLFCGLCTGFVPMYIGEISPTALRGAFGTLNQLGIVIGILVAQIFGLELILGSEELWPVLLGFTILPAILQSAALPCCPESPRFLLINRKKEENATRILQRLWGTQDVSQDIQEMKDESARMSQEKQVTVLELFRVSSYRQPIIISIVLQLSQQLSGINAVFYYSTGIFKDAGVQQPIYATISAGVVNTIFTLLSLFLVERAGRRTLHMIGLGGMAFCSTLMTVSLLLKNHYNGMSFVCIGAILVFVACFEIGPGPIPWFIVAELFSQGPRPAAMAVAGCSNWTSNFLVGLLFPSAAYYLGAYVFIIFTGFLITFLAFTFFKVPETRGRTFEDITRAFEGQAHGADRSGKDGVMGMNSIEPAKETTTNV

SEQ ID NO: 64116 - protein, 141 aa, Homo sapiens
MDNRQNVTPALIFAITVATIGSFQFGYNTGVINAPETIIKEFINKTLTDKANAPPSEVLLTNLWSLSVAIFSVGGMIGSFSVGLFVNRFGRRNSMLIVNLLAATGGCLMGLCKIAESVEMLILGRLVIGLFCGLCTGFVPM

SEQ ID NO: 64117 - protein, 47 aa, Homo sapiens
MDNRQNVTPALIFAITVATIGSFQFGYNTGVINAPETIIKEFINKTL

SEQ ID NO: 64118 - protein, 22 aa, Homo sapiens
MDNRQNVTPALIFAITVATIGS

SEQ ID NO: 64119 - protein, 141 aa, Homo sapiens
MEFHNGGHVSGIGGFLVSLTSRMKPHTLAVTPALIFAITVATIGSFQFGYNTGVINAPETIIKEFINKTLTDKANAPPSEVLLTNLWSLSVAIFSVGGMIGSFSVGLFVNRFGRRNSMLIVNLLAATGGCLMGLCKIAESV

SEQ ID NO: 64120 - protein, 535 aa, Homo sapiens
MQRLQLLRVEVLLGVKQGDEMRHFFFSSQTSTLEKSQNGGVGEEVTPALIFAITVATIGSFQFGYNTGVINAPETIIKEFINKTLTDKANAPPSEVLLTNLWSLSVAIFSVGGMIGSFSVGLFVNRFGRRNSMLIVNLLAATGGCLMGLCKIAESVEMLILGRLVIGLFCGLCTGFVPMYIGEISPTALRGAFGTLNQLGIVIGILVAQIFGLELILGSEELWPVLLGFTILPAILQSAALPCCPESPRFLLINRKKEENATRILQRLWGTQDVSQDIQEMKDESARMSQEKQVTVLELFRVSSYRQPIIISIVLQLSQQLSGINAVFYYSTGIFKDAGVQQPIYATISAGVVNTIFTLLSLFLVERAGRRTLHMIGLGGMAFCSTLMTVSLLLKNHYNGMSFVCIGAILVFVACFEIGPGPIPWFIVAELFSQGPRPAAMAVAGCSNWTSNFLVGLLFPSAAYYLGAYVFIIFTGFLITFLAFTFFKVPETRGRTFEDITRAFEGQAHGADRSGKDGVMGMNSIEPAKETTTNV

SEQ ID NO: 64121 - protein, 161 aa, Homo sapiens
MIGLGGMAFCSTLMTVSLLLKNHYNGMSFVCIGAILVFVACFEIGPGPIPWFIVAELFSQGPRPAAMAVAGCSNWTSNFLVGLLFPSAAYYLGAYVFIIFTGFLITFLAFTFFKVPETRGRTFEDITRAFEGQAHGADRSGKDGVMGMNSIEPAKETTTNV

SEQ ID NO: 64122 - protein, 411 aa, Homo sapiens; identical to SEQ ID NO: 64115

SEQ ID NO: 64123 - protein, 152 aa, Homo sapiens
MDNRQNVTPALIFAITVATIGSFQFGYNTGVINAPETIIKEFINKTLTDKANAPPSEVLLTNLWSLSVAIFSVGGMIGSFSVGLFVNRFGRRNSMLIVNLLAATGGCLMGLCKIAESVEMLILGRLVIGLFCGLCTGFVPMYIGEISPTALR

SEQ ID NO: 64124 - protein, 84 aa, Homo sapiens
MDNRQNVTPALIFAITVATIGSFQFGYNTGVINAPETIIKEFINKTLTDKANAPPSEVLLTNLWSLSVAIFSVGGMIGSFSVGL

SEQ ID NO: 64125 - protein, 520 aa, Homo sapiens; identical to SEQ ID NO: 64112

SEQ ID NO: 64126 - protein, 169 aa, Homo sapiens
MDNRQNVTPALIFAITVATIGSFQFGYNTGVINAPETIIKEFINKTLTDKANAPPSEVLLTNLWSLSVAIFSVGGMIGSFSVGLFVNRFGRRNSMLIVNLLAATGGCLMGLCKIAESVEMLILGRLVIGLFCGLCTGFVPMYIGEISPTALRGAFGTLNQLGIVIGILV

SEQ ID NO: 64127 - protein, 496 aa, Homo sapiens
MGTQKVTPALIFAITVATIGSFQFGYNTGVINAPEKIIKEFINKTLTDKGNAPPSEVLLTSLWSLSVAIFSVGGMIGSFSVGLFVNRFGRRNSMLIVNLLAVTGGCFMGLCKVAKSVEMLILGRLVIGLFCGLCTGFVPMYIGEISPTALRGAFGTLNQLGIVVGILVAQIFGLEFILGSEELWPLLLGFTILPAILQSAALPFCPESPRFLLINRKEEENAKQILQRLWGTQDVSQDIQEMKDESARMSQEKQVTVLELFRVSSYRQPIIISIVLQLSQQLSGINAVFYYSTGIFKDAGVQEPIYATIGAGVVNTIFTVVSLFLVERAGRRTLHMIGLGGMAFCSTLMTVSLLLKDNYNGMSFVCIGAILVFVAFFEIGPGPIPWFIVAELFSQGPRPAAMAVAGCSNWTSNFLVGLLFPSAAHYLGAYVFIIFTGFLITFLAFTFFKVPETRGRTFEDITRAFEGQAHGADRSGKDGVMEMNSIEPAKETTTNV

SEQ ID NO: 64128 - protein, 422 aa, Homo sapiens
MIGSFSVGLFVNRFGRRNSMLIVNLLAVTGGCFMGLCKVAKSVEMLILGRLVIGLFCGLCTGFVPMYIGEISPTALRGAFGTLNQLGIVVGILVAQIFGLEFILGSEELWPLLLGFTILPAILQSAALPFCPESPRFLLINRKEEENAKQILQRLWGTQDVSQDIQEMKDESARMSQEKQVTVLELFRVSSYRQPIIISIVLQLSQQLSGINAVFYYSTGIFKDAGVQEPIYATIGAGVVNTIFTVVSLFLVERAGRRTLHMIGLGGMAFCSTLMTVSLLLKDNYNGMSFVCIGAILVFVAFFEIGPGPIPWFIVAELFSQGPRPAAMAVAGCSNWTSNFLVGLLFPSAAHYLGAYVFIIFTGFLITFLAFTFFKVPETRGRTFEDITRAFEGQAHGADRSGKDGVMEMNSIEPAKETTTNV

SEQ ID NO: 64129 - protein, 509 aa, Homo sapiens
MPSGFQQIGSEDGEPPQQRVTGTLVLAVFSAVLGSLQFGYNIGVINAPQKVIEQSYNETWLGRQGPEGPSSIPPGTLTTLWALSVAIFSVGGMISSFLIGIISQWLGRKRAMLVNNVLAVLGGSLMGLANAAASYEMLILGRFLIGAYSGLTSGLVPMYVGEIAPTHLRGALGTLNQLAIVIGILIAQVLGLESLLGTASLWPLLLGLTVLPALLQLVLLPFCPESPRYLYIIQNLEGPARKSLKRLTGWADVSGVLAELKDEKRKLERERPLSLLQLLGSRTHRQPLIIAVVLQLSQQLSGINAVFYYSTSIFETAGVGQPAYATIGAGVVNTVFTLVSVLLVERAGRRTLHLLGLAGMCGCAILMTVALLLLERVPAMSYVSIVAIFGFVAFFEIGPGPIPWFIVAELFSQGPRPAAMAVAGFSNWTSNFIIGMGFQYVAEAMGPYVFLLFAVLLLGFFIFTFLRVPETRGRTFDQISAAFHRTPSLLEQEVKPSTELEYLGPDEND

SEQ ID NO: 64130 - protein, 451 aa, Homo sapiens
MDGEPPQQRVTGTLVLAVFSAVLGSLQFGYNIGVINAPQKVIEQSYNETWLGRQGPEGPSSIPPGTLTTLWALSVAIFSVGGMISSFLIGIISQWLGRKRAMLVNNVLAVLGGSLMGLANAAASYEMLILGRFLIGAYSGLTSGLVPMYVGEIAPTHLRGALGTLNQLAIVIGILIAQVLGLESLLGTASLWPLLLGLTVLPALLQLVLLPFCPESPRYLYIIQNLEGPARKSLKRLTGWADVSGVLAELKDEKRKLERERPLSLLQLLGSRTHRQPLIIAVVLQLSQQLSGINAVFYYSTSIFETAGVGQPAYATIGAGVVNTVFTLVSVLLVERAGRRTLHLLGLAGMCGCAILMTVALLLLERVPAMSYVSIVAIFGFVAFFEIGPGPIPWFIVAELFSQGPRPAAMAVAGFSNWTSNFIIGMGFQYVAVGPPAPASHTVGQRWASHS

SEQ ID NO: 64131 - protein, 445 aa, Homo sapiens
MQEPLLGAEGPDYDTFPEKPPPSPGDRARVGTLQNKRVFLATFAAVLGNFSFGYALVYTSPVIPALERSLDPDLHLTKSQASWFGSVFTLGAAAGGLSAMILNDLLGRKLSIMFSAVPSAAGYALMAGAHGLWMLLLGRTLTGFAGGLTAACIPVYVSEIAPPGVRGALGATPQLMAVFGSLSLYALGLLLPWRWLAVAGEAPVLIMILLLSFMPNSPRFLLSRGRDEEALRALAWLRGTDVDVHWEFEQIQDNVRRQSSRVSWAEARAPHVCRPITVALLMRLLQQLTGITPILVYLQSIFDSTAVLLPPKDDAAIVGAVRLLSVLIAALTMDLAGRKVLLFVSGYAVGWGPITWLLMSEVLPLRARGVASGLCVLASWLTAFVLTKSFLPVVSTFGLQVPFFFFAAICLVSLVFTGCCVPETKGRSLEQIESFFRTGRRSFLR

SEQ ID NO: 64132 - protein, 507 aa, Homo sapiens
MQEPLLGAEGPDYDTFPEKPPPSPGDRARVGTLQNKRVFLATFAAVLGNFSFGYALVYTSPVIPALERSLDPDLHLTKSQASWFGSVFTLGAAAGGLSAMILNDLLGRKLSIMFSAVPSAAGYALMAGAHGLWMLLLGRTLTGFAGGLTAACIPVYVSEIAPPGVRGALGATPQLMAVFGSLSLYALGLLLPWRWLAVAGEAPVLIMILLLSFMPNSPRFLLSRGRDEEALRALAWLRGTDVDVHWEFEQIQDNVRRQSSRVSWAEARAPHVCRPITVALLMRLLQQLTGITPILVYLQSIFDSTAVLLPPKDDAAIVGAVRLLSVLIAALTMDLAGRKVLLFVSAAIMFAANLTLGLYIHFGPRPLSPNSTAGLESESWGDLAQPLAAPAGYLTLVPLLATMLFIMGYAVGWGPITWLLMSEVLPLRARGVASGLCVLASWLTAFVLTKSFLPVVSTFGLQVPFFFFAAICLVSLVFTGCCVPETKGRSLEQIESFFRTGRRSFLR

SEQ ID NO: 64133 - protein, 146 aa, Homo sapiens
MILNDLLGRKLSIMFSAVPSAAGYALMAGAHGLWMLLLGRTLTGFAGGLTAACIPGLTLPSRPGLGTSIFSKTWCGGCVLQVYVSEIAPPGVRGALGATPQLMAVFGSLSLYALGKDEEALRALAWLRGTDVDVHWEFEQIQDNVR

SEQ ID NO: 64134 - protein, 219 aa, Homo sapiens
MQEPLLGAEGPDYDTFPEKPPPSPGDRARVGTLQNKRVFLATFAAVLGNFSFGYALVYTSPVIPALERSLDPDLHLTKSQASWFGSVFTLGAAAGGLSAMILNDLLGRKLSIMFSAVPSAAGYALMAGAHGLWMLLLGRTLTGFAGGLTAACIPVYVSEIAPPGVRGALGATPQLMAVFGSLSLYALGTKRPCGRWPGCVGRTSMSTGSSSRSRTTSGD

SEQ ID NO: 64135 - protein, 512 aa, Homo sapiens
MENKEAGTPPPIPSREGRLQPTLLLATLSAAFGSAFQYGYNLSVVNTPHKVFKSFYNETYFERHATFMDGKLMLLLWSCTVSMFPLGGLLGSLLVGLLVDSCGRKGTLLINNIFAIIPAILMGVSKVAKAFELIVFSRVVLGVCAGISYSALPMYLGELAPKNLRGMVGTMTEVFVIVGVFLAQIFSLQAILGNPAGWPVLLALTGVPALLQLLTLPFFPESPRYSLIQKGDEATARQALRRLRGHTDMEAELEDMRAEARAERAEGHLSVLHLCALRSLRWQLLSIIVLMAGQQLSGINAINYYADTIYTSAGVEAAHSQYVTVGSGVVNIVMTITSAVLVERLGRRHLLLAGYGICGSACLVLTVVLLFQNRVPELSYLGIICVFAYIAGHSIGPSPVPSVVRTEIFLQSSRRAAFMVDGAVHWLTNFIIGFLFPSIQEAIGAYSFIIFAGICLLTAIYIYVVIPETKGKTFVEINRIFAKRNRVKLPEEKEETIDAGPPTASPAKETSF

SEQ ID NO: 64136 - protein, 267 aa, Homo sapiens
MTCSLGKVYISEIAYPAVRGLLGSCVQLMVVVGILLAYLAGWVLEWRWLAVLGCVPPSLMLLLMCFMPETPRFLLTQHRRQEAMAALRFLWGSEQGWEDPPIGAEQSFHLALLRQPGIYKPFIIGVSLMAFQQLSGVNAVMFYAETIFEEAKFKDSSLASVVVGVIQVLFTAVAALIMDRAGRRLLLVLSGVVMVFSTSAFGAYFKLTQGGPGNSSHVAISAPVSAQPVDASVGLAWLAVGSMCLFIAGFAVGWGPIPWLLMSEIFP

SEQ ID NO: 64137 - protein, 214 aa, Homo sapiens
MAFQQLSGVNAVMFYAETIFEEAKFKDSSLASVVVGVIQVLFTAVAALIMDRAGRRLLLVLSGVVMVFSTSAFGAYFKLTQGGPGNSSHVAISAPVSAQPVDASVGLAWLAVGSMCLFIAGFAVGWGPIPWLLMSEIFPLHVKGVATGICVLTNWLMAFLVTKEFSSLMEVLRPYGAFWLASAFCIFSVLFTLFCVPETKGKTLEQITAHFEGR

SEQ ID NO: 64138 - protein, 411 aa, Homo sapiens
MTPEDPEETQPLLGPPGGSAPRGRRVFLAAFAAALGPLSFGFALGYSSPAIPSLQRAAPPAPRLDDAAASWFGAVVTLGAAAGGVLGGWLVDRAGRKLSLLLCSVPFVAGFAVITAAQDVWMLLGGRLLTGLACGVASLVAPVYISEIAYPAVRGLLGSCVQLMVVVGILLAYLAGWVLEWRWLAVLGCVPPSLMLLLMCFMPETPRFLLTQHRRQEAMAALRFLWGSEQGWEDPPIGAEQSFHLALLRQPGIYKPFIIGVSLMAFQQLSGVNAVMFYAETIFEEAKFKDSSLASVVVGVIQVLFTAVAALIMDRAGRRLLLVLSGVVMVFSTSAFGAYFKLTQGGPGNSSHVAISAPVSAQPVDASVGLAWLAVGSMCLFIAGGPQALWSLLACLRFLHLQCPFHFVLCP

SEQ ID NO: 64139 - protein, 477 aa, Homo sapiens
MTPEDPEETQPLLGPPGGSAPRGRRVFLAAFAAALGPLSFGFALGYSSPAIPSLQRAAPPAPRLDDAAASWFGAVVTLGAAAGGVLGGWLVDRAGRKLSLLLCSVPFVAGFAVITAAQDVWMLLGGRLLTGLACGVASLVAPVYISEIAYPAVRGLLGSCVQLMVVVGILLAYLAGWVLEWRWLAVLGCVPPSLMLLLMCFMPETPRFLLTQHRRQEAMAALRFLWGSEQGWEDPPIGAEQSFHLALLRQPGIYKPFIIGVSLMAFQQLSGVNAVMFYAETIFEEAKFKDSSLASVVVGVIQVLFTAVAALIMDRAGRRLLLVLSGVVMVFSTSAFGAYFKLTQGGPGNSSHVAISAPVSAQPVDASVGLAWLAVGSMCLFIAGFAVGWGPIPWLLMSEIFPLHVKGVATGICVLTNWLMAFLVTKEFSSLMEVLRPYGAFWLASAFCIFSVLFTLFCVPETKGKTLEQITAHFEGR

SEQ ID NO: 64140 - protein, 169 aa, Homo sapiens
  VARIANT 1: note = MOD_RES - Any amino acid
XGRRVFLAAFAAALGPLSFGFALGYSSPAIPSLQRAAPPAPRLDDAAASWFGVYISEIAYPAVRGLLGSCVQLMVVVGILLAYLAGWVLEWRWLAVLGCVPPSLMLLLMCFMPETPRFLLTQHRRQEAMAALRFLWGSEQGWEDPPIGAEQQLSGVNAVMFYAETIFEE

SEQ ID NO: 64141 - protein, 256 aa, Homo sapiens
MTPEDPEETQPLLGPPGGSAPRGRRVFLAAFAAALGPLSFGFALGYSSPAIPSLQRAAPPAPRLDDAAASWFGVYISEIAYPAVRGLLGSCVQLMVVVGILLAYLAGWVLEWRWLAVLGCVPPSLMLLLMCFMPETPRFLLTQHRRQEAMAALRFLWGSEQGWEDPPIGAEQSFHLALLRQPGIYKPFIIGVSLMAFQQLSGVNAVMFYAETIFEEAKFKDSSLASVVVGVIQVLFTAVAALIMDRAGRRLLLVLS

SEQ ID NO: 64142 - protein, 267 aa, Homo sapiens; identical to SEQ ID NO: 64136

SEQ ID NO: 64143 - protein, 276 aa, Homo sapiens
QLMVVVGILLAYLAGWVLEWRWLAVLGCVPPSLMLLLMCFMPETPRFLLTQHRRQEAMAALRFLWGSEQGWEDPPIGAEQSFHLALLRQPGIYKPFIIGVSLMAFQQLSGVNAVMFYAETIFEEAKFKDSSLASVVVGVIQVLFTAVAALIMDRAGRRLLLVLSGVVMVFSTSAFGAYFKLTQGGPGNSSHVAISAPVSAQPVDASVGLAWLAVGSMCLFIAGFAVGWGPIPWLLMSEIFPLHVKGVATGICVLTNWLMAFLVTKEFSSLMLLLLL

SEQ ID NO: 64144 - protein, 241 aa, Homo sapiens
MTCSLGKVYISEIAYPAVRGLLGSCVQLMVVVGILLAYLAGWVLEWRWLAVLGCVPPSLMLLLMCFMPETPRFLLTQHRRQEAMAALRFLWGSEQGWEDPPIGAEQQLSGVNAVMFYAETIFEEAKFKDSSLASVVVGVIQVLFTAVAALIMDRAGRRLLLVLSGVVMVFSTSAFGAYFKLTQGGPGNSSHVAISAPVSAQPVDASVGLAWLAVGSMCLFIAGFAVGWGPIPWLLMSEIFP

SEQ ID NO: 64145 - protein, 265 aa, Homo sapiens
MVVVGILLAYLAGWVLEWRWLAVLGCVPPSLMLLLMCFMPETPRFLLTQHRRQEAMAALRFLWGSEQGWEDPPIGAEQSFHLALLRQPGIYKPFIIGVSLMAFQQLSGVNAVMFYAETIFEEAKFKDSSLASVVVGVIQVLFTAVAALIMDRAGRRLLLVLSGVVMVFSTSAFGAYFKLTQGGPGNSSHVAISAPVSAQPVDASVGLAWLAVGSMCLFIAGFAVGWGPIPWLLMSEIFPLHVKGVATGICVLTNWLMAFLVTKEF

SEQ ID NO: 64146 - protein, 540 aa, Homo sapiens
MARKQNRNSKELGLVPLTDDTSHAGPPGPGRALLECDHLRSGVPGGRRRKDWSCSLLVASLAGAFGSSFLYGYNLSVVNAPTPYIKAFYNESWERRHGRPIDPDTLTLLWSVTVSIFAIGGLVGTLIVKMIGKVLGRKHTLLANNGFAISAALLMACSLQAGAFEMLIVGRFIMGIDGGVALSVLPMYLSEISPKEIRGSLGQVTAIFICIGVFTGQLLGLPELLGKESTWPYLFGVIVVPAVVQLLSLPFLPDSPRYLLLEKHNEARAVKAFQTFLGKADVSQEVEEVLAESRVQRSIRLVSVLELLRAPYVRWQVVTVIVTMACYQLCGLNAIWFYTNSIFGKAGIPPAKIPYVTLSTGGIETLAAVFSGLVIEHLGRRPLLIGGFGLMGLFFGTLTITLTLQDHAPWVPYLSIVGILAIIASFCSGPGGIPFILTGEFFQQSQRPAAFIIAGTVNWLSNFAVGLLFPFIQKSLDTYCFLVFATICITGAIYLYFVLPETKNRTYAEISQAFSKRNKAYPPEEKIDSAVTDGKINGRP

SEQ ID NO: 64147 - protein, 511 aa, Homo sapiens
MKLSKKDRGEDEESDSAKKKLDWSCSLLVASLAGAFGSSFLYGYNLSVVNAPTPYIKAFYNESWERRHGRPIDPDTLTLLWSVTVSIFAIGGLVGTLIVKMIGKVLGRKHTLLANNGFAISAALLMACSLQAGAFEMLIVGRFIMGIDGGVALSVLPMYLSEISPKEIRGSLGQVTAIFICIGVFTGQLLGLPELLGKESTWPYLFGVIVVPAVVQLLSLPFLPDSPRYLLLEKHNEARAVKAFQTFLGKADVSQEVEEVLAESRVQRSIRLVSVLELLRAPYVRWQVVTVIVTMACYQLCGLNAIWFYTNSIFGKAGIPPAKIPYVTLSTGGIETLAAVFSGLVIEHLGRRPLLIGGFGLMGLFFGTLTITLTLQDHAPWVPYLSIVGILAIIASFCSGPGGIPFILTGEFFQQSQRPAAFIIAGTVNWLSNFAVGLLFPFIQKSLDTYCFLVFATICITGAIYLYFVLPETKNRTYAEISQAFSKRNKAYPPEEKIDSAVTDGKINGRP

SEQ ID NO: 64148 - protein, 511 aa, Homo sapiens; identical to SEQ ID NO: 64147

SEQ ID NO: 64149 - protein, 198 aa, Homo sapiens
MKLSKKDRGEDEESDSAKKKLDWSCSLLVASLAGAFGSSFLYGYNLSVVNAPTPYIKAFYNESWERRHGRPIDPDTLTLLWSVTVSIFAIGGLVGTLIVKMIGKVLGRKHTLLANNGFAISAALLMACSLQAGAFEMLIVGRFIMGIDGGVALSVLPMYLSEISPKEIRGSLGQVTAIFICIGVFTGQLLGLPELLGK

SEQ ID NO: 64150 - protein, 244 aa, Homo sapiens
MEQQDQSMKEGRLTLVLALATLIAAFGSSFQYGYNVAAVNSPALLMQQFYNETYYGRTGEFMEDFPLTLLWSVTVSMFPFGGFIGSLLVGPLVNKFGRKGALLFNNIFSIVPAILMGCSRVATSFELIIISRLLVGICAGVSSNVVPMYLGELAPKNLRGALGVVPQLFITVGILVAQIFGLRNLLANVDGEFRTSREHPHPFTTTLGPLLVFQSHHHRTGLSADWSLLTGWMSLGGPSCPEPT

SEQ ID NO: 64151 - protein, 501 aa, Homo sapiens
MEQQDQSMKEGRLTLVLALATLIAAFGSSFQYGYNVAAVNSPALLMQQFYNETYYGRTGEFMEDFPLTLLWSVTVSMFPFGGFIGSLLVGPLVNKFGRKGALLFNNIFSIVPAILMGCSRVATSFELIIISRLLVGICAGVSSNVVPMYLGELAPKNLRGALGVVPQLFITVGILVAQIFGLRNLLANVDGWPILLGLTGVPAALQLLLLPFFPESPRYLLIQKKDEAAAKKALQTLRGWDSVDREVAEIRQEDEAEKAAGFISVLKLFRMRSLRWQLLSIIVLMGGQQLSGVNAIYYYADQIYLSAGVPEEHVQYVTAGTGAVNVVMTFCAVFVVELLGRRLLLLLGFSICLIACCVLTAALALQDTVSWMPYISIVCVISYVIGHALGPSPIPALLITEIFLQSSRPSAFMVGGSVHWLSNFTVGLIFPFIQEGLGPYSFIVFAVICLLTTIYIFLIVPETKAKTFIEINQIFTKMNKVSEVYPEKEELKELPPVTSEQ

SEQ ID NO: 64152 - protein, 484 aa, Homo sapiens
MEQQDQSMKEGRLTLVLALAAVNSPALLMQQFYNETYYGRTGEFMEDFPLTLLWSVTVSMFPFGGFIGSLLVGPLVNKFGRKGALLFNNIFSIVPAILMGCSRVATSFELIIISRLLVGICAGVSSNVVPMYLGELAPKNLRGALGVVPQLFITVGILVAQIFGLRNLLANVDGWPILLGLTGVPAALQLLLLPFFPESPRYLLIQKKDEAAAKKALQTLRGWDSVDREVAEIRQEDEAEKAAGFISVLKLFRMRSLRWQLLSIIVLMGGQQLSGVNAIYYYADQIYLSAGVPEEHVQYVTAGTGAVNVVMTFCAVFVVELLGRRLLLLLGFSICLIACCVLTAALALQDTVSWMPYISIVCVISYVIGHALGPSPIPALLITEIFLQSSRPSAFMVGGSVHWLSNFTVGLIFPFIQEGLGPYSFIVFAVICLLTTIYIFLIVPETKAKTFIEINQIFTKMNKVSEVYPEKEELKELPPVTSEQ

SEQ ID NO: 64153 - protein, 386 aa, Homo sapiens
MGCSRVATSFELIIISRLLVGICAGVSSNVVPMYLGELAPKNLRGALGVVPQLFITVGILVAQIFGLRNLLANVDGWPILLGLTGVPAALQLLLLPFFPESPRYLLIQKKDEAAAKKALQTLRGWDSVDREVAEIRQEDEAEKAAGFISVLKLFRMRSLRWQLLSIIVLMGGQQLSGVNAIYYYADQIYLSAGVPEEHVQYVTAGTGAVNVVMTFCAVFVVELLGRRLLLLLGFSICLIACCVLTAALALQDTVSWMPYISIVCVISYVIGHALGPSPIPALLITEIFLQSSRPSAFMVGGSVHWLSNFTVGLIFPFIQEGLGPYSFIVFAVICLLTTIYIFLIVPETKAKTFIEINQIFTKMNKVSEVYPEKEELKELPPVTSEQ

SEQ ID NO: 64154 - protein, 442 aa, Homo sapiens
MLELHSLTASSIMRVLIMRAPLREAPPEKFALLLSGSPGKGALLFNNIFSIVPAILMGCSRVATSFELIIISRLLVGICAGVSSNVVPMYLGELAPKNLRGALGVVPQLFITVGILVAQIFGLRNLLANVDGWPILLGLTGVPAALQLLLLPFFPESPRYLLIQKKDEAAAKKALQTLRGWDSVDREVAEIRQEDEAEKAAGFISVLKLFRMRSLRWQLLSIIVLMGGQQLSGVNAIYYYADQIYLSAGVPEEHVQYVTAGTGAVNVVMTFCAVFVVELLGRRLLLLLGFSICLIACCVLTAALALQDTVSWMPYISIVCVISYVIGHALGPSPIPALLITEIFLQSSRPSAFMVGGSVHWLSNFTVGLIFPFIQEGLGPYSFIVFAVICLLTTIYIFLIVPETKAKTFIEINQIFTKMNKVSEVYPEKEELKELPPVTSEQ

SEQ ID NO: 64155 - protein, 679 aa, Homo sapiens
MATLITSTTAATAASGPLVDYLWMLILGFIIAFVLAFSVGANDVANSFGTAVGSGVVTLKQACILASIFETVGSVLLGAKVSETIRKGLIDVEMYNSTQGLLMAGSVSAMFGSAVWQLVASFLKLPISGTHCIVGATIGFSLVAKGQEGVKWSELIKIVMSWFVSPLLSGIMSGILFFLVRAFILHKADPVPNGLRALPVFYACTVGINLFSIMYTGAPLLGFDKLPLWGTILISVGCAVFCALIVWFFVCPRMKRKIEREIKCSPSESPLMEKKNSLKEDHEETKLSVGDIENKHPVSEVGPATVPLQAVVEERTVSFKLGDLEEAPERERLPSVDLKEETSIDSTVNGAVQLPNGNLVQFSQAVSNQINSSGHYQYHTVHKDSGLYKELLHKLHLAKVGDCMGDSGDKPLRRNNSYTSYTMAICGMPLDSFRAKEGEQKGEEMEKLTWPNADSKKRIRMDSYTSYCNAVSDLHSASEIDMSVKAEMGLGDRKGSNGSLEEWYDQDKPEVSLLFQFLQILTACFGSFAHGGNDVSNAIGPLVALYLVYDTGDVSSKVATPIWLLLYGGVGICVGLWVWGRRVIQTMGKDLTPITPSSGFSIELASALTVVIASNIGLPISTTHCKVGSVVSVGWLRSKKAVDWRLFRNIFMAWFVTVPISGVISAAIMAIFRYVILRM

SEQ ID NO: 64156 - protein, 378 aa, Homo sapiens [sequence omitted]

SEQ ID NO: 64157 - protein, 652 aa, Homo sapiens
MAMDEYLWMVILGFIIAFILAFSVGANDVANSFGTAVGSGVVTLRQACILASIFETTGSVLLGAKVGETIRKGIIDVNLYNETVETLMAGEVSAMVGSAVWQLIASFLRLPISGTHCIVGSTIGFSLVAIGTKGVQWMELVKIVASWFISPLLSGFMSGLLFVLIRIFILKKEDPVPNGLRALPVFYAATIAINVFSIMYTGAPVLGLVLPMWAIALISFGVALLFAFFVWLFVCPWMRRKITGKLQKEGALSRVSDESLSKVQEAESPVFKELPGAKANDDSTIPLTGAAGETLGTSEGTSAGSHPRAAYGRALSMTHGSVKSPISNGTFGFDGHTRSDGHVYHTVHKDSGLYKDLLHKIHIDRGPEEKPAQESNYRLLRRNNSYTCYTAAICGLPVHATFRAADSSAPEDSEKLVGDTVSYSKKRLRYDSYSSYCNAVAEAEIEAEEGGVEMKLASELADPDQPREDPAEEEKEEKDAPEVHLLFHFLQVLTACFGSFAHGGNDVSNAIGPLVALWLIYKQGGVTQEAATPVWLLFYGGVGICTGLWVWGRRVIQTMGKDLTPITPSSGFTIELASAFTVVIASNIGLPVSTTHCKVGSVVAVGWIRSRKAVDWRLFRNIFVAWFVTVPVAGLFSAAVMALLMYGILPYV

SEQ ID NO: 64158 - protein, 71 aa, Homo sapiens
MAMDEYLWMVILGFIIAFILAFSVGANDVANSFGTAVGSGVVTLRQACILASIFETTGSVLLGAKVGETIR

SEQ ID NO: 64159 - protein, 28 aa, Homo sapiens
MAMDEYLWMVILGFIIAFILAFSVGAND

SEQ ID NO: 64160 - protein, 78 aa, Homo sapiens
MAMDEYLWMVILGFIIAFILAFSVGANDVANSFGTAVGSGVVTLRQACILASIFETTGSVLLGAKVGETIRKGIIDVN

SEQ ID NO: 64161 - protein, 652 aa, Homo sapiens; identical to SEQ ID NO: 64157

SEQ ID NO: 64162 - protein, 652 aa, Homo sapiens; identical to SEQ ID NO: 64157

SEQ ID NO: 64163 - protein, 47 aa, Homo sapiens
MAMDEYLWMVILGFIIAFILAFSVGANDVANSFGTAVGSGVVTLRQA

SEQ ID NO: 64164 - protein, 419 aa, Homo sapiens
MAQSIFMAGILIGGLVLGDLSDRFGRRPILTCSYLLLAASGSGAAFSPTFPIYMVFRFLCGFGISGITLSTVILNVEWVPTRMRAIMSTALGYCYTFGQFILPGLAYAIPQWRWLQLTVSIPFFVFFLSSWWTPESIRWLVLSGKSSKALKILRRVAVFNGKKEEGERLSLEELKLNLQKEISLAKAKYTASDLFRIPMLRRMTFCLSLAWFATGFAYYSLAMGVEEFGVNLYILQIIFGGVDVPAKFITILSLSYLGRHTTQAAALLLAGGAILALTFVPLDLQTVRTVLAVFGKGCLSSSFSCLFLYTSELYPTVIRQTGMGVSNLWTRVGSMVSPLVKITGEVQPFIPNIIYGITALLGGSAALFLPETLNQPLPETIEDLENWSLRAKKPKQEPEVEKASQRIPLQPHGPGLGSS

SEQ ID NO: 64165 - protein, 451 aa, Homo sapiens
MEPCLDGWVYNSTKDSIVTEWDLVCNSNKLKEMAQSIFMAGILIGGLVLGDLSDRFGRRPILTCSYLLLAASGSGAAFSPTFPIYMVFRFLCGFGISGITLSTVILNVEWVPTRMRAIMSTALGYCYTFGQFILPGLAYAIPQWRWLQLTVSIPFFVFFLSSWWTPESIRWLVLSGKSSKALKILRRVAVFNGKKEEGERLSLEELKLNLQKEISLAKAKYTASDLFRIPMLRRMTFCLSLAWFATGFAYYSLAMGVEEFGVNLYILQIIFGGVDVPAKFITILSLSYLGRHTTQAAALLLAGGAILALTFVPLDLQTVRTVLAVFGKGCLSSSFSCLFLYTSELYPTVIRQTGMGVSNLWTRVGSMVSPLVKITGEVQPFIPNIIYGITALLGGSAALFLPETLNQPLPETIEDLENWSLRAKKPKQEPEVEKASQRIPLQPHGPGLGSS

SEQ ID NO: 64166 - protein, 550 aa, Homo sapiens
MAFNDLLQQVGGVGRFQQIQVTLVVLPLLLMASHNTLQNFTAAIPTHHCRPPADANLSKNGGLEVWLPRDRQGQPESCLRFTSPQWGLPFLNGTEANGTGATEPCTDGWIYDNSTFPSTIVTEWDLVCSHRALRQLAQSLYMVGVLLGAMVFGYLADRLGRRKVLILNYLQTAVSGTCAAFAPNFPIYCAFRLLSGMALAGISLNCMTLNVEWMPIHTRACVGTLIGYVYSLGQFLLAGVAYAVPHWRHLQLLVSAPFFAFFIYSWFFIESARWHSSSGRLDLTLRALQRVARINGKREEGAKLSMEVLRASLQKELTMGKGQASAMELLRCPTLRHLFLCLSMLWFATSFAYYGLVMDLQGFGVSIYLIQVIFGAVDLPAKLVGFLVINSLGRRPAQMAALLLAGICILLNGVIPQDQSIVRTSLAVLGKGCLAASFNCIFLYTGELYPTMIRQTGMGMGSTMARVGSIVSPLVSMTAELYPSMPLFIYGAVPVAASAVTVLLPETLGQPLPDTVQDLESRKGKQTRQQQEHQKYMVPLQASAQEKNGL

SEQ ID NO: 64167 - protein, 563 aa, Homo sapiens
MAFNDLLQQVGGVGRFQQIQVTLVVLPLLLMASHNTLQNFTAAIPTHHCRPPADANLSKNGGLEVWLPRDRQGQPESCLRFTSPQWGLPFLNGTEANGTGATEPCTDGWIYDNSTFPSTIVTEWDLVCSHRALRQLAQSLYMVGVLLGAMVFGYLADRLGRRKVLILNYLQTAVSGTCAAFAPNFPIYCAFRLLSGMALAGISLNCMTLNVEWMPIHTRACVGTLIGYVYSLGQFLLAGVAYAVPHWRHLQLLVSAPFFAFFIYSWFFIESARWHSSSGRLDLTLRALQRVARINGKREEGAKLSMEVLRASLQKELTMGKGQASAMELLRCPTLRHLFLCLSMLWFATSFAYYGLVMDLQGFGVSIYLIQVIFGAVDLPAKLVGFLVINSLGRRPAQMAALLLAGICILLNGVIPQDQSIVRTSLAVLGKGCLAASFNCIFLYTGELYPTMIRQTGMGMGSTMARVGSIVSPLVSMTAELYPSMPLFIYGAVPVAASAVTVLLPETLGQPLPDTVQDLESRWAPTQKEAGIYPRKGKQTRQQQEHQKYMVPLQASAQEKNGL

SEQ ID NO: 64168 - protein, 529 aa, Homo sapiens
MAFNDLLLLMASHNTLQNFTAAIPTHHCRPPADANLSKNGGLEVWLPRDRQGQPESCLRFTSPQWGLPFLNGTEANGTGATEPCTDGWIYDNSTFPSTIVTEWDLVCSHRALRQLAQSLYMVGVLLGAMVFGYLADRLGRRKVLILNYLQTAVSGTCAAFAPNFPIYCAFRLLSGMALAGISLNCMTLNVEWMPIHTRACVGTLIGYVYSLGQFLLAGVAYAVPHWRHLQLLVSAPFFAFFIYSWFFIESARWHSSSGRLDLTLRALQRVARINGKREEGAKLSMEVLRASLQKELTMGKGQASAMELLRCPTLRHLFLCLSMLWFATSFAYYGLVMDLQGFGVSIYLIQVIFGAVDLPAKLVGFLVINSLGRRPAQMAALLLAGICILLNGVIPQDQSIVRTSLAVLGKGCLAASFNCIFLYTGELYPTMIRQTGMGMGSTMARVGSIVSPLVSMTAELYPSMPLFIYGAVPVAASAVTVLLPETLGQPLPDTVQDLESRKGKQTRQQQEHQKYMVPLQASAQEKNGL

SEQ ID NO: 64169 - protein, 519 aa, Homo sapiens
MAFNDLLQQVGGVGRFQQIQVTLVVLPLLLMASHNTLQNFTAAIPTHHCRPPADANLSKNGGLEVWLPRDRQGQPESCLRFTSPQWGLPFLNGTEANGTGATEPCTDGWIYDNSTFPSTIVTEWDLVCSHRALRQLAQSLYMVGVLLGAMVFGYLADRLGRRKVLILNYLQTAVSGTCAAFAPNFPIYCAFRLLSGMALAGISLNCMTLNVEWMPIHTRACVGTLIGYVYSLGQFLLAGVAYAVPHWRHLQLLVSAPFFAFFIYSWFFIESARWHSSSGRLDLTLRALQRVARINGKREEGAKLSMEVLRASLQKELTMGKGQASAMELLRCPTLRHLFLCLSMLWFATSFAYYGLVMDLQGFGVSIYLIQVIFGAVDLPAKLVGFLVINSLGRRPAQMAALLLAGICILLNGVIPQDQSIVRTSLAVLGKGCLAASFNCIFLYTGELYPTMIRAVTVLLPETLGQPLPDTVQDLESRWAPTQKEAGIYPRKGKQTRQQQEHQKYMVPLQASAQEKNGL

SEQ ID NO: 64170 - protein, 506 aa, Homo sapiens
MAFNDLLQQVGGVGRFQQIQVTLVVLPLLLMASHNTLQNFTAAIPTHHCRPPADANLSKNGGLEVWLPRDRQGQPESCLRFTSPQWGLPFLNGTEANGTGATEPCTDGWIYDNSTFPSTIVTEWDLVCSHRALRQLAQSLYMVGVLLGAMVFGYLADRLGRRKVLILNYLQTAVSGTCAAFAPNFPIYCAFRLLSGMALAGISLNCMTLNVEWMPIHTRACVGTLIGYVYSLGQFLLAGVAYAVPHWRHLQLLVSAPFFAFFIYSWFFIESARWHSSSGRLDLTLRALQRVARINGKREEGAKLSMEVLRASLQKELTMGKGQASAMELLRCPTLRHLFLCLSMLWFATSFAYYGLVMDLQGFGVSIYLIQVIFGAVDLPAKLVGFLVINSLGRRPAQMAALLLAGICILLNGVIPQDQSIVRTSLAVLGKGCLAASFNCIFLYTGELYPTMIRAVTVLLPETLGQPLPDTVQDLESRKGKQTRQQQEHQKYMVPLQASAQEKNGL

SEQ ID NO: 64171 - protein, 539 aa, Homo sapiens
MGFEELLEQVGGFGPFQLRNVALLALPRVLLPLHFLLPIFLAAVPAHRCALPGAPANFSHQDVWLEAHLPREPDGTLSSCLRFAYPQALPNTTLGEERQSRGELEDEPATVPCSQGWEYDHSEFSSTIATEWDLVCEQKGLNRAASTFFFAGVLVGAVAFGYLSDRFGRRRLLLVAYVSTLVLGLASAASVSYVMFAITRTLTGSALAGFTIIVMPLELEWLDVEHRTVAGVLSSTFWTGGVMLLALVGYLIRDWRWLLLAVTLPCAPGILSLWWVPESARWLLTQGHVKEAHRYLLHCARLNGRPVCEDSFSQEAVSKVAAGERVVRRPSYLDLFRTPRLRHISLCCVVVWFGVNFSYYGLSLDVSGLGLNVYQTQLLFGAVELPSKLLVYLSVRYAGRRLTQAGTLLGTALAFGTRLLVSSDMKSWSTVLAVMGKAFSEAAFTTAYLFTSELYPTVLRQTGMGLTALVGRLGGSLAPLAALLDGVWLSLPKLTYGGIALLAAGTALLLPETRQAQLPETIQDVERKRCVHRTVSVYV

SEQ ID NO: 64172 - protein, 548 aa, Homo sapiens
MGFEELLEQVGGFGPFQLRNVALLALPRVLLPLHFLLPIFLAAVPAHRCALPGAPANFSHQDVWLEAHLPREPDGTLSSCLRFAYPQALPNTTLGEERQSRGELEDEPATVPCSQGWEYDHSEFSSTIATESQWDLVCEQKGLNRAASTFFFAGVLVGAVAFGYLSDRFGRRRLLLVAYVSTLVLGLASAASVSYVMFAITRTLTGSALAGFTIIVMPLELEWLDVEHRTVAGVLSSTFWTGGVMLLALVGYLIRDWRWLLLAVTLPCAPGILSLWWVPESARWLLTQGHVKEAHRYLLHCARLNGRPVCEDSFSQEAVSKVAAGERVVRRPSYLDLFRTPRLRHISLCCVVVWFGVNFSYYGLSLDVSGLGLNVYQTQLLFGAVELPSKLLVYLSVRYAGRRLTQAGTLLGTALAFGTRLLVSSDMKSWSTVLAVMGKAFSEAAFTTAYLFTSELYPTVLRQTGMGLTALVGRLGGSLAPLAALLDGVWLSLPKLTYGGIALLAAGTALLLPETRQAQLPETIQDVERKSAPTSLQEEEMPMKQVQN

SEQ ID NO: 64173 - protein, 546 aa, Homo sapiens
MGFEELLEQVGGFGPFQLRNVALLALPRVLLPLHFLLPIFLAAVPAHRCALPGAPANFSHQDVWLEAHLPREPDGTLSSCLRFAYPQALPNTTLGEERQSRGELEDEPATVPCSQGWEYDHSEFSSTIATEWDLVCEQKGLNRAASTFFFAGVLVGAVAFGYLSDRFGRRRLLLVAYVSTLVLGLASAASVSYVMFAITRTLTGSALAGFTIIVMPLELEWLDVEHRTVAGVLSSTFWTGGVMLLALVGYLIRDWRWLLLAVTLPCAPGILSLWWVPESARWLLTQGHVKEAHRYLLHCARLNGRPVCEDSFSQEAVSKVAAGERVVRRPSYLDLFRTPRLRHISLCCVVVWFGVNFSYYGLSLDVSGLGLNVYQTQLLFGAVELPSKLLVYLSVRYAGRRLTQAGTLLGTALAFGTRLLVSSDMKSWSTVLAVMGKAFSEAAFTTAYLFTSELYPTVLRQTGMGLTALVGRLGGSLAPLAALLDGVWLSLPKLTYGGIALLAAGTALLLPETRQAQLPETIQDVERKSAPTSLQEEEMPMKQVQN

SEQ ID NO: 64174 - protein, 211 aa, Homo sapiens
MLQPHLLPYQAVSKVAAGERVVRRPSYLDLFRTPRLRHISLCCVVVWFGVNFSYYGLSLDVSGLGLNVYQTQLLFGAVELPSKLLVYLSVRYAGRRLTQAGTLLGTALAFGTRLLVSSDMKSWSTVLAVMGKAFSEAAFTTAYLFTSELYPTVLRQTGMGLTALVGRLGGSLAPLAALLDGVWLSLPKLTYGGIALLAAGTALLLPETRQA

SEQ ID NO: 64175 - protein, 278 aa, Homo sapiens
MGFEELLEQVGGFGPFQLRNVALLALPRVLLPLHFLLPIFLAAVPAHRCALPGAPANFSHQDVWLEAHLPREPDGTLSSCLRFAYPQALPNTTLGEERQSRGELEDEPATVPCSQGWEYDHSEFSSTIATESQVGIYIIHLEVECRWRQSPWEAAGRGLPWEEAEAAGLGRDKVSYSPSWRESLGGLLSGMEWDLVCEQKGLNRAASTFFFAGVLVGAVAFGYLSDRFGRRRLLLVAYVSTLVLGLASAASVSYVMFAITRTLTGSALAGFTIIVMPL

SEQ ID NO: 64176 - protein, 147 aa, Homo sapiens
MEWDLVCEQKGLNRAASTFFFAGVLVGAVAFGYLSDRFGRRRLLLVAYVSTLVLGLASAASVSYVMFAITRTLTGSALAGFTIIVMPLGEAELEWLDVEHRTVAGVLSSTFWTGGVMLLALVGYLIRDWRWLLLAVTLPCAPGILSL

SEQ ID NO: 64177 - protein, 542 aa, Homo sapiens
MTFSEILDRVGSMGHFQFLHVAILGLPILNMANHNLLQIFTAATPVHHCRPPHNASTGPWVLPMGPNGKPERCLRFVHPPNASLPNDTQRAMEPCLDGWVYNSTKDSIVTEWDLVCNSNKLKEMAQSIFMAGILIGGLVLGDLSDRFGRRPILTCSYLLLAASGSGAAFSPTFPIYMVFRFLCGFGISGITLSTVILNVEWVPTRMRAIMSTALGYCYTFGQFILPGLAYAIPQWRWLQLTVSIPFFVFFLSSWWTPESIRWLVLSGKSSKALKILRRVAVFNGKKEEGERLSLEELKLNLQKEISLAKAKYTASDLFRIPMLRRMTFCLSLAWFATGFAYYSLAMGVEEFGVNLYILQIIFGGVDVPAKFITILSLSYLGRHTTQAAALLLAGGAILALTFVPLDLQTVRTVLAVFGKGCLSSSFSCLFLYTSELYPTVIRQTGMGVSNLWTRVGSMVSPLVKITGEVQPFIPNIIYGITALLGGSAALFLPETLNQPLPETIEDLENWSLRAKKPKQEPEVEKASQRIPLQPHGPGLGSS

SEQ ID NO: 64178 - protein, 542 aa, Homo sapiens; identical to SEQ ID NO: 64177

SEQ ID NO: 64179 - protein, 528 aa, Homo sapiens
MTFSEILDRVGSMGHFQFLHVAILGLPILNMANHCRPPHNASTGPWVLPMGPNGKPERCLRFVHPPNASLPNDTQRAMEPCLDGWVYNSTKDSIVTEWDLVCNSNKLKEMAQSIFMAGILIGGLVLGDLSDRFGRRPILTCSYLLLAASGSGAAFSPTFPIYMVFRFLCGFGISGITLSTVILNVEWVPTRMRAIMSTALGYCYTFGQFILPGLAYAIPQWRWLQLTVSIPFFVFFLSSWWTPESIRWLVLSGKSSKALKILRRVAVFNGKKEEGERLSLEELKLNLQKEISLAKAKYTASDLFRIPMLRRMTFCLSLAWFATGFAYYSLAMGVEEFGVNLYILQIIFGGVDVPAKFITILSLSYLGRHTTQAAALLLAGGAILALTFVPLDLQTVRTVLAVFGKGCLSSSFSCLFLYTSELYPTVIRQTGMGVSNLWTRVGSMVSPLVKITGEVQPFIPNIIYGITALLGGSAALFLPETLNQPLPETIEDLENWSLRAKKPKQEPEVEKASQRIPLQPHGPGLGSS

SEQ ID NO: 64180 - protein, 550 aa, Homo sapiens
MAFSKLLEQAGGVGLFQTLQVLTFILPCLMIPSQMLLENFSAAIPGHRCWTHMLDNGSAVSTNMTPKALLTISIPPGPNQGPHQCRRFRQPQWQLLDPNATATSWSEADTEPCVDGWVYDRSVFTSTIVAKWDLVCSSQGLKPLSQSIFMSGILVGSFIWGLLSYRFGRKPMLSWCCLQLAVAGTSTIFAPTFVIYCGLRFVAAFGMAGIFLSSLTLMVEWTTTSRRAVTMTVVGCAFSAGQAALGGLAFALRDWRTLQLAASVPFFAISLISWWLPESARWLIIKGKPDQALQELRKVARINGHKEAKNLTIEVLMSSVKEEVASAKEPRSVLDLFCVPVLRWRSCAMLVVNFSLLISYYGLVFDLQSLGRDIFLLQALFGAVDFLGRATTALLLSFLGRRTIQAGSQAMAGLAILANMLVPQDLQTLRVVFAVLGKGCFGISLTCLTIYKAELFPTPVRMTADGILHTVGRLGAMMGPLILMSRQALPLLPPLLYGVISIASSLVVLFFLPETQGLPLPDTIQDLESQKSTAAQGNRQEAVTVESTSL

SEQ ID NO: 64181 - protein, 445 aa, Homo sapiens
MAFSELLDLVGGLGRFQVLQTMALMVSIMWLCTQSMLENFSAAVPSHRCWAPLLDNSTAQASILGSLSPEALLAISIPPGPNQRPHQCRRFRQPQWQLLDPNATATSWSEADTEPCVDGWVYDRSIFTSTIVAKWNLVCDSHALKPMAQSIYLAGILVGAAACGPASDRWLAESARWLLTTGRLDWGLQELWRVAAINGKGAVQDTLTPEVLLSAMREELSMGQPPASLGTLLRMPGLRFRTCISTLCWFAFGFTFFGLALDLQALGSNIFLLQMFIGVVDIPAKMGALLLLSHLGRRPTLAASLLLAGLCILANTLVPHEMGALRSALAVLGLGGVGAAFTCITIYSSELFPTVLRMTAVGLGQMAARGGAILGPLVRLLGVHGPWLPLLVYGTVPVLSGLAALLLPETQSLPLPDTIQDVQNQAVKKATHGTLGNSVLKSTQF

SEQ ID NO: 64182 - protein, 553 aa, Homo sapiens
MAFSELLDLVGGLGRFQVLQTMALMVSIMWLCTQSMLENFSAAVPSHRCWAPLLDNSTAQASILGSLSPEALLAISIPPGPNQRPHQCRRFRQPQWQLLDPNATATSWSEADTEPCVDGWVYDRSIFTSTIVAKWNLVCDSHALKPMAQSIYLAGILVGAAACGPASDRFGRRLVLTWSYLQMAVMGTAAAFAPAFPVYCLFRFLLAFAVAGVMMNTGTLLMEWTAARARPLVMTLNSLGFSFGHGLTAAVAYGVRDWTLLQLVVSVPFFLCFLYSWWLAESARWLLTTGRLDWGLQELWRVAAINGKGAVQDTLTPEVLLSAMREELSMGQPPASLGTLLRMPGLRFRTCISTLCWFAFGFTFFGLALDLQALGSNIFLLQMFIGVVDIPAKMGALLLLSHLGRRPTLAASLLLAGLCILANTLVPHEMGALRSALAVLGLGGVGAAFTCITIYSSELFPTVLRMTAVGLGQMAARGGAILGPLVRLLGVHGPWLPLLVYGTVPVLSGLAALLLPETQSLPLPDTIQDVQNQAVKKATHGTLGNSVLKSTQF

SEQ ID NO: 64183 - protein, 332 aa, Homo sapiens
MEWTAARARPLVMTLNSLGFSFGHGLTAAVAYGVRDWTLLQLVVSVPFFLCFLYSWWLAESARWLLTTGRLDWGLQELWRVAAINGKGAVQDTLTPEVLLSAMREELSMGQPPASLGTLLRMPGLRFRTCISTLCWFAFGFTFFGLALDLQALGSNIFLLQMFIGVVDIPAKMGALLLLSHLGRRPTLAASLLLAGLCILANTLVPHEMGALRSALAVLGLGGVGAAFTCITIYSSELFPTVLRMTAVGLGQMAARGGAILGPLVRLLGVHGPWLPLLVYGTVPVLSGLAALLLPETQSLPLPDTIQDVQNQAVKKATHGTLGNSVLKSTQF

SEQ ID NO: 64184 - protein, 554 aa, Homo sapiens
MPTVDDILEQVGESGWFQKQAFLILCLLSAAFAPICVGIVFLGFTPDHHCQSPGVAELSQRCGWSPAEELNYTVPGLGPAGEAFLGQCRRYEVDWNQSALSCVDPLASLATNRSHLPLGPCQDGWVYDTPGSSIVTEFNLVCADSWKLDLFQSCLNAGFLFGSLGVGYFADRFGRKLCLLGTVLVNAVSGVLMAFSPNYMSMLLFRLLQGLVSKGNWMAGYTLITEFVGSGSRRTVAIMYQMAFTVGLVALTGLAYALPHWRWLQLAVSLPTFLFLLYYWCVPESPRWLLSQKRNTEAIKIMDHIAQKNGKLPPADLKMLSLEEDVTEKLSPSFADLFRTPRLRKRTFILMYLWFTDSVLYQGLILHMGATSGNLYLDFLYSALVEIPGAFIALITIDRVGRIYPMAMSNLLAGAACLVMIFISPDLHWLNIIIMCVGRMGITIAIQMICLVNAELYPTFVRNLGVMVCSSLCDIGGIITPFIVFRLREVWQALPLILFAVLGLLAAGVTLLLPETKGVALPETMKDAENLGRKAKPKENTIYLKVQTSEPSGT

SEQ ID NO: 64185 - protein, 334 aa, Homo sapiens
MFFLLALLSATFAPIYVGIVFLGFTPDHRCRSPGVAELSLRCGWSPAEELNYTVPGPGPAGEASPRQCRRYEVDWNQSTFDCVDPLASLDTNRSRLPLGPCRDGWVYETPGSSIVTEFNLVCANSWMLDLFQSSVNVGFFIGSMSIGYIADRFGRKLCLLTTVLINAAAGVLMAISPTYTWMLIFRLIQGLVSKAGWLIGYILITEFVGRRYRRTVGIFYQVAYTVGLLVLAGVAYALPHWRWLQFTVSLPNFFFLLYYWCIPESPRWLISQNKNAEAMRIIKHIAKKNGKSLPASLQRLRLEEETGKKLNPSFLDLVRTPQIRKHTMILMYNW

SEQ ID NO: 64186 - protein, 555 aa, Homo sapiens
MPTTVDDVLEHGGEFHFFQKQMFFLLALLSATFAPIYVGIVFLGFTPDHRCRSPGVAELSLRCGWSPAEELNYTVPGPGPAGEASPRQCRRYEVDWNQSTFDCVDPLASLDTNRSRLPLGPCRDGWVYETPGSSIVTEFNLVCANSWMLDLFQSSVNVGFFIGSMSIGYIADRFGRKLCLLTTVLINAAAGVLMAISPTYTWMLIFRLIQGLVSKAGWLIGYILITEFVGRRYRRTVGIFYQVAYTVGLLVLAGVAYALPHWRWLQFTVSLPNFFFLLYYWCIPESPRWLISQNKNAEAMRIIKHIAKKNGKSLPASLQRLRLEEETGKKLNPSFLDLVRTPQIRKHTMILMYNWFTSSVLYQGLIMHMGLAGDNIYLDFFYSALVEFPAAFMIILTIDRIGRRYPWAASNMVAGAACLASVFIPGDLQWLKIIISCLGRMGITMAYEIVCLVNAELYPTFIRNLGVHICSSMCDIGGIITPFLVYRLTNIWLELPLMVFGVLGLVAGGLVLLLPETKGKALPETIEEAENMQRPRKNKEKMIYLQVQKLDIPLN

SEQ ID NO: 64187 - protein, 543 aa, Homo sapiens
MRTLHAVSHPYSNSMRFQRVLYFICAFQNISCGIHYLASVFMGVTPHHVCRPPGNLQNGEIWELSRCSRNKRENTSSLGYEYTGSKKEFPCVDGYIYDQNTWKSTAVTQWNLVCDRKWLAMLIQPLFMFGVLLGSVTFGYFSDRLGRRVVLWATSSSMFLFGIAAAFAVDYYTFMAARFFLAMVASGYLVVGFVYVMEFIGMKSRTWASVHLHSFFAVGTLLVALTGYLVRTWWLYQMILSTVTVPFILCCWVLPETPFWLLSEGRYEEAQKIVDIMAKWNRASSCKLSELLSLDLQGPVSNSPTEVQKHNLSYLFYNWSITKRTLTVWLIWFTGSLGFYSFSLNSVNLGGNEYLNLFLLGVVEIPAYTFVCIAMDKVGRRTVLAYSLFCSALACGVVMVIPQKHYILGVVTAMVGKFAIGAAFGLIYLYTAELYPTIVRSLAVGSGSMVCRLASILAPFSVDLSSIWIFIPQLFVGTMALLSGVLTLKLPETLGKRLATTWEEAAKLESENESKSSKLLLTTNNSGLEKTEAITPRDSGLGE

SEQ ID NO: 64188 - protein, 577 aa, Homo sapiens
MGSRHFEGIYDHVGHFGRFQRVLYFICAFQNISCGIHYLASVFMGVTPHHVCRPPGNVSQVVFHNHSNWSLEDTGALLSSGQKDYVTVQLQNGEIWELSRCSRNKRENTSSLGYEYTGSKKEFPCVDGYIYDQNTWKSTAVTQWNLVCDRKWLAMLIQPLFMFGVLLGSVTFGYFSDRLGRRVVLWATSSSMFLFGIAAAFAVDYYTFMAARFFLAMVASGYLVVGFVYVMEFIGMKSRTWASVHLHSFFAVGTLLVALTGYLVRTWWLYQMILSTVTVPFILCCWVLPETPFWLLSEGRYEEAQKIVDIMAKWNRASSCKLSELLSLDLQGPVSNSPTEVQKHNLSYLFYNWSITKRTLTVWLIWFTGSLGFYSFSLNSVNLGGNEYLNLFLLGVVEIPAYTFVCIAMDKVGRRTVLAYSLFCSALACGVVMVIPQKHYILGVVTAMVGKFAIGAAFGLIYLYTAELYPTIVRSLAVGSGSMVCRLASILAPFSVDLSSIWIFIPQLFVGTMALLSGVLTLKLPETLGKRLATTWEEAAKLESENESKSSKLLLTTNNSGLEKTEAITPRDSGLGE

SEQ ID NO: 64189 - protein, 174 aa, Homo sapiens
MGVTPHHVCRPPGNVSQVVFHNHSNWSLEDTGALLSSGQKDYVTVQLQNGEIWELSRCSRNKRENTSSLGYEYTGSKKEFPCVDGYIYDQNTWKSTAVTQWNLVCDRKWLAMLIQPLFMFGVLLGSVTFGYFSDRLGRRVVLWATSSSMFLFGIAAAFAVDYYTFMAARFFLAM

SEQ ID NO: 64190 - protein, 267 aa, Homo sapiens
MSAGPQAMLGRRVVLWATSSSMFLFGIAAAFAVDYYTFMAARFFLAMVASGYLVVGFVYVMEFIGMKSRTWASVHLHSFFAVGTLLVALTGYLVRTWWLYQMILSTVTVPFILCCWVLPETPFWLLSEGRYEEAQKIVDIMAKWNRASSCKLSELLSLDLQGPVSNSPTEVQKHNLSYLFYNWSITKRTLTVWLIWFTGSLGFYSFSLNSVNLGGNEYLNLFLLGVVEIPAYTFVCIAMDKVGRRTVLAYSLFCSALACGVVMVIPQ

SEQ ID NO: 64191 - protein, 351 aa, Homo sapiens
MGVTPHHVCRPPGNVSQVVFHNHSNWSLEDTGALLSSGQKDYVTVQLQNGEIWELSRCSRNKRENTSSLGYEYTGSKKEFPCVDGYIYDQNTWKSTAVTQWNLVCDRKWLAMLIQPLFMFGVLLGSVTFGYFSDRLGRRVVLWATSSSMFLFGIAAAFAVDYYTFMAARFFLAMVASGYLVVGFVYVMEFIGMKSRTWASVHLHSFFAVGTLLVALTGYLVRTWWLYQMILSTVTVPFILCCWVLPETPFWLLSEGRYEEAQKIVDIMAKWNRASSCKLSELLSLDLQGPVSNSPTEVQKHNLSYLFYNWSITKRTLTVWLIWFTGSLGFYSFSLNSVNLGGNEYLNLFLL

SEQ ID NO: 64192 - protein, 515 aa, Homo sapiens
MGSRHFEGIYDHVGHFGRFQRVLYFICAFQNISCGIHYLASVFMGVTPHHVCRPPGNVSQVVFHNHSNWSLEDTGALLSSGQKDYVTVQLQNGEIWELSRCSRNKRENTSSLGYEYTGSKKEFPCVDGYIYDQNTWKSTAVTQWNLVCDRKWLAMLIQPLFMFGVLLGSVTFGYFSDRLGRRVVLWATSSSMFLFGIAAAFAVDYYTFMAARFFLAMVASGYLVVGFVYVMEFIGMKSRTWASVHLHSFFAVGTLLVALTGYLVRTWWLYQMILSTVTVPFILCCWVLPETPFWLLSEGRYEEAQKIVDIMAKWNRASSCKLSELLSLDLQGPVSNSPTEVQKHNLSYLFYNWSITKRTLTVWLIWFTGSLGFYSFSLNSVNLGGNEYLNLFLLGVVEIPAYTFVCIAMDKVGRRTVLAYSLFCSALACGVVMVIPQKHYILGVVTAMVGKFAIGAAFGLIYLYTAELYPTIVRSLAVGSGSMVCRLASILAPFSVDLSSIWIFIPQLLGQHLQE

SEQ ID NO: 64193 - protein, 432 aa, Homo sapiens
DYVTVQLQNGEIWELSRCSRNKRENTSSLGYEYTGSKKEFPCVDGYIYDQNTWKSTAVTQWNLVCDRKWLAMLIQPLFMFGVLLGSVTFGYFSDRLGRRVVLWATSSSMFLFGIAAAFAVDYYTFMAARFFLAMVASGYLVVGFVYVMEFIGMKSRTWASVHLHSFFAVGTLLVALTGYLVRTWWLYQMILSTVTVPFILCCWVLPETPFWLLSEGRYEEAQKIVDIMAKWNRASSCKLSELLSLDLQGPVSNSPTEVQKHNLSYLFYNWSITKRTLTVWLIWFTGSLGFYSFSLNSVNLGGNEYLNLFLLGVVEIPAYTFVCIAMDKVGRRTVLAYSLFCSALACGVVMVIPQKHYILGVVTAMVGKFAIGAAFGLIYLYTAELYPTIVRSLAVGSGSMVCRLASILAPFSVDLSSIWIFIPQLLGQHLQE

SEQ ID NO: 64194 - protein, 199 aa, Homo sapiens
MGSRHFEGIYDHVGHFGRFQRVLYFICAFQNISCGIHYLASVFMGVTPHHVCRPPGNVSQVVFHNHSNWSLEDTGALLSSGQKDYVTVQLQNGEIWELSRCSRNKRENTSSLGYEYTGSKKEFPCVDGYIYDQNTWKSTAVTQWNLVCDRKWLAMLIQPLFMFGVLLGSVTFGYFSDRVGFLTAWYKTSGFPTSSAPPL

SEQ ID NO: 64195 - protein, 557 aa, Homo sapiens
MRDYDEVTAFLGEWGPFQRLIFFLLSASIIPNGFTGLSSVFLIATPEHRCRVPDAANLSSAWRNHTVPLRLRDGREVPHSCRRYRLATIANFSALGLEPGRDVDLGQLEQESCLDGWEFSQDVYLSTIVTEWNLVCEDDWKAPLTISLFFVGVLLGSFISGQLSDRFGRKNVLFVTMGMQTGFSFLQIFSKNFEMFVVLFVLVGMGQISNYVAAFVLGTEILGKSVRIIFSTLGVCIFYAFGYMVLPLFAYFIRDWRMLLVALTMPGVLCVALWWFIPESPRWLISQGRFEEAEVIIRKAAKANGIVVPSTIFDPSELQDLSSKKQQSHNILDLLRTWNIRMVTIMSIMLWMTISVGYFGLSLDTPNLHGDIFVNCFLSAMVEVPAYVLAWLLLQYLPRRYSMATALFLGGSVLLFMQLVPPDLYYLATVLVMVGKFGVTAAFSMVYVYTAELYPTVVRNMGVGVSSTASRLGSILSPYFVYLGAYDRFLPYILMGSLTILTAILTLFLPESFGTPLPDTIDQMLRVKGMKHRKTPSHTRMLKDGQERPTILKSTAF

SEQ ID NO: 64196 - protein, 581 aa, Homo sapiens
MRDYDEVTAFLGEWGPFQRLIFFLLSASIIPNGFTGLSSVFLIATPEHRCRVPDAANLSSAWRNHTVPLRLRDGREVPHSCRRYRLATIANFSALGLEPGRDVDLGQLEQESCLDGWEFSQDVYLSTIVTEQDSGAYNAMKNRMGKKPALCLPAQWNLVCEDDWKAPLTISLFFVGVLLGSFISGQLSDRFGRKNVLFVTMGMQTGFSFLQIFSKNFEMFVVLFVLVGMGQISNYVAAFVLGTEILGKSVRIIFSTLGVCIFYAFGYMVLPLFAYFIRDWRMLLVALTMPGVLCVALWWFIPESPRWLISQGRFEEAEVIIRKAAKANGIVVPSTIFDPSELQDLSSKKQQSHNILDLLRTWNIRMVTIMSIMLWMTISVGYFGLSLDTPNLHGDIFVNCFLSAMVEVPAYVLAWLLLQYLPRRYSMATALFLGGSVLLFMQLVPPDLYYLATVLVMVGKFGVTAAFSMVYVYTAELYPTVVRNMGVGVSSTASRLGSILSPYFVYLGAYDRFLPYILMGSLTILTAILTLFLPESFGTPLPDTIDQMLRVKGMKHRKTPSHTRMLKDGQERPTILKSTAF

SEQ ID NO: 64197 - protein, 551 aa, Homo sapiens
MRDYDEVIAFLGEWGPFQRLIFFLLSASIIPNGFNGMSVVFLAGTPEHRCRVPDAANLSSAWRNNSVPLRLRDGREVPHSCSRYRLATIANFSALGLEPGRDVDLGQLEQESCLDGWEFSQDVYLSTVVTEWNLVCEDNWKVPLTTSLFFVGVLLGSFVSGQLSDRFGRKNVLFATMAVQTGFSFLQIFSISWEMFTVLFVIVGMGQISNYVVAFILGTEILGKSVRIIFSTLGVCTFFAVGYMLLPLFAYFIRDWRMLLLALTVPGVLCVPLWWFIPESPRWLISQRRFREAEDIIQKAAKMNNIAVPAVIFDSVEELNPLKQQKAFILDLFRTRNIAIMTIMSLLLWMLTSVGYFALSLDAPNLHGDAYLNCFLSALIEIPAYITAWLLLRTLPRRYIIAAVLFWGGGVLLFIQLVPVDYYFLSIGLVMLGKFGITSAFSMLYVFTAELYPTLVRNMAVGVTSTASRVGSIIAPYFVYLGAYNRMLPYIVMGSLTVLIGILTLFFPESLGMTLPETLEQMQKVKWFRSGKKTRDSMETEENPKVLITAF

SEQ ID NO: 64198 - protein, 551 aa, Homo sapiens
MGFDVLLDQVGGMGRFQICLIAFFCITNILLFPNIVLENFTAFTPSHRCWVPLLDNDTVSDNDTGTLSKDDLLRISIPLDSNLRPQKCQRFIHPQWQLLHLNGTFPNTNEPDTEPCVDGWVYDRSSFLSTIVTEWDLVCESQSLKSMVQSLFMAGSLLGGLIYGHLSDRVGRKIICKLCFLQLAISNTCAAFAPTFLVYCILRFLAGFSTMTILGNTFILSLEWTLPRSRSMTIMVLLCSYSVGQMLLGGLAFAIQDWHILQLTVSTPIIVLFLSSWKMVESARWLIINNQLDEGLKELRRVAHINGKKNTEETLTTELVRSTMKKELDAVRIKTSIFSLFRAPKLRMRVFGLCFVRFAITVPFYGLILNLQHLGSNVSLFQILCGAVTFTARCVSLLTLNHMGRRISQILFTFPVGLFILVNTFLPQEMQILRVVLATLGIGSVSAASNSASVHHNELVPTILRSTVAGINAVSGRTGAALAPLLMTLMAYSPHLPWISYGVFPILAVPVILLLPETRDLPLPNTIQDVENEKDSRNIKQEDTCMKVTQF

SEQ ID NO: 64199 - protein, 245 aa, Homo sapiens
MEVEEAFQAVGEMGIYQMYLCFLLAVLLQLYVATEAILIALVGATPSYHWDLAELLPNQSHGNQSAGEDQAFGDWLLTANGSEIHKHVHFSSSFTSIASEWFLIANRSYKVSAASSFFFSGVFVGVISFGQLSDRFGRKKVYLTGFALDILFAIANGFSPSYEFFAVTRFLVGMMNGGMSLVAFVLLNECVGTAYWALAGSIGGLFFAVGIAQYALLGYFIRSWRTLAILVNLQGTVVFLLSLVD

SEQ ID NO: 64200 - protein, 547 aa, Homo sapiens
MEVEEAFQAVGEMGIYQMYLCFLLAVLLQLYVATEAILIALVGATPSYHWDLAELLPNQSHGNQSAGEDQAFGDWLLTANGSEIHKHVHFSSSFTSIASEWFLIANRSYKVSAASSFFFSGVFVGVISFGQLSDRFGRKKVYLTGFALDILFAIANGFSPSYEFFAVTRFLVGMMNGGMSLVAFVLLNECVGTAYWALAGSIGGLFFAVGIAQYALLGYFIRSWRTLAILVNLQGTVVFLLSLFIPESPRWLYSQGRLSEAEEALYLIAKRNRKLKCTFSLTHPANRSCRETGSFLDLFRYRVLLGHTLILMFIWFVCSLVYYGLTLSAGDLGGSIYANLALSGLIEIPSYPLCIYLINQKWFGRKRTLSAFLCLGGLACLIVMFLPEKKDTGVFAVVNSHSLSLLGKLTISAAFNIVYIYTSELYPTVIRNVGLGTCSMFSRVGGIIAPFIPSLKYVQWSLPFIVFGATGLTSGLLSLLLPETLNSPLLETFSDLQVYSYRRLGEEALSLQALDPQQCVDKESSLGSESEEEEEFYDADEETQMIK

SEQ ID NO: 64201 - protein, 538 aa, Homo sapiens
MASDPIFTLAPPLHCHYGAFPPNASGWEQPPNASGVSVASAALAASAASRVATSTDPSCSGFAPPDFNHCLKDWDYNGLPVLTTNAIGQWDLVCDLGWQVILEQILFILGFASGYLFLGYPADRFGRRGIVLLTLGLVGPCGVGGAAAGSSTGVMALRFLLGFLLAGVDLGVYLMRLELCDPTQRLRVALAGELVGVGGHFLFLGLALVSKDWRFLQRMITAPCILFLFYGWPGLFLESARWLIVKRQIEEAQSVLRILAERNRPHGQMLGEEAQEALQDLENTCPLPATSSFSFASLLNYRNIWKNLLILGFTNFIAHAIRHCYQPVGGGGSPSDFYLCSLLASGTAALACVFLGVTVDRFGRRGILLLSMTLTGIASLVLLGLWDCEHPIFPTVWAQQGNPNRDLNEAAITTFSVLGLFSSQAAAILSTLLAAEVIPTTVRGRGLGLIMALGALGGLSGPAQRLHMGHGAFLQHVVLAACALLCILSIMLLPETKRKLLPEVLRDGELCRRPSLLRQPPPTRCDHVPLLATPNPAL

SEQ ID NO: 64202 - protein, 520 aa, Homo sapiens
MASDPIFTLAPPLHCHYGAFPPNASGWEQPPNASGVSVASAALAASAASRVATSTDPSCSGFAPPDFNHCLKDWDYNGLPVLTTNAIGQWDLVCDLGWQVILEQILFILGFASGYLFLGYPADRFGRRGIVLLTLGLVGPCGVGGAAAGSSTGVMALRFLLGFLLAGVDLGVYLMRLELCDPTQRLRVALAGELVGVGGHFLFLGLALVSKDWRFLQRMITAPCILFLFYGWPGLFLESARWLIVKRQIEEAQSVLRILAERNRPHGQMLGEEAQEALQDLENTCPLPATSSFSFASLLNYRNIWKNLLILGFTNFIAHAIRHCYQPVGGGGSPSDFYLCSLLASGTAALACVFLGVTVDRFGRRGILLLSMTLTGIASLVLLGLWDYLNEAAITTFSVLGLFSSQAAAILSTLLAAEVIPTTVRGRGLGLIMALGALGGLSGPAQRLHMGHGAFLQHVVLAACALLCILSIMLLPETKRKLLPEVLRDGELCRRPSLLRQPPPTRCDHVPLLATPNPAL

SEQ ID NO: 64203 - protein, 538 aa, Homo sapiens; identical to SEQ ID NO: 64201

SEQ ID NO: 64204 - protein, 361 aa, Homo sapiens
MAIDRRREAAGGGPGRQPAPAEENGSLPPGDAAASAPLGGRAGPGGGAEIQPLPPLHPGGGPHPSCCSAAAAPSLLLLDYDGSVLPFLGGLGGGYQKTLVLLTWIPALFIGFSQFSDSFLLDQPNFWCRGAGKGTELAGVTTTGRGGDMGNWTSLPTTPFATAPWEAAGNRSNSSGADGGDTPPLPSPPDKGDNASNCDCRAWDYGIRAGLVQNVVSKWDLVCDNAWKVHIAKFSLLVGLIFGYLITGCIADWVGRRPVLLFSIIFILIFGLTVALSVNVTMFSTLRFFEGFCLAGIILTLYALRIELCPPGKRFMITMVASFVAMAGQFLMPGLAALCRDWQVLQALIICPFLLMLLYWS

SEQ ID NO: 64205 - protein, 405 aa, Homo sapiens
MFSTLRFFEGFCLAGIILTLYALRIELCPPGKRFMITMVASFVAMAGQFLMPGLAALCRDWQVLQALIICPFLLMLLYWSIFPESLRWLMATQQFESAKRLILHFTQKNRMNPEGDIKGVIPELEKELSRRPKKVCIVKVVGTRNLWKNIVVLCVNSLTGYGIHHCFARSMMGHEVKVPLLENFYADYYTTASIALVSCLAMCVVVRFLGRRGGLLLFMILTALASLLQLGLLNLIGKYSQHPDSGMSDSVKDKFSIAFSIVGMFASHAVGSLSVFFCAEITPTVIRCGGLGLVLASAGFGMLTAPIIELHNQKGYFLHHIIFACCTLICIICILLLPESRDQNLPENISNGEHYTRQPLLPHKKGEQPLLLTNAELKDYSGLHDAAAAGDTLPEGATANGMKAM

SEQ ID NO: 64206 - protein, 686 aa, Homo sapiens
MAIDRRREAAGGGPGRQPAPAEENGSLPPGDAAASAPLGGRAGPGGGAEIQPLPPLHPGGGPHPSCCSAAAAPSLLLLDYDGSVLPFLGGLGGGYQKTLVLLTWIPALFIGFSQFSDSFLLDQPNFWCRGAGKGTELAGVTTTGRGGDMGNWTSLPTTPFATAPWEAAGNRSNSSGADGGDTPPLPSPPDKGDNASNCDCRAWDYGIRAGLVQNVVSKWDLVCDNAWKVHIAKFSLLVGLIFGYLITGCIADWVGRRPVLLFSIIFILIFGLTVALSVNVTMFSTLRFFEGFCLAGIILTLYALRIELCPPGKRFMITMVASFVAMAGQFLMPGLAALCRDWQVLQALIICPFLLMLLYWSIFPESLRWLMATQQFESAKRLILHFTQKNRMNPEGDIKGVIPELEKELSRRPKKVCIVKVVGTRNLWKNIVVLCVNSLTGYGIHHCFARSMMGHEVKVPLLENFYADYYTTASIALVSCLAMCVVVRFLGRRGGLLLFMILTALASLLQLGLLNLIGKYSQHPDSGMSDSVKDKFSIAFSIVGMFASHAVGSLSVFFCAEITPTVIRCGGLGLVLASAGFGMLTAPIIELHNQKGYFLHHIIFACCTLICIICILLLPESRDQNLPENISNGEHYTRQPLLPHKKGEQPLLLTNAELKDYSGLHDAAAAGDTLPEGATANGMKAM

SEQ ID NO: 64207 - protein, 405 aa, Homo sapiens; identical to SEQ ID NO: 64205

SEQ ID NO: 64208 - protein, 322 aa, Homo sapiens
MGFDVLLDQVGGMGRFQICLIAFFCITNILLFPNIVLENFTAFTPSHRCWVPLLDNDTVSDNDTGTLSKDDLLRISIPLDSNLRPQKCQRFIHPQWQLLHLNGTFPNTNEPDTEPCVDGWVYDRSSFLSTIVTEWDLVCESQSLKSMVQSLFMAGSLLGGLIYGHLSDRVGRKIICKLCFLQLAISNTCAAFAPTFLVYCILRFLAGFSTMTILGNTFILSLEWTLPRSRSMTIMVLLCSYSVGQMLLGGLAFAIQDWHILQLTVSTPIIVLFLSSWYEQSPHSLPVSEAMVDIERKILTPGICSVSGLVLSHDVHSTYCVT

SEQ ID NO: 64209 - protein, 259 aa, Homo sapiens
MRAQEDLEGRTQHETTRDPSTPLPTEPKFDMLYKIEDVPPWYLCILLGFQHYLTCFSGTIAVPFLLAEALCVGHDQHMVSQLIGTIFTCVGMFCTLFGMITAVGLSNLQFVDMNSSRNLFVLGFSMFFGLTLPNYLESNPGAINTGILEVDQILIVLLTTEMFVGGCLAFILDNTVPGSPEERGLIQWKAGAHANSDMSSSLKSYDFPIGMGIVKRITFLKYIPICPVFKGFSSSSKDQIAIPEDTPENTETASVCTKV

SEQ ID NO: 64210 - protein, 598 aa, Homo sapiens
MRAQEDLEGRTQHETTRDPSTPLPTEPKFDMLYKIEDVPPWYLCILLGFQHYLTCFSGTIAVPFLLAEALCVGHDQHMVSQLIGTIFTCVGITTLIQTTVGIRLPLFQASAFAFLVPAKAILALERWKCPPEEEIYGNWSLPLNTSHIWHPRIREVQGAIMVSSVVEVVIGLLGLPGALLNYIGPLTVTPTVSLIGLSVFQAAGDRAGSHWGISACSILLIILFSQYLRNLTFLLPVYRWGKGLTLLRIQIFKMFPIMLAIMTVWLLCYVLTLTDVLPTDPKAYGFQARTDARGDIMAIAPWIRIPYPCQWGLPTVTAAAVLGMFSATLAGIIESIGDYYACARLAGAPPPPVHAINRGIFTEGICCIIAGLLGTGNGSTSSSPNIGVLGITKVGSRRVVQYGAAIMLVLGTIGKFTALFSSLPDPILGGMFCTLFGMITAVGLSNLQFVDMNSSRNLFVLGFSMFFGLTLPNYLESNPGAINTGILEVDQILIVLLTTEMFVGGCLAFILDNTVPGSPEERGLIQWKAGAHANSDMSSSLKSYDFPIGMGIVKRITFLKYIPICPVFKGFSSSSKDQIAIPEDTPENTETASVCTKV

SEQ ID NO: 64211 - protein, 602 aa, Homo sapiens
MRAQEDLEGRTQHETTRDPSTPLPTEPKFDMLYKIEDVPPWYLCILLGFQHYLTCFSGTIAVPFLLAEALCVGHDQHMVSQLIGTIFTCVGITTLIQTTVGIRLPLFQASAFAFLVPAKAILALERWKCPPEEEIYGNWSLPLNTSHIWHPRIREVGLHVQGAIMVSSVVEVVIGLLGLPGALLNYIGPLTVTPTVSLIGLSVFQAAGDRAGSHWGISACSILLIILFSQYLRNLTFLLPVYRWGKGLTLLRIQIFKMFPIMLAIMTVWLLCYVLTLTDVLPTDPKAYGFQARTDARGDIMAIAPWIRIPYPCQWGLPTVTAAAVLGMFSATLAGIIESIGDYYACARLAGAPPPPVHAINRGIFTEGICCIIAGLLGTGNGSTSSSPNIGVLGITKVGSRRVVQYGAAIMLVLGTIGKFTALFSSLPDPILGGMFCTLFGMITAVGLSNLQFVDMNSSRNLFVLGFSMFFGLTLPNYLESNPGAINTGILEVDQILIVLLTTEMFVGGCLAFILDNTVPGSPEERGLIQWKAGAHANSDMSSSLKSYDFPIGMGIVKRITFLKYIPICPVFKGFSSSSKDQIAIPEDTPENTETASVCTKV

SEQ ID NO: 64212 - protein, 392 aa, Homo sapiens
MRAQEDLEGRTQHETTRDPSTPLPTEPKFDMLYKIEDVPPWYLCILLGFQHYLTCFSGTIAVPFLLAEALCVGHDQHMVSQLIGTIFTCVGITTLIQTTVGIRLPLFQASAFAFLVPAKAILALERWKCPPEEEIYGNWSLPLNTSHIWHPRIREVGLHVSIEEAGGYMGVRVAAEFGDLRRWSRSFVPASSSQVQGAIMVSSVVEVVIGLLGLPGALLNYIGPLTVTPTVSLIGLSVFQAAGDRAGSHWGISACSILLIILFSQYLRNLTFLLPCAQQSAPLWQASLSPSEITTPVPAWLVHHPLQYMLSTGASSPKAFAASSRGYWARATGPPRPVPTLASWELPRWAAGAWCSMVRLSCWSWAPSASSRPSSPRSLTPSWGACSALSLA

SEQ ID NO: 64213 - protein, 650 aa, Homo sapiens
MMGIGKNTTSKSMEAGSSTEGKYEDEAKHPAFFTLPVVINGGATSSGEQDNEDTELMAIYTTENGIAEKSSLAETLDSTGSLDPQRSDMIYTIEDVPPWYLCIFLGLQHYLTCFSGTIAVPFLLADAMCVGYDQWATSQLIGTIFFCVGITTLLQTTFGCRLPLFQASAFAFLAPARAILSLDKWKCNTTDVSVANGTAELLHTEHIWYPRIREIQGAIIMSSLIEVVIGLLGLPGALLKYIGPLTITPTVALIGLSGFQAAGERAGKHWGIAMLTIFLVLLFSQYARNVKFPLPIYKSKKGWTAYKLQLFKMFPIILAILVSWLLCFIFTVTDVFPPDSTKYGFYARTDARQGVLLVAPWFKVPYPFQWGLPTVSAAGVIGMLSAVVASIIESIGDYYACARLSCAPPPPIHAINRGIFVEGLSCVLDGIFGTGNGSTSSSPNIGVLGITKVGSRRVIQCGAALMLALGMIGKFSALFASLPDPVLGALFCTLFGMITAVGLSNLQFIDLNSSRNLFVLGFSIFFGLVLPSYLRQNPLVTGITGIDQVLNVLLTTAMFVGGCVAFILDNTIPGTPEERGIRKWKKGVGKGNKSLDGMESYNLPFGMNIIKKYRCFSYLPISPTFVGYTWKGLRKSDNSRSSDEDSQATG

SEQ ID NO: 64214 - protein, 650 aa, Homo sapiens; identical to SEQ ID NO: 64213

SEQ ID NO: 64215 - protein, 304 aa, Homo sapiens
  VARIANT 1: note = MOD_RES - Any amino acid
XGYDQWATSQLIGTIFFCVGITTLLQTTFGCRTIFLVLLFSQYARNVKFPLPIYKSKKGWTAYKLQLFKMFPIILAILVSWLLCFIFTVTDVFPPDSTKYGFYARTDARQGVLLVAPWFKVPYPFQWGLPTVSAAGVIGMLSAVVASIIESIGDYYACARLSCAPPPPIHAINRGIFVEGLSCVLDGIFGTGNGSTSSSPNIGVLGITKVGSRRVIQCGAALMLALGMIGKFSALFASLPDPVLGALFCTLFGMITAVGLSNLQFIDLNSSRNLFVLGFSIFFGLVLPSYLRQNPLVTGITGID

SEQ ID NO: 64216 - protein, 536 aa, Homo sapiens
MMGIGKNTTSKSMEAGSSTEGKYEDEAKHPAFFTLPVVINGGATSSGEQDNEDTELMAIYTTENGIAEKSSLAETLDSTGSLDPQRSDMIYTIEDVPPWYLCIFLGLQHYLTCFSGTIAVPFLLADAMCVGYDQWATSQLIGTIFFCVGITTLLQTTFGCRTIFLVLLFSQYARNVKFPLPIYKSKKGWTAYKLQLFKMFPIILAILVSWLLCFIFTVTDVFPPDSTKYGFYARTDARQGVLLVAPWFKVPYPFQWGLPTVSAAGVIGMLSAVVASIIESIGDYYACARLSCAPPPPIHAINRGIFVEGLSCVLDGIFGTGNGSTSSSPNIGVLGITKVGSRRVIQCGAALMLALGMIGKFSALFASLPDPVLGALFCTLFGMITAVGLSNLQFIDLNSSRNLFVLGFSIFFGLVLPSYLRQNPLVTGITGIDQVLNVLLTTAMFVGGCVAFILDNTIPGTPEERGIRKWKKGVGKGNKSLDGMESYNLPFGMNIIKKYRCFSYLPISPTFVGYTWKGLRKSDNSRSSDEDSQATG

SEQ ID NO: 64217 - protein, 1099 aa, Homo sapiens
MGKLIRMGPQERWLLRTKRLHWSRLLFLLGMLIIGSTYQHLRRPRGLSSLWAAVSSHQPIKLASRDLSSEEMMMMSSSPSKPSSEMGGKMLVPQASVGSDEATLSMTVENIPSMPKRTAKMIPTTTKNNYSPTAAGTERRKEDTPTSSRTLTYYTSTSSRQIVKKYTPTPRGEMKSYSPTQVREKVKYTPSPRGRRVGTYVPSTFMTMETSHAITPRTTVKDSDITATYKILETNSLKRIMEETTPTTLKGMFDSTPTFLTHEVEANVLTSPRSVMEKNNLFPPRRVESNSSAHPWGLVGKSNPKTPQGTVLLHTPATSEGQVTISTMTGSSPAETKAFTAAWSLRNPSPRTSVSAIKTAPAIVWRLAKKPSTAPSTSTTPTVRAKLTMQVHHCVVVKPTPAMLTTPSPSLTTALLPEELSPSPSVLPPSLPDLHPKGEYPPDLFSVEERRQGWVVLHVFGMMYVFVALAIVCDEYFVPALGVITDKLQISEDVAGATFMAAGGSAPELFTSLIGVFISHSNVGIGTIVGSAVFNILFVIGTCSLFSREILNLTWWPLFRDVSFYILDLIMLILFFLDSLIAWWESLLLLLAYAFYVFTMKWNKHIEVWVKEQLSRRPVAKVMALEDLSKPGDGAIAVDELQDNKKLKLPSLLTRGSSSTSLHNSTIRSTIYQLMLHSLDPLREVRLAKEKEEESLNQGARAQPQAKAESKPEEEEPAKLPAVTVTPAPVPDIKGDQKENPGGQEDVAEAESTGEMPGEEGETAGEGETEEKSGGETQPEGEGETETQGKGEECEDENEAEGKGDNEGEDEGEIHAEDGEMKGNEGETESQELSAENHGEAKNDEKGVEDGGGSDGGDSEEEEEEEEEQEEEEEEEEQEEEEEEEEEEEEKGNEEPLSLDWPETRQKQAIYLFLLPIVFPLWLTVPDVRRQESRKFFVFTFLGSIMWIAMFSYLMVWWAHQVGETIGISEEIMGLTILAAGTSIPDLITSVIVARKGLGDMAVSSSVGSNIFDITVGLPVPWLLFSLINGLQPVPVSSNGLFCAIVLLFLMLLFVISSIASCKWRMNKILGFTMFLLYFVFLIISVMLEDRIISCPVSV

SEQ ID NO: 64218 - protein, 1081 aa, Homo sapiens
MGKLIRMGPQERWLLRTKRLHWSRLLFLLGMLIIGSTYQHLRRPRGLSSLWAAVSSHQPIKLASRDLSSEEMMMMSSSPSKPSSEMGGKMLVPQASVGSDEATLSMTVENIPSMPKRTAKMIPTTTKNNYSPTAAGTERRKEDTPTSSRTLTYYTSTSSRQIVKKYTPTPRGEMKSYSPTQVREKVKYTPSPRGRRVGTYVPSTFMTMETSHAITPRTTVKDSDITATYKILETNSLKRIMEETTPTTLKGMFDSTPTFLTHEVEANVLTSPRSVMEKNNLFPPRRVESNSSAHPWGLVGKSNPKTPQGTVLLHTPATSEGQVTISTMTGSSPAETKAFTAAWSLRNPSPRTSVSAIKTAPAIVWRLAKKPSTAPSTSTTPTVRAKLTMQVHHCVVVKPTPAMLTTPSPSLTTALLPEELSPSPSVLPPSLPDLHPKGEYPPDLFSVEERRQGWVVLHVFGMMYVFVALAIVCDEYFVPALGVITDKLQISEDVAGATFMAAGGSAPELFTSLIGVFISHSNVGIGTIVGSAVFNILFVIGTCSLFSREILNLTWWPLFRDVSFYILDLIMLILFFLDSLIAWWESLLLLLAYAFYVFTMKWNKHIEVWVKEQLSRRPVAKVMALEDLSKLPSLLTRGSSSTSLHNSTIRSTIYQLMLHSLDPLREVRLAKEKEEESLNQGARAQPQAKAESKPEEEEPAKLPAVTVTPAPVPDIKGDQKENPGGQEDVAEAESTGEMPGEEGETAGEGETEEKSGGETQPEGEGETETQGKGEECEDENEAEGKGDNEGEDEGEIHAEDGEMKGNEGETESQELSAENHGEAKNDEKGVEDGGGSDGGDSEEEEEEEEEQEEEEEEEEQEEEEEEEEEEEEKGNEEPLSLDWPETRQKQAIYLFLLPIVFPLWLTVPDVRRQESRKFFVFTFLGSIMWIAMFSYLMVWWAHQVGETIGISEEIMGLTILAAGTSIPDLITSVIVARKGLGDMAVSSSVGSNIFDITVGLPVPWLLFSLINGLQPVPVSSNGLFCAIVLLFLMLLFVISSIASCKWRMNKILGFTMFLLYFVFLIISVMLEDRIISCPVSV

SEQ ID NO: 64219 - protein, 1069 aa, Homo sapiens
MGKLIRMGPQERWLLRTKRLHWSRLLFLLGMLIIGSTYQHLRRPRGLSSLWAAVSSHQPIKLASRDLSSEEMMMMSSSPSKPSSEMGGKMLVPQASVGSDEATLSMTVENIPSMPKRTAKMIPTTTKNNYSPTAAGTERRKEDTPTSSRTLTYYTSTSSRQIVKKYTPTPRGEMKSYSPTQVREKVKYTPSPRGRRVGTYVPSTFMTMETSHAITPRTTVKDSDITATYKILETNSLKRIMEETTPTTLKGMFDSTPTFLTHEVEANVLTSPRSVMEKNNLFPPRRVESNSSAHPWGLVGKSNPKTPQGTVLLHTPATSEGQVTISTMTGSSPAETKAFTAAWSLRNPSPRTSVSAIKTAPAIVWRLAKKPSTAPSTSTTPTVRAKLTMQVHHCVVVKPTPAMLTTPSPSLTTALLPEELSPSPSVLPPSLPDLHPKGEYPPDLFSVEERRQGWVVLHVFGMMYVFVALAIVCDEYFVPALGVITDKLQISEDVAGATFMAAGGSAPELFTSLIGVFISHSNVGIGTIVGSAVFNILFVIGTCSLFSREILNLTWWPLFRDVSFYILDLIMLILFFLDSLIAWWESLLLLLAYAFYVFTMKWNKHIEVWVKEQLSRRPVAKVMALEDLSKPGDGAIAVDELQDNKKLKLPSLLTRGSSSTSLHNSTIRSTIYQLMLHSLDPLREVRLAKEKEEESLNQGARAQPQAKAESKPEEEEPAKLPAVTVTPAPVPDIKGDQKENPGGQEDVAEAESTGEMPGEEGETAGEGETEEKSGGETQPEGEGETETQGKGEECEDENEAEGKGDNEGEDEGEIHAEDGEMKGNEGETESQELSAENHGEAKNDEKGVEDGGGSDGGDSEEEEEEEEEQEEEEEEEEQEEEEEEEEEEEEKGNEEPLSLDWPETRQKQAIYLFLLPIVFPLWLTVPDVRRQVGETIGISEEIMGLTILAAGTSIPDLITSVIVARKGLGDMAVSSSVGSNIFDITVGLPVPWLLFSLINGLQPVPVSSNGLFCAIVLLFLMLLFVISSIASCKWRMNKILGFTMFLLYFVFLIISVMLEDRIISCPVSV

SEQ ID NO: 64220 - protein, 1081 aa, Homo sapiens; identical to SEQ ID NO: 64218

SEQ ID NO: 64221 - protein, 644 aa, Homo sapiens
MDLQQSTTITSLEKWCLDESLSGCRRHYSVKKKLKLIRVLGLFMGLVAISTVSFSISAFSETDTQSTGEASVVSGPRVAQGYHQRTLLDLNDKILDYTPQPPLSKEGESENSTDHAQGDYPKDIFSLEERRKGAIILHVIGMIYMFIALAIVCDEFFVPSLTVITEKLGISDDVAGATFMAAGGSAPELFTSLIGVFIAHSNVGIGTIVGSAVFNILFVIGMCALFSREILNLTWWPLFRDVSFYIVDLIMLIIFFLDNVIMWWESLLLLTAYFCYVVFMKFNVQVEKWVKQMINRNKVVKVTAPEAQAKPSAARDKDEPTLPAKPRLQRGGSSASLHNSLMRNSIFQLMIHTLDPLAEGRFREKASILHKIAKKKCHVDENERQNGAANHVEKIELPNSTSTDVEMTPSSDASEPVQNGNLSHNIEGAEAQTADEEEDQPLSLAWPSETRKQVTFLIVFPIVFPLWITLPDVRKPSSRKFFPITFFGSITWIAVFSYLMVWWAHQVGETIGISEEIMGLTILAAGTSIPDLITSVIVARKGLGDMAVSSSVGSNIFDITVGLPLPWLLYTVIHRFQPVAVSSNGLFCAIVLLFIMLLFVILSIALCKWRMNKILGFIMFGLYFVFLVVSVLLEDRILTCPVSI

SEQ ID NO: 64222 - protein, 661 aa, Homo sapiens
MDLQQSTTITSLEKWCLDESLSGCRRHYSVKKKLKLIRVLGLFMGLVAISTVSFSISAFSETDTQSTGEASVVSGPRVAQGYHQRTLLDLNDKILDYTPQPPLSKEGESENSTDHAQGDYPKDIFSLEERRKGAIILHVIGMIYMFIALAIVCDEFFVPSLTVITEKLGISDDVAGATFMAAGGSAPELFTSLIGVFIAHSNVGIGTIVGSAVFNILFVIGMCALFSREILNLTWWPLFRDVSFYIVDLIMLIIFFLDNVIMWWESLLLLTAYFCYVVFMKFNVQVEKWVKQMINRNKVVKVTAPEAQAKPSAARDKDEPTLPAKPRLQRGGSSASLHNSLMRNSIFQLMIHTLDPLAEELGSYGKLKYYDTMTEEGRFREKASILHKIAKKKCHVDENERQNGAANHVEKIELPNSTSTDVEMTPSSDASEPVQNGNLSHNIEGAEAQTADEEEDQPLSLAWPSETRKQVTFLIVFPIVFPLWITLPDVRKPSSRKFFPITFFGSITWIAVFSYLMVWWAHQVGETIGISEEIMGLTILAAGTSIPDLITSVIVARKGLGDMAVSSSVGSNIFDITVGLPLPWLLYTVIHRFQPVAVSSNGLFCAIVLLFIMLLFVILSIALCKWRMNKILGFIMFGLYFVFLVVSVLLEDRILTCPVSI

SEQ ID NO: 64223 - protein, 644 aa, Homo sapiens
MRPSGDEDRARRRRRRRRRRDLLLSQLCFLASVALLLWSLSSLREQKELDLMDLVGEDRKWMMARKLMQVNDTLTSEDAGLRNSKNCTEPALHEFPNDIFTNEDRRQGAVVLHVLCAIYMFYALAIVCDDFFVPSLEKICERLHLSEDVAGATFMAAGSSAPELFTSVIGVFITKGDVGVGTIVGSAVFNILCIIGVCGLFAGQVVALSSWCLLRDSIYYTLSVIALIVFIYDEKVSWWESLVLVLMYLIYIVIMKYNACIHQCFERRTKGAGNMVNGLANNAEIDDSSNCDATVVLLKKANFHRKASVIMVDELLSAYPHQLSFSEAGLRIMITSHFPPKTRLSMASRMLINERQRLINSRAYTNGESEVAIKIPIKHTVENGTGPSSAPDRGVNGTRRDDVVAEAGNETENENEDNENDEEEEEDEDDDEGPYTPFDTPSGKLETVKWAFTWPLSFVLYFTVPNCNKPRWEKWFMVTFASSTLWIAAFSYMMVWMVTIIGYTLGIPDVIMGITFLAAGTSVPDCMASLIVARQGMGDMAVSNSIGSNVFDILIGLGLPWALQTLAVDYGSYIRLNSRGLIYSVGLLLASVFVTVFGVHLNKWQLDKKLGCGCLLLYGVFLCFSIMTEFNVFTFVNLPMCGDH

SEQ ID NO: 64224 - protein, 584 aa, Homo sapiens
MAGRRLNLRWALSVLCVLLMAETVSGTRGSSTGAHISPQFPASGVNQTPVVDCRKVCGLNVSDRCDFIRTNPDCHSDGGYLDYLEGIFCHFPPSLLPLAVTLYVSWLLYLFLILGVTAAKFFCPNLSAISTTLKLSHNVAGVTFLAFGNGAPDIFSALVAFSDPHTAGLALGALFGAGVLVTTVVAGGITILHPFMAASRPFFRDIVFYMVAVFLTFLMLFRGRVTLAWALGYLGLYVFYVVTVILCTWIYQRQRRGSLFCPMPVTPEILSDSEEDRVSSNTNSYDYGDEYRPLFFYQETTAQILVRALNPLDYMKWRRKSAYWKALKVFKLPVEFLLLLTVPVVDPDKDDQNWKRPLNCLHLVISPLVVVLTLQSGTYGVYEIGGLVPVWVVVVIAGTALASVTFFATSDSQPPRLHWLFAFLGFLTSALWINAAATEVVNILRSLGVVFRLSNTVLGLTLLAWGNSIGDAFSDFTLARQGYPRMAFSACFGGIIFNILVGVGLGCLLQISRSHTEVKLEPDGLLVWVLAGALGLSLVFSLVSVPLQCFQLSRVYGFCLLLFYLNFLVVALLTEFGVIHLKSM

SEQ ID NO: 64225 - protein, 528 aa, Homo sapiens
MAGRRLNLRWALSVLCVLLMAETVSGTRGSSTGAHISPQFPASGVNQTPVVDCRKVCGLNVSDRCDFIRTNPDCHSDGGYLDYLEGIFCHFPPSLLPLAVTLYVSWLLYLFLILGVTAAKFFCPNLSAISTTLKLSHNVAGVTFLAFGNGAPDIFSALVAFSDPHTAGLALGALFGYLGLYVFYVVTVILCTWIYQRQRRGSLFCPMPVTPEILSDSEEDRVSSNTNSYDYGDEYRPLFFYQETTAQILVRALNPLDYMKWRRKSAYWKALKVFKLPVEFLLLLTVPVVDPDKDDQNWKRPLNCLHLVISPLVVVLTLQSGTYGVYEIGGLVPVWVVVVIAGTALASVTFFATSDSQPPRLHWLFAFLGFLTSALWINAAATEVVNILRSLGVVFRLSNTVLGLTLLAWGNSIGDAFSDFTLARQGYPRMAFSACFGGIIFNILVGVGLGCLLQISRSHTEVKLEPDGLLVWVLAGALGLSLVFSLVSVPLQCFQLSRVYGFCLLLFYLNFLVVALLTEFGVIHLKSM

SEQ ID NO: 64226 - protein, 528 aa, Homo sapiens; identical to SEQ ID NO: 64225

SEQ ID NO: 64227 - protein, 131 aa, Homo sapiens
MAGRRLNLRWALSVLCVLLMAETVSGTRGSSTGAHISPQFPASGVNQTPVVDCRKVCGLNVSDRCDFIRTNPDCHSDGGYLDYLEGIFCHFPPSLLPLAVTLYVSWLLYLFLILGVTAAKFFCPNLSAIST

SEQ ID NO: 64228 - protein, 231 aa, Homo sapiens
MAGRRLNLRWALSVLCVLLMAETVSGTRGSSTGAHISPQFPASGVNQTPVVDCRKVCGLNVSDRCDFIRTNPDCHSDGGYLDYLEGIFCHFPPSLLPLAVTLYVSWLLYLFLILGVTAAKFFCPNLSAISTTLKLSHNVAGVTFLAFGNGAPDIFSALVAFSDPHTAGLALGALFGAGVLVTTVVAGGITILHPFMAASRPFFRDIVFYMVAVFLTFLMLFRGRVTLAWAL

SEQ ID NO: 64229 - protein, 103 aa, Homo sapiens
MAGRRLNLRWALSVLCVLLMAETVSGTRGSSTGAHISPQFPASGVNQTPVVDCRKVCGLNVSDRCDFIRTNPDCHSDGGYLDYLEGIFCHFPPSLLPLAVTLY

SEQ ID NO: 64230 - protein, 584 aa, Homo sapiens; identical to SEQ ID NO: 64224

SEQ ID NO: 64231 - protein, 301 aa, Homo sapiens
MADQPKPISPLKNLLAGGFGGVCLVFVGHPLDTVKVRLQTQPPSLPGQPPMYSGTFDCFRKTLFREGITGLYRGMAAPIIGVTPMFAVCFFGFGLGKKLQQKHPEDVLSYPQLFAAGMLSGVFTTGIMTPGERIKCLLQIQASSGESKYTGTLDCAKKLYQEFGIRGIYKGTVLTLMRDVPASGMYFMTYEWLKNIFTPEGKRVSELSAPRILVAGGIAGIFNWAVAIPPDVLKSRFQTAPPGKYPNGFRDVLRELIRDEGVTSLYKGFNAVMIRAFPANAACFLGFEVAMKFLNWATPNL

SEQ ID NO: 64232 - protein, 251 aa, Homo sapiens
MYSGTFDCFRKTLFREGITGLYRGMAAPIIGVTPMFAVCFFGFGLGKKLQQKHPEDVLSYPQLFAAGMLSGVFTTGIMTPGERIKCLLQIQASSGESKYTGTLDCAKKLYQEFGIRGIYKGTVLTLMRDVPASGMYFMTYEWLKNIFTPEGKRVSELSAPRILVAGGIAGIFNWAVAIPPDVLKSRFQTAPPGKYPNGFRDVLRELIRDEGVTSLYKGFNAVMIRAFPANAACFLGFEVAMKFLNWATPNL

SEQ ID NO: 64233 - protein, 315 aa, Homo sapiens
MTHQDLSITAKLINGGVAGLVGVTCVFPIDLAKTRLQNQHGKAMYKGMIDCLMKTARAEGFFGMYRGAAVNLTLVTPEKAIKLAANDFFRRLLMEDGMQRNLKMEMLAGCGAGMCQVVVTCPMEMLKIQLQDAGRLAVHHQGSASAPSTSRSYTTGSASTHRRPSATLIAWELLRTQGLAGLYRGLGATLLRDIPFSIIYFPLFANLNNLGFNELAGKASFAHSFVSGCVAGSIAAVAVTPLDVLKTRIQTLKKGLGEDMYSGITDCARKLWIQEGPSAFMKGAGCRALVIAPLFGIAQGVYFIGIGERILKCFD

SEQ ID NO: 64234 - protein, 315 aa, Homo sapiens; identical to SEQ ID NO: 64233

SEQ ID NO: 64235 - protein, 571 aa, Homo sapiens
MENVKEIFGQTIIHHHIPFNWDCEFIRLHFGHNRKKHLNYTEFTQFLQELQLEHARQAFALKDKSKSGMISGLDFSDIMVTIRSHMLTPFVEENLVSAAGGSISHQVSFSYFNAFNSLLNNMELVRKIYSTLAGTRKDVEVTKEEFAQSAIRYGQVTPLEIDILYQLADLYNASGRLTLADIERIAPLAEGALPYNLAELQRQQSPGLGRPIWLQIAESAYRFTLGSVAGAVGATAVYPIDLVKTRMQNQRGSGSVVGELMYKNSFDCFKKVLRYEGFFGLYRGLIPQLIGVAPEKAIKLTVNDFVRDKFTRRDGSVPLPAEVLAGGCAGGSQVIFTNPLEIVKIRLQVAGEITTGPRVSALNVLRDLGIFGLYKGAKACFLRDIPFSAIYFPVYAHCKLLLADENGHVGGLNLLAAGAMAGVPAASLVTPADVIKTRLQVAARAGQTTYSGVIDCFRKILREEGPSAFWKGTAARVFRSSPQFGVTLVTYELLQRWFYIDFGGLKPAGSEPTPKSRIADLPPANPDHIGGYRLATATFAGIENKFGLYLPKFKSPSVAVVQPKAAVAATQ

SEQ ID NO: 64236 - protein, 678 aa, Homo sapiens
MAVKVQTTKRGDPHELRNIFLQYASTEVDGERYMTPEDFVQRYLGLYNDPNSNPKIVQLLAGVADQTKDGLISYQEFLAFESVLCAPDSMFIVAFQLFDKSGNGEVTFENVKEIFGQTIIHHHIPFNWDCEFIRLHFGHNRKKHLNYTEFTQFLQELQLEHARQAFALKDKSKSGMISGLDFSDIMVTIRSHMLTPFVEENLVSAAGGSISHQVSFSYFNAFNSLLNNMELVRKIYSTLAGTRKDVEVTKEEFAQSAIRYGQVTPLEIDILYQLADLYNASGRLTLADIERIAPLAEGALPYNLAELQRQQSPGLGRPIWLQIAESAYRFTLGSVAGAVGATAVYPIDLVKTRMQNQRGSGSVVGELMYKNSFDCFKKVLRYEGFFGLYRGLIPQLIGVAPEKAIKLTVNDFVRDKFTRRDGSVPLPAEVLAGGCAGGSQVIFTNPLEIVKIRLQVAGEITTGPRVSALNVLRDLGIFGLYKGAKACFLRDIPFSAIYFPVYAHCKLLLADENGHVGGLNLLAAGAMAGVPAASLVTPADVIKTRLQVAARAGQTTYSGVIDCFRKILREEGPSAFWKGTAARVFRSSPQFGVTLVTYELLQRWFYIDFGGLKPAGSEPTPKSRIADLPPANPDHIGGYRLATATFAGIENKFGLYLPKFKSPSVAVVQPKAAVAATQ

SEQ ID NO: 64237 - protein, 325 aa, Homo sapiens
MGIFPGIILIFLRVKFATAAVIVSGHQKSTTVSHEMSGLNWKPFVYGGLASIVAEFGTFPVDLTKTRLQVQGQSIDARFKEIKYRGMFHALFRICKEEGVLALYSGIAPALLRQASYGTIKIGIYQSLKRLFVERLEDETLLINMICGVVSGVISSTIANPTDVLKIRMQAQGSLFQGSMIGSFIDIYQQEGTRGLWRGVVPTAQRAAIVVGVELPVYDITKKHLILSGMMGDTILTHFVSSFTCGLAGALASNPVDVVRTRMMNQRAIVGHVDLYKGTVDGILKMWKHEGFFALYKGFWPNWLRLGPWNIIFFITYEQLKRLQI

SEQ ID NO: 64238 - protein, 353 aa, Homo sapiens
MGIFPGIILIFLRVKFATAAVIHQKSTTVSHEMSGLNWKPFVYGGLASIVAEFGTFPVDLTKTRLQVQGQSIDARFKEIKYRGMFHALFRICKEEGVLALYSGIAPALLRQASYGTIKIGIYQSLKRLFVERLEDETLLINMICGVVSGVISSTIANPTDVLKIRMQAQGSLFQGSMIGSFIDIYQQEGTRGLWRCLCSKAVTGCVLWLMPVIPALWEANAGGSLEGVVPTAQRAAIVVGVELPVYDITKKHLILSGMMGDTILTHFVSSFTCGLAGALASNPVDVVRTRMMNQRAIVGHVDLYKGTVDGILKMWKHEGFFALYKGFWPNWLRLGPWNIIFFITYEQLKRLQI

SEQ ID NO: 64239 - protein, 322 aa, Homo sapiens
MGIFPGIILIFLRVKFATAAVIHQKSTTVSHEMSGLNWKPFVYGGLASIVAEFGTFPVDLTKTRLQVQGQSIDARFKEIKYRGMFHALFRICKEEGVLALYSGIAPALLRQASYGTIKIGIYQSLKRLFVERLEDETLLINMICGVVSGVISSTIANPTDVLKIRMQAQGSLFQGSMIGSFIDIYQQEGTRGLWRGVVPTAQRAAIVVGVELPVYDITKKHLILSGMMGDTILTHFVSSFTCGLAGALASNPVDVVRTRMMNQRAIVGHVDLYKGTVDGILKMWKHEGFFALYKGFWPNWLRLGPWNIIFFITYEQLKRLQI

SEQ ID NO: 64240 - protein, 198 aa, Homo sapiens
MGIFPGIILIFLRVKFATAAVIVSGHQKSTTVSHEMSGLNWKPFVYGGLASIVAEFGTFPVDLTKTRLQVQGQSIDARFKEIKYRGMFHALFRICKEEGVLALYSGIAPALLRQASYGTIKIGIYQSLKRLFVERLEDETLLINMICGVVSGVISSTIANPTDVLKIRMQAQGSLFQGSMIGSFIDIYQQEGTRGLWR

SEQ ID NO: 64241 - protein, 205 aa, Homo sapiens
MSGLNWKPFVYGGLASIVAEFGTFPVDLTKTRLQVQGQSIDARFKEIKYRGMFHALFRICKEEGVLALYSGIAPALLRQASYGTIKIGIYQSLKRLFVERLEDETLLINMICGVVSGVISSTIANPTDVLKIRMQAQGSLFQGSMIGSFIDIYQQEGTRGLWRGVVPTAQRAAIVVGVELPVYDITKKHLILSGMMGDTILTHFV

SEQ ID NO: 64242 - protein, 240 aa, Homo sapiens
MGIFPGIILIFLRVKFATAAVIVSGHQKSTTVSHEMSGLNWKPFVYGGLASIVAEFGTFPVDLTKTRLQVQGQSIDARFKEIKYRGMFHALFRICKEEGVLALYSGIAPALLRQASYGTIKIGIYQSLKRLFVERLEDETLLINMICGVVSGVISSTIANPTDVLKIRMQAQGSLFQGSMIGSFIDIYQQEGTRGLWRGVVPTAQRAAIVVGVELPVYDITKKHLILSGMMGDTILTHFV

SEQ ID NO: 64243 - protein, 323 aa, Homo sapiens
MADKQISLPAKLINGGIAGLIGVTCVFPIDLAKTRLQNQQNGQRVYTSMSDCLIKTVRSEGYFGMYRGAAVNLTLVTPEKAIKLAANDFFRHQLSKDGQKLTLLKEMLAGCGAGTCQVIVTTPMEMLKIQLQDAGRIAAQRKILAAQGQLSAQGGAQPSVEAPAAPRPTATQLTRDLLRSRGIAGLYKGLGATLLRDVPFSVVYFPLFANLNQLGRPASEEKSPFYVSFLAGCVAGSAAAVAVNPCDVVKTRLQSLQRGVNEDTYSGILDCARKILRHEGPSAFLKGAYCRALVIAPLFGIAQVVYFLGIAESLLGLLQDPQA

SEQ ID NO: 64244 - protein, 110 aa, Homo sapiens
MADKQISLPAKLINGGIAGLIGVTCVFPIDLAKTRLQNQQNGQRVYTSMSDCLIKTVRSEGYFGMYRGAAVNLTLVTPEKAIKLAANDFFRHQLSKDGQKLTLLKEMLAG

SEQ ID NO: 64245 - protein, 127 aa, Homo sapiens
MADKQISLPAKLINGGIAGLIGVTCVFPIDLAKTRLQNQQNGQRVYTSMSDCLIKTVRSEGYFGMYRGAAVNLTLVTPEKAIKLAANDFFRHQLSKDGQKLTLLKEMLAGCGAGTCQVIVTTPMEML

SEQ ID NO: 64246 - protein, 119 aa, Homo sapiens
MADKQISLPAKLINGGIAGLIGVTCVFPIDLAKTRLQNQQNGQRVYTSMSDCLIKTVRSEGYFGMYRGAAVNLTLVTPEKAIKLAANDFFRHQLSKDGQKLTLLKEMLAGCGAGTCQVI

SEQ ID NO: 64247 - protein, 123 aa, Homo sapiens
MADKQISLPAKLINGGIAGLIGVTCVFPIDLAKTRLQNQQNGQRVYTSMSDCLIKTVRSEGYFGMYRGAAVNLTLVTPEKAIKLAANDFFRHQLSKDGQKLTLLKEMLAGCGAGTCQVIVTTP

SEQ ID NO: 64248 - protein, 113 aa, Homo sapiens
MADKQISLPAKLINGGIAGLIGVTCVFPIDLAKTRLQNQQNGQRVYTSMSDCLIKTVRSEGYFGMYRGAAVNLTLVTPEKAIKLAANDFFRHQLSKDGQKLTLLKEMLAGCGA

SEQ ID NO: 64249 - protein, 78 aa, Homo sapiens
MADKQISLPAKLINGGIAGLIGVTCVFPIDLAKTRLQNQQNGQRVYTSMSDCLIKTVRSEGYFGMYRGAAVNLTLVTP

SEQ ID NO: 64250 - protein, 59 aa, Homo sapiens
MADKQISLPAKLINGGIAGLIGVTCVFPIDLAKTRLQNQQNGQRVYTSMSDCLIKTVRS

SEQ ID NO: 64251 - protein, 323 aa, Homo sapiens; identical to SEQ ID NO: 64243

SEQ ID NO: 64252 - protein, 114 aa, Homo sapiens
MADKQISLPAKLINGGIAGLIGVTCVFPIDLAKTRLQNQQNGQRVYTSMSDCLIKTVRSEGYFGMYRGAAVNLTLVTPEKAIKLAANDFFRHQLSKDGQKLTLLKEMLAGCGAG

SEQ ID NO: 64253 - protein, 78 aa, Homo sapiens; identical to SEQ ID NO: 64249

SEQ ID NO: 64254 - protein, 106 aa, Homo sapiens
MADKQISLPAKLINGGIAGLIGVTCVFPIDLAKTRLQNQQNGQRVYTSMSDCLIKTVRSEGYFGMYRGAAVNLTLVTPEKAIKLAANDFFRHQLSKDGQKLTLLKE

SEQ ID NO: 64255 - protein, 135 aa, Homo sapiens
MADKQISLPAKLINGGIAGLIGVTCVFPIDLAKTRLQNQQNGQRVYTSMSDCLIKTVRSEGYFGMYRGAAVNLTLVTPEKAIKLAANDFFRHQLSKDGQKLTLLKEMLAGCGAGTCQVIVTTPMEMLKIQLQDAG

SEQ ID NO: 64256 - protein, 315 aa, Homo sapiens
MHREPAKKKAEKRLFDASSFGKDLLAGGVAAAVSKTAVAPIERVKLLLQVQASSKQISPEARYKGMVDCLVRIPREQGFFSFWRGNLANVIRYFPTQALNFAFKDKYKQLFMSGVNKEKQFWRWFLANLASGGAAGATSLCVVYPLDFARTRLGVDIGKGPEERQFKGLGDCIMKIAKSDGIAGLYQGFGVSVQGIIVYRASYFGAYDTVKGLLPKPKKTPFLVSFFIAQVVTTCSGILSYPFDTVRRRMMMQSGEAKRQYKGTLDCFVKIYQHEGISSFFRGAFSNVLRGTGGALVLVLYDKIKEFFHIDIGGR

SEQ ID NO: 64257 - protein, 298 aa, Homo sapiens
MGDHAWSFLKDFLAGGVAAAVSKTAVAPIERVKLLLQVQHASKQISAEKQYKGIIDCVVRIPKEQGFLSFWRGNLANVIRYFPTQALNFAFKDKYKQLFLGGVDRHKQFWRYFAGNLASGGAAGATSLCFVYPLDFARTRLAADVGKGAAQREFHGLGDCIIKIFKSDGLRGLYQGFNVSVQGIIIYRAAYFGVYDTAKGMLPDPKNVHIFVSWMIAQSVTAVAGLVSYPFDTVRRRMMMQSGRKGADIMYTGTVDCWRKIAKDEGAKAFFKGAWSNVLRGMGGAFVLVLYDEIKKYV

SEQ ID NO: 64258 - protein, 298 aa, Homo sapiens
MTDAAVSFAKDFLAGGVAAAISKTAVAPIERVKLLLQVQHASKQITADKQYKGIIDCVVRIPKEQGVLSFWRGNLANVIRYFPTQALNFAFKDKYKQIFLGGVDKRTQFWLYFAGNLASGGAAGATSLCFVYPLDFARTRLAADVGKAGAEREFRGLGDCLVKIYKSDGIKGLYQGFNVSVQGIIIYRAAYFGIYDTAKGMLPDPKNTHIVISWMIAQTVTAVAGLTSYPFDTVRRRMMMQSGRKGTDIMYTGTLDCWRKIARDEGGKAFFKGAWSNVLRGMGGAFVLVLYDEIKKYT

SEQ ID NO: 64259 - protein, 298 aa, Homo sapiens
MTEQAISFAKDFLAGGIAAAISKTAVAPIERVKLLLQVQHASKQIAADKQYKGIVDCIVRIPKEQGVLSFWRGNLANVIRYFPTQALNFAFKDKYKQIFLGGVDKHTQFWRYFAGNLASGGAAGATSLCFVYPLDFARTRLAADVGKSGTEREFRGLGDCLVKITKSDGIRGLYQGFSVSVQGIIIYRAAYFGVYDTAKGMLPDPKNTHIVVSWMIAQTVTAVAGVVSYPFDTVRRRMMMQSGRKGADIMYTGTVDCWRKIFRDEGGKAFFKGAWSNVLRGMGGAFVLVLYDELKKVI

SEQ ID NO: 64260 - protein, 158 aa, Homo sapiens
MTEQAISFAKDFLAGGIAAAISKTAVAPIERVKLLLQVQHASKQIAADKQYKGIVDCIVRIPKEQGVLSFWRGNLANVIRYFPTQALNFAFKDKYKQIFLGGVDKHTQFWRYFAGNLASGGAAGATSLCFVYPLDFARTRLAADVGKSGTEREFRGLG

SEQ ID NO: 64261 - protein, 311 aa, Homo sapiens
MPAPRAPRALAAAAPASGKAKLTHPGKAILAGGLAGGIEICITFPTEYVKTQLQLDERSHPPRYRGIGDCVRQTVRSHGVLGLYRGLSSLLYGSIPKAAVRFGMFEFLSNHMRDAQGRLDSTRGLLCGLGAGVAEAVVVVCPMETIKVKFIHDQTSPNPKYRGFFHGVREIVREQGLKGTYQGLTATVLKQGSNQAIRFFVMTSLRNWYRGDNPNKPMNPLITGVFGAIAGAASVFGNTPLDVIKTRMQGLEAHKYRNTWDCGLQILKKEGLKAFYKGTVPRLGRVCLDVAIVFVIYDEVVKLLNKVWKTD

SEQ ID NO: 64262 - protein, 208 aa, Homo sapiens
MFEFLSNHMRDAQGRLDSTRGLLCGLGAGVAEAVVVVCPMETIKVKFIHDQTSPNPKYRGFFHGVREIVREQGLKGTYQGLTATVLKQGSNQAIRFFVMTSLRNWYRGDNPNKPMNPLITGVFGAIAGAASVFGNTPLDVIKTRMQGLEAHKYRNTWDCGLQILKKEGLKAFYKGTVPRLGRVCLDVAIVFVIYDEVVKLLNKVWKTD

SEQ ID NO: 64263 - protein, 332 aa, Homo sapiens
MAAATAAAALAAADPPPAMPQAAGAGGPTTRRDFYWLRSFLAGGIAGCCAKTTVAPLDRVKVLLQAHNHHYKHLGVFSALRAVPQKEGFLGLYKGNGAMMIRIFPYGAIQFMAFEHYKTLITTKLGISGHVHRLMAGSMAGMTAVICTYPLDMVRVRLAFQVKGEHSYTGIIHAFKTIYAKEGGFFGFYRGLMPTILGMAPYAGVSFFTFGTLKSVGLSHAPTLLGRPSSDNPNVLVLKTHVNLLCGGVAGAIAQTISYPFDVTRRRMQLGTVLPEFEKCLTMRDTMKYVYGHHGIRKGLYRGLSLNYIRCIPSQAVAFTTYELMKQFFHLN

SEQ ID NO: 64264 - protein, 234 aa, Homo sapiens
MMIRIFPYGAIQFMAFEHYKTLITTKLGISGHVHRLMAGSMAGMTAVICTYPLDMVRVRLAFQVKGEHSYTGIIHAFKTIYAKEGGFFGFYRGLMPTILGMAPYAGVSFFTFGTLKSVGLSHAPTLLGRPSSDNPNVLVLKTHVNLLCGGVAGAIAQTISYPFDVTRRRMQLGTVLPEFEKCLTMRDTMKYVYGHHGIRKGLYRGLSLNYIRCIPSQAVAFTTYELMKQFFHLN

SEQ ID NO: 64265 - protein, 301 aa, Homo sapiens
MKSNPAIQAAIDLTAGAAGGTACVLTGQPFDTMKVKMQTFPDLYRGLTDCCLKTYSQVGFRGFYKGTSPALIANIAENSVLFMCYGFCQQVVRKVAGLDKQAKLSDLQNAAAGSFASAFAALVLCPTELVKCRLQTMYEMETSGKIAKSQNTVWSVIKSILRKDGPLGFYHGLSSTLLREVPGYFFFFGGYELSRSFFASGRSKDELGPVPLMLSGGVGGICLWLAVYPVDCIKSRIQVLSMSGKQAGFIRTFINVVKNEGITALYSGLKPTMIRAFPANGALFLAYEYSRKLMMNQLEAY

SEQ ID NO: 64266 - protein, 133 aa, Homo sapiens
MKSNPAIQAAIDLTAGAAGGTACVLTGQPFDTMKVKMQTFPDLYRGLTDCCLKTYSQVGFRGFYKGTSPALIANIAENSVLFMCYGFCQQVVRKVAGLDKQAKLSTVWSVIKSILRKDGPLGFYHGLSSTLLR

SEQ ID NO: 64267 - protein, 133 aa, Homo sapiens; identical to SEQ ID NO: 64266

SEQ ID NO: 64268 - protein, 301 aa, Homo sapiens; identical to SEQ ID NO: 64265

SEQ ID NO: 64269 - protein, 241 aa, Homo sapiens
MKSNPAIQAAIDLTAGAAGGTACVLTGQPFDTMKVAGLDKQAKLSDLQNAAAGSFASAFAALVLCPTELVKCRLQTMYEMETSGKIAKSQNTVWSVIKSILRKDGPLGFYHGLSSTLLREVPGYFFFFGGYELSRSFFASGRSKDELGPVPLMLSGGVGGICLWLAVYPVDCIKSRIQVLSMSGKQAGFIRTFINVVKNEGITALYSGLKPTMIRAFPANGALFLAYEYSRKLMMNQLEAY

SEQ ID NO: 64270 - protein, 301 aa, Homo sapiens
MKSGPGIQAAIDLTAGAAGGTACVLTGQPFDTIKVKMQTFPDLYKGLTDCFLKTYAQVGLRGFYKGTGPALMAYVAENSVLFMCYGFCQQFVRKVAGMDKQAKLSDLQTAAAGSFASAFAALALCPTELVKCRLQTMYEMEMSGKIAKSHNTIWSVVKGILKKDGPLGFYHGLSSTLLQEVPGYFFFFGGYELSRSFFASGRSKDELGPVHLMLSGGVAGICLWLVVFPVDCIKSRIQVLSMYGKQAGFIGTLLSVVRNEGIVALYSGLKATMIRAIPANGALFVAYEYSRKMMMKQLEAY

SEQ ID NO: 64271 - protein, 314 aa, Homo sapiens
MAATASAGAGGIDGKPRTSPKSVKFLFGGLAGMGATVFVQPLDLVKNRMQLSGEGAKTREYKTSFHALTSILKAEGLRGIYTGLSAGLLRQATYTTTRLGIYTVLFERLTGADGTPPGFLLKAVIGMTAGATGAFVGTPAEVALIRMTADGRLPADQRRGYKNVFNALIRITREEGVLTLWRGCIPTMARAVVVNAAQLASYSQSKQFLLDSGYFSDNILCHFCASMISGLVTTAASMPVDIAKTRIQNMRMIDGKPEYKNGLDVLFKVVRYEGFFSLWKGFTPYYARLGPHTVLTFIFLEQMNKAYKRLFLSG

SEQ ID NO: 64272 - protein, 263 aa, Homo sapiens
MAATASAGAGGIDGKPRTSPKSVKFLFGGLAGLSAGLLRQATYTTTRLGIYTVLFERLTGADGTPPGFLLKAVIGMTAGATGAFVGTPAEVALIRMTADGRLPADQRRGYKNVFNALIRITREEGVLTLWRGCIPTMARAVVVNAAQLASYSQSKQFLLDSGYFSDNILCHFCASMISGLVTTAASMPVDIAKTRIQNMRMIDGKPEYKNGLDVLFKVVRYEGFFSLWKGFTPYYARLGPHTVLTFIFLEQMNKAYKRLFLSG

SEQ ID NO: 64273 - protein, 225 aa, Homo sapiens
MEYWYVALKQQSLKADILPSLFLSIFLVKGVVNVLLTTPLWVVNTRLKLQGAKFRNEDIVPTNYKGIIDAFHQIIRDEGISALWNGTFPSLLLVFNPAIQFMFYEGLKRQLLKKRMKLSSLDVFIIGAVAKAIATTVTYPLQTVQSILRFGRHRLNPENRTLGSLRNILYLLHQRVRRFGIMGLYKGLEAKLLQTVLTAALMFLVYEKLTAATFTVMGLKRAHQH

SEQ ID NO: 64274 - protein, 92 aa, Homo sapiens
MGSVTAMTVFFPLDTARLRLQVDEKRKSKTTHMVLLEIIKEEGLLAPYRGWFPVISSLCCSNFVYFYTFNSLKALWVKGQHSTTGKDLVVGF

SEQ ID NO: 64275 - protein, 307 aa, Homo sapiens
MASVLSYESLVHAVAGAVGSVTAMTVFFPLDTARLRLQVDEKRKSKTTHMVLLEIIKEEGLLAPYRGWFPVISSLCCSNFVYFYTFNSLKALWVKGQHSTTGKDLVVGFVAGVVNVLLTTPLWVVNTRLKLQGAKFRNEDIVPTNYKGIIDAFHQIIRDEGISALWNGTFPSLLLVFNPAIQFMFYEGLKRQLLKKRMKLSSLDVFIIGAVAKAIATTVTYPLQTVQSILRFGRHRLNPENRTLGSLRNILYLLHQRVRRFGIMGLYKGLEAKLLQTVLTAALMFLVYEKLTAATFTVMGLKRAHQH

SEQ ID NO: 64276 - protein, 234 aa, Homo sapiens
MASVLSYESLVHAVAGAVGSVTAMTVFFPLDTARLRLQGVVNVLLTTPLWVVNTRLKLQGAKFRNEDIVPTNYKGIIDAFHQIIRDEGISALWNGTFPSLLLVFNPAIQFMFYEGLKRQLLKKRMKLSSLDVFIIGAVAKAIATTVTYPLQTVQSILRFGRHRLNPENRTLGSLRNILYLLHQRVRRFGIMGLYKGLEAKLLQTVLTAALMFLVYEKLTAATFTVMGLKRAHQH

SEQ ID NO: 64277 - protein, 270 aa, Homo sapiens
MIDEKRKSKTTHMVLLEIIKEEGLLAPYRGWFPVISSLCCSNFVYFYTFNSLKALWVKGQHSTTGKDLVVGFVAGVVNVLLTTPLWVVNTRLKLQGAKFRNEDIVPTNYKGIIDAFHQIIRDEGISALWNGTFPSLLLVFNPAIQFMFYEGLKRQLLKKRMKLSSLDVFIIGAVAKAIATTVTYPLQTVQSILRFGRHRLNPENRTLGSLRNILYLLHQRVRRFGIMGLYKGLEAKLLQTVLTAALMFLVYEKLTAATFTVMGLKRAHQH

SEQ ID NO: 64278 - protein, 361 aa, Homo sapiens
MFSSVAHLARANPFNTPHLQLVHDGLGDLRSSSPGPTGQPRRPRNLAAAAVEEYSCEFGSAKYYALCGFGGVLSCGLTHTAVVPLDLVKCRMQVDPQKYKGIFNGFSVTLKEDGVRGLAKGWAPTFLGYSMQGLCKFGFYEVFKVLYSNMLGEENTYLWRTSLYLAASASAEFFADIALAPMEAAKVRIQTQPGYANTLRDAAPKMYKEEGLKAFYKGVAPLWMRQIPYTMMKFACFERTVEALYKFVVPKPRSECSKPEQLVVTFVAGYIAGVFCAIVSHPADSVVSVLNKEKGSSASLVLKRLGFKGVWKGLFARIIMIGTLTALQWFIYDSVKVYFRLPRPPPPEMPESLKKKLGLTQ

SEQ ID NO: 64279 - protein, 362 aa, Homo sapiens
MFSSVAHLARANPFNTPHLQLVHDGLGDLRSSSPGPTGQPRRPRNLAAAAVEEQYSCDYGSGRFFILCGLGGIISCGTTHTALVPLDLVKCRMQVDPQKYKGIFNGFSVTLKEDGVRGLAKGWAPTFLGYSMQGLCKFGFYEVFKVLYSNMLGEENTYLWRTSLYLAASASAEFFADIALAPMEAAKVRIQTQPGYANTLRDAAPKMYKEEGLKAFYKGVAPLWMRQIPYTMMKFACFERTVEALYKFVVPKPRSECSKPEQLVVTFVAGYIAGVFCAIVSHPADSVVSVLNKEKGSSASLVLKRLGFKGVWKGLFARIIMIGTLTALQWFIYDSVKVYFRLPRPPPPEMPESLKKKLGLTQ

SEQ ID NO: 64280 - protein, 361 aa, Homo sapiens; identical to SEQ ID NO: 64278

SEQ ID NO: 64281 - protein, 361 aa, Homo sapiens; identical to SEQ ID NO: 64278

SEQ ID NO: 64282 - protein, 362 aa, Homo sapiens; identical to SEQ ID NO: 64279

SEQ ID NO: 64283 - protein, 361 aa, Homo sapiens; identical to SEQ ID NO: 64278

SEQ ID NO: 64284 - protein, 298 aa, Homo sapiens
MSAKPEVSLVREASRQIVAGGSAGLVEICLMHPLDVVKTRFQIQRCATDPNSYKSLVDSFRMIFQMEGLFGFYKGILPPILAETPKRAVKFFTFEQYKKLLGYVSLSPALTFAIAGLGSGLTEAIVVNPFEVVKVGLQANRNTFAEQPSTVGYARQIIKKEGWGLQGLNKGLTATLGRHGVFNMVYFGFYYNVKNMIPVNKDPILEFWRKFGIGLLSGTIASVINIPFDVAKSRIQGPQPVPGEIKYRTCFKTMATVYQEEGILALYKGLLPKIMRLGPGGAVMLLVYEYTYSWLQEN

SEQ ID NO: 64285 - protein, 299 aa, Homo sapiens
MSAKPEVSLVREASRQIVAGGSAGLVEICLMHPLDVVKTRFQIQRCATDPNSYKSLVDSFRMIFQMEGLFGFYKGILPPILAETPKRAVKFFTFEQYKKLLGYVSLSPALTFAIAGLGSGLTEAIVVNPFEVVKVGLQANRNTFAEQPSTVGYARQIIKKEGWGLQGLNKGLTATLGRHGVFNMVYFGFYYNVKNMIPVNKDPILEFWRKFGIGLLSGTIASVINIPFDVAKSRIQGPQPVPGEIKYRTCFKTMATVYQEEGILALYKGLLPKIMRLGPGGAVMLLVYEYTYSWLQENW

SEQ ID NO: 64286 - protein, 320 aa, Homo sapiens
MVGYDPKPDGRNNTKFQVAVAGSVSGLVTRALISPFDVIKIRFQLQHERLSRSDPSAKYHGILQASRQILQEEGPTAFWKGHVPAQILSIGYGAVQFLSFEMLTELVHRGSVYDAREFSVHFVCGGLAACMATLTVHPVDVLRTRFAAQGEPKVYNTLRHAVGTMYRSEGPQVFYKGLAPTLIAIFPYAGLQFSCYSSLKHLYKWAIPAEGKKNENLQNLLCGSGAGVISKTLTYPLDLFKKRLQVGGFEHARAAFGQVRRYKGLMDCAKQVLQKEGALGFFKGLSPSLLKAALSTGFMFFSYEFFCNVFHCMNRTASQR

SEQ ID NO: 64287 - protein, 320 aa, Homo sapiens; identical to SEQ ID NO: 64286

SEQ ID NO: 64288 - protein, 263 aa, Homo sapiens
MVGYDPKPDGRNNTKFQVAVAGSVSGLVTRALISPFDVIKIRFQLQHERLSRSDPSAKYHGILQASRQILQEEGPTAFWKGHVPAQILSIGYGAVQVYNTLRHAVGTMYRSEGPQVFYKGLAPTLIAIFPYAGLQFSCYSSLKHLYKWAIPAEGKKNENLQNLLCGSGAGVISKTLTYPLDLFKKRLQVGGFEHARAAFGQVRRYKGLMDCAKQVLQKEGALGFFKGLSPSLLKAALSTGFMFFSYEFFCNVFHCMNRTASQR

SEQ ID NO: 64289 - protein, 320 aa, Homo sapiens; identical to SEQ ID NO: 64286

SEQ ID NO: 64290 - protein, 320 aa, Homo sapiens; identical to SEQ ID NO: 64286

SEQ ID NO: 64291 - protein, 320 aa, Homo sapiens; identical to SEQ ID NO: 64286

SEQ ID NO: 64292 - protein, 675 aa, Homo sapiens
MAAAKVALTKRADPAELRTIFLKYASIEKNGEFFMSPNDFVTRYLNIFGESQPNPKTVELLSGVVDQTKDGLISFQEFVAFESVLCAPDALFMVAFQLFDKAGKGEVTFEDVKQVFGQTTIHQHIPFNWDSEFVQLHFGKERKRHLTYAEFTQFLLEIQLEHAKQAFVQRDNARTGRVTAIDFRDIMVTIRPHVLTPFVEECLVAAAGGTTSHQVSFSYFNGFNSLLNNMELIRKIYSTLAGTRKDVEVTKEEFVLAAQKFGQVTPMEVDILFQLADLYEPRGRMTLADIERIAPLEEGTLPFNLAEAQRQKASGDSARPVLLQVAESAYRFGLGSVAGAVGATAVYPIDLVKTRMQNQRSTGSFVGELMYKNSFDCFKKVLRYEGFFGLYRGLLPQLLGVAPEKAIKLTVNDFVRDKFMHKDGSVPLAAEILAGGCAGGSQVIFTNPLEIVKIRLQVAGEITTGPRVSALSVVRDLGFFGIYKGAKACFLRDIPFSAIYFPCYAHVKASFANEDGQVSPGSLLLAGAIAGMPAASLVTPADVIKTRLQVAARAGQTTYSGVIDCFRKILREEGPKALWKGAGARVFRSSPQFGVTLLTYELLQRWFYIDFGGVKPMGSEPVPKSRINLPAPNPDHVGGYKLAVATFAGIENKFGLYLPLFKPSVSTSKAIGGGP

SEQ ID NO: 64293 - protein, 676 aa, Homo sapiens
MAAAKVALTKRADPAELRTIFLKYASIEKNGEFFMSPNDFVTRYLNIFGESQPNPKTVELLSGVVDQTKDGLISFQEFVAFESVLCAPDALFMVAFQLFDKAGKGEVTFEDVKQVFGQTTIHQHIPFNWDSEFVQLHFGKERKRHLTYAEFTQFLLEIQLEHAKQAFVQRDNARTGRVTAIDFRDIMVTIRPHVLTPFVEECLVAAAGGTTSHQVSFSYFNGFNSLLNNMELIRKIYSTLAGTRKDVEVTKEEFVLAAQKFGQVTPMEVDILFQLADLYEPRGRMTLADIERIAPLEEGTLPFNLAEAQRQQKASGDSARPVLLQVAESAYRFGLGSVAGAVGATAVYPIDLVKTRMQNQRSTGSFVGELMYKNSFDCFKKVLRYEGFFGLYRGLLPQLLGVAPEKAIKLTVNDFVRDKFMHKDGSVPLAAEILAGGCAGGSQVIFTNPLEIVKIRLQVAGEITTGPRVSALSVVRDLGFFGIYKGAKACFLRDIPFSAIYFPCYAHVKASFANEDGQVSPGSLLLAGAIAGMPAASLVTPADVIKTRLQVAARAGQTTYSGVIDCFRKILREEGPKALWKGAGARVFRSSPQFGVTLLTYELLQRWFYIDFGGVKPMGSEPVPKSRINLPAPNPDHVGGYKLAVATFAGIENKFGLYLPLFKPSVSTSKAIGGGP

SEQ ID NO: 64294 - protein, 567 aa, Homo sapiens
MEDVKQVFGQTTIHQHIPFNWDSEFVQLHFGKERKRHLTYAEFTQFLLEIQLEHAKQAFVQRDNARTGRVTAIDFRDIMVTIRPHVLTPFVEECLVAAAGGTTSHQVSFSYFNGFNSLLNNMELIRKIYSTLAGTRKDVEVTKEEFVLAAQKFGQVTPMEVDILFQLADLYEPRGRMTLADIERIAPLEEGTLPFNLAEAQRQKASGDSARPVLLQVAESAYRFGLGSVAGAVGATAVYPIDLVKTRMQNQRSTGSFVGELMYKNSFDCFKKVLRYEGFFGLYRGLLPQLLGVAPEKAIKLTVNDFVRDKFMHKDGSVPLAAEILAGGCAGGSQVIFTNPLEIVKIRLQVAGEITTGPRVSALSVVRDLGFFGIYKGAKACFLRDIPFSAIYFPCYAHVKASFANEDGQVSPGSLLLAGAIAGMPAASLVTPADVIKTRLQVAARAGQTTYSGVIDCFRKILREEGPKALWKGAGARVFRSSPQFGVTLLTYELLQRWFYIDFGGVKPMGSEPVPKSRINLPAPNPDHVGGYKLAVATFAGIENKFGLYLPLFKPSVSTSKAIGGGP

SEQ ID NO: 64295 - protein, 186 aa, Homo sapiens
MKHMLAASAGEVVACLIRVPSEVVKQRAQVSASTRTFQIFSNILYEEGIQGLYRGYKSTVLREIPFSLVQFPLWESLKALWSWRQDHVVDSWQSAVCGAFAGGFAAAVTTPLDVAKTRITLAKAGSSTADGNVLSVLHGVWRSQGLAGLFAGVFPRMAAISLGGFIFLGAYDRTHSLLLEVGRKSP

SEQ ID NO: 64296 - protein, 274 aa, Homo sapiens
MDRPGFVAALVAGGVAGVSVDLILFPLDTIKTRLQSPQGFSKAGGFHGIYAGVPSAAIGSFPNAAAFFITYEYVKWFLHADSSSYLTPMKHMLAASAGEVVACLIRVPSEVVKQRAQVSASTRTFQIFSNILYEEGIQGLYRGYKSTVLREIPFSLVQFPLWESLKALWSWRQDHVVDSWQSAVCGAFAGGFAAAVTTPLDVAKTRITLAKAGSSTADGNVLSVLHGVWRSQGLAGLFAGVFPRMAAISLGGFIFLGAYDRTHSLLLEVGRKSP

SEQ ID NO: 64297 - protein, 21 aa, Homo sapiens
MDRPGFVAALVLLHFLSPMNM

SEQ ID NO: 64298 - protein, 158 aa, Homo sapiens
MEGKRKLEGKPLRFRGVHHAFAKILAEGGIRGLWAGWVPNIQRAALVNMGDLTTYDTVKHYLVLNTPLEDNIMTHGLSSLCSGLVASILGTPADVIKSRIMNQPRDKQGRGLLYKSSTDCLIQAVQGEGFMSLYKGFLPSWLRMAAVIVNSSRSQLKV

SEQ ID NO: 64299 - protein, 323 aa, Homo sapiens
MSVPEEEERLLPLTQRWPRASKFLLSGCAATVAELATFPLDLTKTRLQMQGEAALARLGDGARESAPYRGMVRTALGIIEEEGFLKLWQGVTPAIYRHVVYSGGRMVTYEHLREVVFGKSEDEHYPLWKSVIGGMMAGVIGQFLANPTDLVKVQMQMEGKRKLEGKPLRFRGVHHAFAKILAEGGIRGLWAGWVPNIQRAALVNMGDLTTYDTVKHYLVLNTPLEDNIMTHGLSSLCSGLVASILGTPADVIKSRIMNQPRDKQGRGLLYKSSTDCLIQAVQGEGFMSLYKGFLPSWLRMTPWSMVFWLTYEKIREMSGVSPF

SEQ ID NO: 64300 - protein, 245 aa, Homo sapiens
MSVPEEEERLLPLTQRWPRASKFLLSGCAATVAELATFPLDLTKTRLQMQGEAALARLGDGARESAPYRGMVRTALGIIEEEGFLKLWQGVTPAIYRHVVYSGGRMVTYEHLREVVFGKSEDEHYPLWKSVIGGMMAGVIGQFLANPTDLVKVQMQMEGKRKLEGKPLRFRGVHHAFAKILAEGGIRGLWAGWVPNIQRAALVNMGDLTTYDTVKHYLVLNTPLEDNIMTHGLSSDLVGSHKAIQ

SEQ ID NO: 64301 - protein, 98 aa, Homo sapiens
  VARIANT 1: note = MOD_RES - Any amino acid
XNMGDLTTYDTVKHYLVLNTPLEDNIMTHGLSSLCSGLVASILGTPADVIKSRIMNQPRDKQGRGLLYKSSTDCLIQAVQGEGFMSLYKGFLPSWLRM

SEQ ID NO: 64302 - protein, 149 aa, Homo sapiens
MSECPLILYIHKHIDTYSQSYLFNDLFYPVYSGGRMVTYEHLREVVFGKSEDEHYPLWKSVIGGMMAGVIGQFLANPTDLVKVQMQMEGKRKLEGKPLRFRGVHHAFAKILAEGGIRGLWAGWVPNIQRAALVNMGDLTTYDTVKHYLV

SEQ ID NO: 64303 - protein, 159 aa, Homo sapiens
  VARIANT 1: note = MOD_RES - Any amino acid
XMEGKRKLEGKPLRFRGVHHAFAKILAEGGIRGLWAGWVPNIQRAALVNMGDLTTYDTVKHYLVLNTPLEDNIMTHGLSSLCSGLVASILGTPADVIKSRIMNQPRDKQGRGLLYKSSTDCLIQAVQGEGFMSLYKGFLPSWLRMAAVIVNSSRSQLKV

SEQ ID NO: 64304 - protein, 237 aa, Homo sapiens
MYLYLMKMPAAYQVYSGGRMVTYEHLREVVFGKSEDEHYPLWKSVIGGMMAGVIGQFLANPTDLVKVQMQMEGKRKLEGKPLRFRGVHHAFAKILAEGGIRGLWAGWVPNIQRAALVNMGDLTTYDTVKHYLVLNTPLEDNIMTHGLSSLCSGLVASILGTPADVIKSRIMNQPRDKQGRGLLYKSSTDCLIQAVQGEGFMSLYKGFLPSWLRMTPWSMVFWLTYEKIREMSGVSPF

SEQ ID NO: 64305 - protein, 364 aa, Homo sapiens
MELEGRGAGGVAGGPAAGPGRSPGESALLDGWLQRGVGRGAGGGEAGACRPPVRQDPDSGPDYEALPAGATVTTHMVAGAVAGILEHCVMYPIDCVKTRMQSLQPDPAARYRNVLEALWRIIRTEGLWRPMRGLNVTATGAGPAHALYFACYEKLKKTLSDVIHPGGNSHIANGAAGCVATLLHDAAMNPAEVVKQRMQMYNSPYHRVTDCVRAVWQNEGAGAFYRSYTTQLTMNVPFQAIHFMTYEFLQEHFNPQRRYNPSSHVLSGACAGAVAAAATTPLDVCKTLLNTQESLALNSHITGHITGMASAFRTVYQVGGVTAYFRGVQARVIYQIPSTAIAWSVYEFFKYLITKRQEEWRAGK

SEQ ID NO: 64306 - protein, 225 aa, Homo sapiens
RGAAGWSHCHHAHGGRRRGRDPGALRDVPHRLRQGAAGCVATLLHDAAMNPAEVVKQRMQMYNSPYHRVTDCVRAVWQNEGAGAFYRSYTTQLTMNVPFQAIHFMTYEFLQEHFNPQRRYNPSSHVLSGACAGAVAAAATTPLDVCKTLLNTQESLALNSHITGHITGMASAFRTVYQVGGVTAYFRGVQARVIYQIPSTAIAWSVYEFFKYLITKRQEEWRAGK

SEQ ID NO: 64307 - protein, 291 aa, Homo sapiens
MSALNWKPFVYGGLASITAECGTFPIDLTKTRLQIQGQTNDAKFKEIRYRGMLHALVRIGREEGLKALYSGIAPAMLRQASYGTIKIGTYQSLKRLFIERPEDETLPINVICGILSGVISSTIANPTDVLKIRMQAQSNTIQGGMIGNFMNIYQQEGTRGLWKGVSLTAQRAAIVVGVELPVYDITKKHLILSGLMGDTVYTHFLSSFTCGLAGALASNPVDVVRTRMMNQRVLRDGRCSGYTGTLDCLLQTWKNEGFFALYKGFWPNWLRLGPWNIIFFVTYEQLKKLDL

SEQ ID NO: 64308 - protein, 216 aa, Homo sapiens
MLRQASYGTIKIGTYQSLKRLFIERPEDETLPINVICGILSGVISSTIANPTDVLKIRMQAQSNTIQGGMIGNFMNIYQQEGTRGLWKGVSLTAQRAAIVVGVELPVYDITKKHLILSGLMGDTVYTHFLSSFTCGLAGALASNPVDVVRTRMMNQRVLRDGRCSGYTGTLDCLLQTWKNEGFFALYKGFWPNWLRLGPWNIIFFVTYEQLKKLDL

SEQ ID NO: 64309 - protein, 240 aa, Homo sapiens
MLHALVRIGREEGLKALYSGIAPAMLRQASYGTIKIGTYQSLKRLFIERPEDETLPINVICGILSGVISSTIANPTDVLKIRMQAQSNTIQGGMIGNFMNIYQQEGTRGLWKGVSLTAQRAAIVVGVELPVYDITKKHLILSGLMGDTVYTHFLSSFTCGLAGALASNPVDVVRTRMMNQRVLRDGRCSGYTGTLDCLLQTWKNEGFFALYKGFWPNWLRLGPWNIIFFVTYEQLKKLDL

SEQ ID NO: 64310 - protein, 315 aa, Homo sapiens
MTGQGQSASGSSAWSTVFRHVRYENLIAGVSGGVLSNLALHPLDLVKIRFAVSDGLELRPKYNGILHCLTTIWKLDGLRGLYQGVTPNIWGAGLSWGLYFFFYNAIKSYKTEGRAERLEATEYLVSAAEAGAMTLCITNPLWVTKTRLMLQYDAVVNSPHRQYKGMFDTLVKIYKYEGVRGLYKGFVPGLFGTSHGALQFMAYELLKLKYNQHINRLPEAQLSTVEYISVAALSKIFAVAATYPYQVVRARLQDQHMFYSGVIDVITKTWRKEGVGGFYKGIAPNLIRVTPACCITFVVYENVSHFLLDLREKRK

SEQ ID NO: 64311 - protein, 299 aa, Homo sapiens
MTGQGQSASGSSAWSGGVLSNLALHPLDLVKIRFAVSDGLELRPKYNGILHCLTTIWKLDGLRGLYQGVTPNIWGAGLSWGLYFFFYNAIKSYKTEGRAERLEATEYLVSAAEAGAMTLCITNPLWVTKTRLMLQYDAVVNSPHRQYKGMFDTLVKIYKYEGVRGLYKGFVPGLFGTSHGALQFMAYELLKLKYNQHINRLPEAQLSTVEYISVAALSKIFAVAATYPYQVVRARLQDQHMFYSGVIDVITKTWRKEGVGGFYKGIAPNLIRVTPACCITFVVYENVSHFLLDLREKRK

SEQ ID NO: 64312 - protein, 183 aa, Homo sapiens
MTLCITNPLWVTKTRLMLQYDAVVNSPHRQYKGMFDTLVKIYKYEGVRGLYKGFVPGLFGTSHGALQFMAYELLKLKYNQHINRLPEAQLSTVEYISVAALSKIFAVAATYPYQVVRARLQDQHMFYSGVIDVITKTWRKEGVGGFYKGIAPNLIRVTPACCITFVVYENVSHFLLDLREKRK

SEQ ID NO: 64313 - protein, 321 aa, Homo sapiens
MATGGQQKENTLLHLFAGGCGGTVGAIFTCPLEVIKTRLQSSRLALRTVYYPQVHLGTISGAGMVRPTSVTPGLFQVLKSILEKEGPKSLFRGLGPNLVGVAPSRAVYFACYSKAKEQFNGIFVPNSNIVHIFSAGSAAFITNSLMNPIWMVKTRMQLEQKVRGSKQMNTLQCARYVYQTEGIRGFYRGLTASYAGISETIICFAIYESLKKYLKEAPLASSANGTEKNSTSFFGLMAAAALSKGCASCIAYPHEVIRTRLREEGTKYKSFVQTARLVFREEGYLAFYRGLFAQLIRQIPNTAIVLSTYELIVYLLEDRTQ

SEQ ID NO: 64314 - protein, 304 aa, Homo sapiens
METVPPAVDLVLGASACCLACVFTNPLEVVKTRLQLQGELQARGTYPRPYHGFIASVAAVARADGLWGLQKGLAAGLLYQGLMNGVRFYCYSLACQAGLTQQPGGTVVAGAVAGALGAFVGSPAYLIKTQLQAQTVAAVAVGHQHNHQTVLGALETIWRQQGLLGLWQGVGGAVPRVMVGSAAQLATFASAKAWVQKQQWLPEDSWLVALAGGMISSIAVVVVMTPFDVVSTRLYNQPVDTAGRGQLYGGLTDCMVKIWRQEGPLALYKGLGPAYLRLGPHTILSMLFWDELRKLAGRAQHKGT

SEQ ID NO: 64315 - protein, 295 aa, Homo sapiens
MDFLMSGLAACGACVFTNPLEVVKTRMQLQGELQAPGTYQRHYRNVFHAFITIGKVDGLAALQKGLAPALLYQFLMNGIRLGTYGLAEAGGYLHTAEGTHSPARSAAAGAMAGVMGAYLGSPIYMVKTHLQAQAASEIAVGHQYKHQGMFQALTEIGQKHGLVGLWRGALGGLPRVIVGSSTQLCTFSSTKDLLSQWEIFPPQSWKLALVAAMMSGIAVVLAMAPFDVACTRLYNQPTDAQGKNRVPKFSATSCSASAPLLGTKDVRIVKGQTGHQLFKVTQAPGCSPILLGTQS

SEQ ID NO: 64316 - protein, 291 aa, Homo sapiens
MDFLMSGLAACGACVFTNPLEVVKTRMQLQGELQAPGTYQRHYRNVFHAFITIGKVDGLAALQKGLAPALLYQFLMNGIRLGTYGLAEAGGYLHTAEGTHSPARSAAAGAMAGVMGAYLGSPIYMVKTHLQAQAASEIAVGHQYKHQGMFQALTEIGQKHGLVGLWRGALGGLPRVIVGSSTQLCTFSSTKDLLSQWEIFPPQSWKLALVAAMMSGIAVVLAMAPFDVACTRLYNQPTDAQGKGLMYRGILDALLQTARTEGIFGMYKEPSPQVLSNIMQCFSAFTGDQRC

SEQ ID NO: 64317 - protein, 304 aa, Homo sapiens
MIQNSRPSLLQPQDVGDTVETLMLHPVIKAFLCGSISGTCSTLLFQPLDLLKTRLQTLQPSDHGSRRVGMLAVLLKVVRTESLLGLWKGMSPSIVRCVPGVGIYFGTLYSLKQYFLRGHPPTALESVMLGVGSRSVAGVCMSPITVIKTRYESGKYGYESIYAALRSIYHSEGHRGLFSGLTATLLRDAPFSGIYLMFYNQTKNIVPHDQVDATLIPITNFSCGIFAGILASLVTQPADVIKTHMQLYPLKFQWIGQAVTLIFKDYGLRGFFQGGIPRALRRTLMAAMAWTVYEEMMAKMGLKS

SEQ ID NO: 64318 - protein, 351 aa, Homo sapiens
MADQDPAGISPLQQMVASGTGAVVTSLFMTPLDVVKVRLQSQRPSMASELMPSSRLWSLSYTKWKCLLYCNGVLEPLYLCPNGARCATWFQDPTRFTGTMDAFVKIVRHEGTRTLWSGLPATLVMTVPATAIYFTAYDQLKAFLCGRALTSDLYAPMVAGALARLGTVTVISPLELMRTKLQAQHVSYRELGACVRTAVAQGGWRSLWLGWGPTALRDVPFSALYWFNYELVKSWLNGFRPKDQTSVGMSFVAGGISGTVAAVLTLPFDVVKTQRQVALGAMEAVRVNPLHVDSTWLLLRRIRAESGTKGLFAGFLPRIIKAAPSCAIMISTYEFGKSFFQRLNQDRLLGG

SEQ ID NO: 64319 - protein, 359 aa, Homo sapiens
MADQDPAGISPLQQMVASGTGAVVTSLFMTPLDVVKVRLQSQRPSMASELMPSSRLWSLSYTKLPSSLQSTGKCLLYCNGVLEPLYLCPNGARCATWFQDPTRFTGTMDAFVKIVRHEGTRTLWSGLPATLVMTVPATAIYFTAYDQLKAFLCGRALTSDLYAPMVAGALARLGTVTVISPLELMRTKLQAQHVSYRELGACVRTAVAQGGWRSLWLGWGPTALRDVPFSALYWFNYELVKSWLNGFRPKDQTSVGMSFVAGGISGTVAAVLTLPFDVVKTQRQVALGAMEAVRVNPLHVDSTWLLLRRIRAESGTKGLFAGFLPRIIKAAPSCAIMISTYEFGKSFFQRLNQDRLLGG

SEQ ID NO: 64320 - protein, 336 aa, Homo sapiens
MADQDPAGISPLQQMVASGTGAVVTSLFMTPLDVVKVRLQSQRPSMASGKCLLYCNGVLEPLYLCPNGARCATWFQDPTRFTGTMDAFVKIVRHEGTRTLWSGLPATLVMTVPATAIYFTAYDQLKAFLCGRALTSDLYAPMVAGALARLGTVTVISPLELMRTKLQAQHVSYRELGACVRTAVAQGGWRSLWLGWGPTALRDVPFSALYWFNYELVKSWLNGFRPKDQTSVGMSFVAGGISGTVAAVLTLPFDVVKTQRQVALGAMEAVRVNPLHVDSTWLLLRRIRAESGTKGLFAGFLPRIIKAAPSCAIMISTYEFGKSFFQRLNQDRLLGG

SEQ ID NO: 64321 - protein, 338 aa, Homo sapiens
MDPETRGQEIIKVTPLQQMLASCTGAILTSVIVTPLDVVKIRLQAQNNPLPKGKCFVYSNGLMDHLCVCEEGGNKLWYKKPGNFQGTLDAFFKIIRNEGIKSLWSGLPPTLVMAVPATVIYFTCYDQLSALLRSKLGENETCIPIVAGIVARFGAVTVISPLELIRTKMQSKKFSYVELHRFVSKKVSEDGWISLWRGWAPTVLRDVPFSAMYWYNYEILKKWLCEKSGLYEPTFMINFTSGALSGSFAAVATLPFDVVKTQKQTQLWTYESHKISMPLHMSTWIIMKNIVAKNGFSGLFSGLIPRLIKIAPACAIMISTYEFGKAFFQKQNVRRQQY

SEQ ID NO: 64322 - protein, 370 aa, Homo sapiens
MGAQPGEPQNTCSRIQTLFRRVKTLLIKAPPPPQPPPPPPSWNPGCTHVYGYAFGHMHDNNLEHLPSQQVLDTGEQLMVPVEVLEVDNKEALWKFLLSGAMAGAVSRTGTAPLDRAKVYMQVYSSKTNFTNLLGGLQSMVQEGGFRSLWRGNGINVLKIAPEYAIKFSVFEQCKNYFCGIQGSPPFQERLLAGSLAVAISQTLINPMEVLKTRLTLRRTGQYKGLLDCARQILQREGTRALYRGYLPNMLGIIPYACTDLAVYEMLQCFWVKSGRDMGDPSGLVSLSSVTLSTTCGQMASYPLTLVRTRMQAQDTVEGSNPTMRGVLQRILAQQGWLGLYRGMTPTLLKVLPAGGISYVVYEAMKKTLGI

SEQ ID NO: 64323 - protein, 242 aa, Homo sapiens
MGAQPGEPQNTCSRIQTLFRRVKTLLIKAPPPPQPPPPPPSWNPGCTHVYGYAFGHMHDNNLEHLPSQQVLDTGEQLMVPVEVLEVDNKEALWKFLLSGAMAGAVSRTGTAPLDRAKVYMQLLGRLRQENRLNLGGGGCSEPRSPDRTPAWATESTPPRRTSPTCWGGYRAWSRRAASAPCGGATASTCSRLLLSMPSSSPYSSSARITSVEYKGPRPSRSVSLLAPWLWPSPRPSSTPWRC

SEQ ID NO: 64324 - protein, 318 aa, Homo sapiens
MGNGVKEGPVRLHEDAEAVLSSSVSSKRDHRQVLSSLLSGALAGALAKTAVAPLDRTKIIFQVSSKRFSAKEAFRVLYYTYLNEGFLSLWRGNSATMVRVVPYAAIQFSAHEEYKRILGSYYGFRGEALPPWPRLFAGALAGTTAASLTYPLDLVRARMAVTPKEMYSNIFHVFIRISREEGLKTLYHGFMPTVLGVIPYAGLSFFTYETLKSLHREYSGRRQPYPFERMIFGACAGLIGQSASYPLDVVRRRMQTAGVTGYPRASIARTLRTIVREEGAVRGLYKGLSMNWVKGPIAVGISFTTFDLMQILLRHLQS

SEQ ID NO: 64325 - protein, 341 aa, Homo sapiens
MATWRRDGRLTGGQRLLCAGLAGTLSLSLTAPLELATVLAQVGVVRGHARGPWATGHRVWRAEGLRALWKGNAVACLRLFPCSAVQLAAYRKFVVLFTDDLGHISQWSSIMAGSLAGMVSTIVTYPTDLIKTRLIMQNILEPSYRGLLHAFSTIYQQEGFLALYRGVSLTVVGALPFSAGSLLVYMNLEKIWNGPRDQFSLPQNFANVCLAAAVTQTLSFPFETVKRKMQAQSPYLPHSGGVDVHFSGAVDCFRQIVKAQGVLGLWNGLTANLLKIVPYFGIMFSTFEFCKRICLYQNGYILSPLSYKLTPGVDQSLQPQELRELKKFFKTRKPKPKKPTL

SEQ ID NO: 64326 - protein, 289 aa, Homo sapiens
MATWRRDGRLTGGQRLLCAGLAGTLSLSLTAPLELAAYRKFVVLFTDDLGHISQWSSIMAGSLAGMVSTIVTYPTDLIKTRLIMQNILEPSYRGLLHAFSTIYQQEGFLALYRGVSLTVVGALPFSAGSLLVYMNLEKIWNGPRDQFSLPQNFANVCLAAAVTQTLSFPFETVKRKMQAQSPYLPHSGGVDVHFSGAVDCFRQIVKAQGVLGLWNGLTANLLKIVPYFGIMFSTFEFCKRICLYQNGYILSPLSYKLTPGVDQSLQPQELRELKKFFKTRKPKPKKPTL

SEQ ID NO: 64327 - protein, 226 aa, Homo sapiens
MATWRRDGRLTGGQRLLCAGLAGTLSLSLTAPLELATVLAQVGVVRGHARGPWATGHRVWRAEGLRALWKGNAVACLRLFPCSAVQLAAYRKFVVLFTDDLGHISQWSSIMAGSLAGMVSTIVTYPTDLIKTRLIMQNILEPSYRGLLHAFSTIYQQEGFLALYRGVSLTVVGSEPLPPTQWRSRCPFLRSSGLLPADSEGPGGPGALEWIDSQFTEDSSIFWNYV

SEQ ID NO: 64328 - protein, 314 aa, Homo sapiens
MEDKRNIQIIEWEHLDKKKFYVFGVAMTMMIRVSVYPFTLIRTRLQVQKGKSLYHGTFDAFIKILRADGITGLYRGFLVNTFTLISGQCYVTTYELTRKFVADYSQSNTVKSLVAGGSASLVAQSITVPIDVVSQHLMMQRKGEKMGRFQVRGNPEGQGVVAFGQTKDIIRQILQADGLRGFYRGYVASLLTYIPNSAVWWPFYHFYAEQLSYLCPKECPHIVFQAVSGPLAAATASILTNPMDVIRTRVQVEGKNSIILTFRQLMAEEGPWGLMKGLSARIISATPSTIVIVVGYESLKKLSLRPELVDSRHW

SEQ ID NO: 64329 - protein, 162 aa, Homo sapiens
MEDKRNIQIIEWEHLDKKKFYVFGVAMTMMIRVSVYPFTLIRTRLQVQKGKSLYHGTFDAFIKILRADGITGLYRGFLVNTFTLISGQCYVTTYELTRKFVADYSQSNTVKSLMAEEGPWGLMKGLSARIISATPSTIVIVVGYESLKKLSLRPELVDSRHW

SEQ ID NO: 64330 - protein, 291 aa, Homo sapiens
MEDKRNIQIIEWEHLDKKKFYVFGVAMTMMIRVSVYPFTLIRTRLQVQKGKSLYHGTFDAFIKILRADGITGLYRGFLVNTFTLISGQCYVTTYELTRKFVADYSQSNTVKSLVAGGSASLVAQSITVRGNPEGQGVVAFGQTKDIIRQILQADGLRGFYRGYVASLLTYIPNSAVWWPFYHFYAEQLSYLCPKECPHIVFQAVSGPLAAATASILTNPMDVIRTRVQVEGKNSIILTFRQLMAEEGPWGLMKGLSARIISATPSTIVIVVGYESLKKLSLRPELVDSRHW

SEQ ID NO: 64331 - protein, 246 aa, Homo sapiens
MVKIYRHESLLGFFKGMSFPIASIAVVNSVLFGVYSNTLLVLTATSHQERRAQPPSYMHIFLAGCTGGFLQAYCLAPFDLIKVRLQNQTEPRAQPGSPPPRYQGPVHCAASIFREEGPRGLFRGAWALTLRDTPTVGIYFITYEGLCRQYTPEGQNPSSATVLVAGGFAGIASWVAATPLDMIKSRMQMDGLRRRVYQGMLDCMVSSIRQEGLGVFFRGVTINSARAFPVNAVTFLSYEYLLRWWG

SEQ ID NO: 64332 - protein, 264 aa, Homo sapiens
MPVEEFVAGWISGALGLVLGHPFDTVKLLGFFKGMSFPIASIAVVNSVLFGVYSNTLLVLTATSHQERRAQPPSYMHIFLAGCTGGFLQAYCLAPFDLIKVRLQNQTEPRAQPGSPPPRYQGPVHCAASIFREEGPRGLFRGAWALTLRDTPTVGIYFITYEGLCRQYTPEGQNPSSATVLVAGGFAGIASWVAATPLDMIKSRMQMDGLRRRVYQGMLDCMVSSIRQEGLGVFFRGVTINSARAFPVNAVTFLSYEYLLRWWG

SEQ ID NO: 64333 - protein, 184 aa, Homo sapiens
MVKIYRHESAYCLAPFDLIKVRLQNQTEPRAQPGSPPPRYQGPVHCAASIFREEGPRGLFRGAWALTLRDTPTVGIYFITYEGLCRQYTPEGQNPSSATVLVAGGFAGIASWVAATPLDMIKSRMQMDGLRRRVYQGMLDCMVSSIRQEGLGVFFRGVTINSARAFPVNAVTFLSYEYLLRWWG

SEQ ID NO: 64334 - protein, 288 aa, Homo sapiens
MPVEEFVAGWISGALGLVLGHPFDTVKVRLQTQTTYRGIVDCMVKIYRHESLLGFFKGMSFPIASIAVVNSVLFGVYSNTLLVLTATSHQERRAQPPSYMHIFLAGCTGGFLQAYCLAPFDLIKVRLQNQTEPRAQPGSPPPRYQGPVHCAASIFREEGPRGLFRGAWALTLRDTPTVGIYFITYEGLCRQYTPEGQNPSSATVLVAGGFAGIASWVAATPLDMIKSRMQMDGLRRRVYQGMLDCMVSSIRQEGLGVFFRGVTINSARAFPVNAVTFLSYEYLLRWWG

SEQ ID NO: 64335 - protein, 246 aa, Homo sapiens; identical to SEQ ID NO: 64331

SEQ ID NO: 64336 - protein, 288 aa, Homo sapiens; identical to SEQ ID NO: 64334

SEQ ID NO: 64337 - protein, 118 aa, Homo sapiens
MPVEEFVAGWISGALGLVLGHPFDTVKVRLQTQTTYRGIVDCMVKIYRHESLLGFFKGMSFPIASIAVVNSVLFGVYSNTLLVLTATSHQERRAQPPSYMHIFLAGCTGGFLQAYCLA

SEQ ID NO: 64338 - protein, 418 aa, Homo sapiens
MHPRRPDGFDGLGYRGGARDEQGFGGAFPARSFSTGSDLGHWVTTPPDIPGSRNLHWGEKSPPYGVPTTSTPYEGPTEEPFSSGGGGSVQGQSSEQLNRFAGFGIGLASLFTENVLAHPCIVLRRQCQVNYHAQHYHLTPFTVINIMYSFNKTQGPRALWKGMGSTFIVQGVTLGAEGIISEFTPLPREVLHKWSPKQIGEHLLLKSLTYVVAMPFYSASLIETVQSEIIRDNTGILECVKEGIGRVIGMGVPHSKRLLPLLSLIFPTVLHGVLHYIISSVIQKFVLLILKRKTYNSHLAESTSPVQSMLDAYFPELIANFAASLCSDVILYPLETVLHRLHIQGTRTIIDNTDLGYEVLPINTQYEGMRDCINTIRQEEGVFGFYKGFGAVIIQYTLHAAVLQITKIIYSTLLQNNI

SEQ ID NO: 64339 - protein, 337 aa, Homo sapiens
MHPRRPDGFDGLGYRGGARDEQGFGGAFPARSFSTGSDLGHWVTTPPDIPGSRNLHWGEKSPPYGVPTTSTPYEGPTEEPFSSGGGGSVQGQSSEQLNRFAGFGIGLASLFTENVLAHPCIVLRRQCQVNYHAQHYHLTPFTVINIMYSFNKTQGPRALWKGMGSTFIVQGVTLGAEGIISEFTPLPREVLHKWSPKQIGEHLLLKSLTYVVAMPFYSASLIETVQSMLDAYFPELIANFAASLCSDVILYPLETVLHRLHIQGTRTIIDNTDLGYEVLPINTQYEGMRDCINTIRQEEGVFGFYKGFGAVIIQYTLHAAVLQITKIIYSTLLQNNI

SEQ ID NO: 64340 - protein, 272 aa, Homo sapiens
MYSFNKTQGPRALWKGMGSTFIVQGVTLGAEGIISEFTPLPREVLHKWSPKQIGEHLLLKSLTYVVAMPFYSASLIETVQSEIIRDNTGILECVKEGIGRVIGMGVPHSKRLLPLLSLIFPTVLHGVLHYIISSVIQKFVLLILKRKTYNSHLAESTSPVQSMLDAYFPELIANFAASLCSDVILYPLETVLHRLHIQGTRTIIDNTDLGYEVLPINTQYEGMRDCINTIRQEEGVFGFYKGFGAVIIQYTLHAAVLQITKIIYSTLLQNNI

SEQ ID NO: 64341 - protein, 205 aa, Homo sapiens
MPFYSASLIETVQSEIIRDNTGILECVKEGIGRVIGMGVPHSKRLLPLLSLIFPTVLHGVLHYIISSVIQKFVLLILKRKTYNSHLAESTSPVQSMLDAYFPELIANFAASLCSDVILYPLETVLHRLHIQGTRTIIDNTDLGYEVLPINTQYEGMRDCINTIRQEEGVFGFYKGFGAVIIQYTLHAAVLQITKIIYSTLLQNNI

SEQ ID NO: 64342 - protein, 327 aa, Homo sapiens
MKTEQLNRFAGFGIGLASLFTENVLAHPCIVLRRQCQVNYHAQHYHLTPFTVINIMYSFNKTQGPRALWKGMGSTFIVQGVTLGAEGIISEFTPLPREVLHKWSPKQIGEHLLLKSLTYVVAMPFYSASLIETVQSEIIRDNTGILECVKEGIGRVIGMGVPHSKRLLPLLSLIFPTVLHGVLHYIISSVIQKFVLLILKRKTYNSHLAESTSPVQSMLDAYFPELIANFAASLCSDVILYPLETVLHRLHIQGTRTIIDNTDLGYEVLPINTQYEGMRDCINTIRQEEGVFGFYKGFGAVIIQYTLHAAVLQITKIIYSTLLQNNI

SEQ ID NO: 64343 - protein, 256 aa, Homo sapiens
MGSTFIVQGVTLGAEGIISEFTPLPREVLHKWSPKQIGEHLLLKSLTYVVAMPFYSASLIETVQSEIIRDNTGILECVKEGIGRVIGMGVPHSKRLLPLLSLIFPTVLHGVLHYIISSVIQKFVLLILKRKTYNSHLAESTSPVQSMLDAYFPELIANFAASLCSDVILYPLETVLHRLHIQGTRTIIDNTDLGYEVLPINTQYEGMRDCINTIRQEEGVFGFYKGFGAVIIQYTLHAAVLQITKIIYSTLLQNNI

SEQ ID NO: 64344 - protein, 272 aa, Homo sapiens; identical to SEQ ID NO: 64340

SEQ ID NO: 64345 - protein, 739 aa, Homo sapiens
MSSESKEQHNVSPRDSAEGNDSYPSGIHLELQRESSTDFKQFETNDQCRPYHRILIERQEKSDTNFKEFVIKKLQKNCQCSPAKAKNMILGFLPVLQWLPKYDLKKNILGDVMSGLIVGILLVPQSIAYSLLAGQEPVYGLYTSFFASIIYFLLGTSRHISVGIFGVLCLMIGETVDRELQKAGYDNAHSAPSLGMVSNGSTLLNHTSDRICDKSCYAIMVGSTVTFIAGVYQVAMGFFQVGFVSVYLSDALLSGFVTGASFTILTSQAKYLLGLNLPRTNGVGSLITTWIHVFRNIHKTNLCDLITSLLCLLVLLPTKELNEHFKSKLKAPIPIELVVVVAATLASHFGKLHENYNSSIAGHIPTGFMPPKVPEWNLIPSVAVDAIAISIIGFAITVSLSEMFAKKHGYTVKANQEMYAIGFCNIIPSFFHCFTTSAALAKTLVKESTGCHTQLSGVVTALVLLLVLLVIAPLFYSLQKSVLGVITIVNLRGALRKFRDLPKMWSISRMDTVIWFVTMLSSALLSTEIGLLVGVCFSIFCVILRTQKPKSSLLGLVEESEVFESVSAYKNLQIKPGIKIFRFVAPLYYINKECFKSALYKQTVNPILIKVAWKKAAKRKIKEKVVTLGGIQDEMSVQLSHDPLELHTIVIDCSAIQFLDTAGIHTLKEVRRDYEAIGIQVLLAQCNPTVRDSLTNGEYCKKEEENLLFYSVYEAMAFAEVSKNQKGVCVPNGLSLSSD

SEQ ID NO: 64346 - protein, 23 aa, Homo sapiens
MSSESKEQHNVSPRDSAEGNDSY

SEQ ID NO: 64347 - protein, 764 aa, Homo sapiens
MIEPFGNQYIVARPVYSTNAFEENHKKTGRHHKTFLDHLKVCCSCSPQKAKRIVLSLFPIASWLPAYRLKEWLLSDIVSGISTGIVAVLQGLAFALLVDIPPVYGLYASFFPAIIYLFFGTSRHISVGPFPILSMMVGLAVSGAVSKAVPDRNATTLGLPNNSNNSSLLDDERVRVAAAASVTVLSGIIQLAFGILRIGFVVIYLSESLISGFTTAAAVHVLVSQLKFIFQLTVPSHTDPVSIFKVLYSVFSQIEKTNIADLVTALIVLLVVSIVKEINQRFKDKLPVPIPIEFIMTVIAAGVSYGCDFKNRFKVAVVGDMNPGFQPPITPDVETFQNTVGDCFGIAMVAFAVAFSVASVYSLKYDYPLDGNQELIALGLGNIVCGVFRGFAGSTALSRSAVQESTGGKTQIAGLIGAIIVLIVVLAIGFLLAPLQKSVLAALALGNLKGMLMQFAEIGRLWRKDKYDCLIWIMTFIFTIVLGLGLGLAASVAFQLLTIVFRTQFPKCSTLANIGRTNIYKNKKDYYDMYEPEGVKIFRCPSPIYFANIGFFRRKLIDAVGFSPLRILRKRNKALRKIRKLQKQGLLQVTPKGFICTVDTIKDSDEELDNNQIEVLDQPINTTDLPFHIDWNDDLPLNIEVPKISLHSLILDFSAVSFLDVSSVRGLKSILQEFIRIKVDVYIVGTDDDFIEKLNRYEFFDGEVKSSIFFLTIHDAVLHILMKKDYSTSKFNPSQEKDGKIDFTINTNGGLRNRVYEVPVETKF

SEQ ID NO: 64348 - protein, 651 aa, Homo sapiens
MLLRKIIKRQEDIIRHFWIISKCVVASWLPAYRLKEWLLSDIVSGISTGIVAVLQGLAFALLVDIPPVYGLYASFFPAIIYLFFGTSRHISVGPFPILSMMVGLAVSGAVSKAVPDRNATTLGLPNNSNNSSLLDDERVRVAAAASVTVLSGIIQLAFGILRIGFVVIYLSESLISGFTTAAAVHVLVSQLKFIFQLTVPSHTDPVSIFKVLYSVFSQIEKTNIADLVTALIVLLVVSIVKEINQRFKDKLPVPIPIEFIMTVIAAGVSYGCDFKNRFKVAVVGDMNPGFQPPITPDVETFQNTVGDCFGIAMVAFAVAFSVASVYSLKYDYPLDGNQELIALGLGNIVCGVFRGFAGSTALSRSAVQESTGGKTQIAGLIGAIIVLIVVLAIGFLLAPLQKSVLAALALGNLKGMLMQFAEIGRLWRKDKYDCLIWIMTFIFTIVLGLGLGLAASVAFQLLTIVFRTQFPKCSTLANIGRTNIYKNKKDYYDMYEPEGVKIFRCPSPIYFANIGFFRRKLIDAVGFSPLRILRKRNKALRKIRKLQKQGLLQVTPILQEFIRIKVDVYIVGTDDDFIEKLNRYEFFDGEVKSSIFFLTIHDAVLHILMKKDYSTSKFNPSQEKDGKIDFTINTNGGLRNRVYEVPVETKF

SEQ ID NO: 64349 - protein, 120 aa, Homo sapiens
MIEPFGNQYIVARPVYSTNAFEENHKKTGRHHKTFLDHLKVCCSCSPQKAKRIVLSLFPIASWLPAYRLKEWLLSDIVSGISTGIVAVLQGLAFALLVDIPPVYGLYASFFPAIIYLFFG

SEQ ID NO: 64350 - protein, 780 aa, Homo sapiens
MAAPGGRSEPPQLPEYSCSYMVSRPVYSELAFQQQHERRLQERKTLRESLAKCCSCSRKRAFGVLKTLVPILEWLPKYRVKEWLLSDVISGVSTGLVATLQGMAYALLAAVPVGYGLYSAFFPILTYFIFGTSRHISVGPFPVVSLMVGSVVLSMAPDEHFLVSSSNGTVLNTTMIDTAARDTARVLIASALTLLVGIIQLIFGGLQIGFIVRYLADPLVGGFTTAAAFQVLVSQLKIVLNVSTKNYNGVLSIIYTLVEIFQNIGDTNLADFTAGLLTIVVCMAVKELNDRFRHKIPVPIPIEVIVTIIATAISYGANLEKNYNAGIVKSIPRGFLPPELPPVSLFSEMLAASFSIAVVAYAIAVSVGKVYATKYDYTIDGNQEFIAFGISNIFSGFFSCFVATTALSRTAVQESTGGKTQVAGIISAAIVMIAILALGKLLEPLQKSVLAAVVIANLKGMFMQLCDIPRLWRQNKIDAVIWVFTCIVSIILGLDLGLLAGLIFGLLTVVLRVQFPSWNGLGSIPSTDIYKSTKNYKNIEEPQGVKILRFSSPIFYGNVDGFKKCIKSTVGFDAIRVYNKRLKALRKIQKLIKSGQLRATKNGIISDAVSTNNAFEPDEDIEDLEELDIPTKEIEIQVDWNSELPVKVNVPKVPIHSLVLDCGAISFLDVVGVRSLRVIVKEFQRIDVNVYFASLQDYVIEKLEQCGFFDDNIRKDTFFLTVHDAILYLQNQVKSQEGQGSILETITLIQDCKDTLELIETELTEEELDVQDEAMRTLAS

SEQ ID NO: 64351 - protein, 131 aa, Homo sapiens
MAAPGGRSEPPQLPEYSCSYMVSRPVYSELAFQQQHERRLQERKTLRESLAKCCSCSRKRAFGVLKTLVPILEWLPKYRVKEWLLSDVISGVSTGLVATLQGMAYALLAAVPVGYGLYSAFFPILTYFIFG

SEQ ID NO: 64352 - protein, 341 aa, Homo sapiens [sequence omitted]

SEQ ID NO: 64353 - protein, 349 aa, Homo sapiens
MIAILALGKLLEPLQKSVLAAVVIANLKGMFMQLCDIPRLWRQNKIDAVIWVFTCIVSIILGLDLGLLAGLIFGLLTVVLRVQFPSWNGLGSIPSTDIYKSTKNYKNIEEPQGVKILRFSSPIFYGNVDGFKKCIKSTVGFDAIRVYNKRLKALRKIQKLIKSGQLRATKNGIISDAVSTNNAFEPDEDIEDLEELDIPTKEIEIQVDWNSELPVKVNVPKVPIHSLVLDCGAISFLDVVGVRSLRVIVKEFQRIDVNVYFASLQDYVIEKLEQCGFFDDNIRKDTFFLTVHDAILYLQNQVKSQEGQGSILETITLIQDCKDTLELIETELTEEELDVQDEAMRTLAS

SEQ ID NO: 64354 - protein, 367 aa, Homo sapiens [sequence omitted]

SEQ ID NO: 64355 - protein, 744 aa, Homo sapiens
MDHAEENEILAATQRYYVERPIFSHPVLQERLHTKDKVPDSIADKLKQAFTCTPKKIRNIIYMFLPITKWLPAYKFKEYVLGDLVSGISTGVLQLPQGLAFAMLAAVPPIFGLYSSFYPVIMYCFLGTSRHISIGPFAVISLMIGGVAVRLVPDDIVIPGGVNATNGTEARDALRVKVAMSVTLLSGIIQFCLGVCRFGFVAIYLTEPLVRGFTTAAAVHVFTSMLKYLFGVKTKRYSGIFSVVYSTVAVLQNVKNLNVCSLGVGLMVFGLLLGGKEFNERFKEKLPAPIPLEFFAVVMGTGISAGFNLKESYNVDVVGTLPLGLLPPANPDTSLFHLVYVDAIAIAIVGFSVTISMAKTLANKHGYQVDGNQELIALGLCNSIGSLFQTFSISCSLSRSLVQEGTGGKTQLAGCLASLMILLVILATGFLFESLPQAVLSAIVIVNLKGMFMQFSDLPFFWRTSKIELTIWLTTFVSSLFLGLDYGLITAVIIALLTVIYRTQSPSYKVLGKLPETDVYIDIDAYEEVKEIPGIKIFQINAPIYYANSDLYSNALKRKTGVNPAVIMGARRKAMRKYAKEVGNANMANATVVKADAEVDGEDATKPEEEDGEVKYPPIVIKSTFPEEMQRFMPPGDNVHTVILDFTQVNFIDSVGVKTLAGIVKEYGDVGIYVYLAGCSAQVVNDLTRNRFFENPALWELLFHSIHDAVLGSQLREALAEQEASAPPSQEDLEPNATPATPEA

SEQ ID NO: 64356 - protein, 685 aa, Homo sapiens
MDHAEENEILAATQRYYVERPIFSHPVLQERLHTKDKVPDSIADKLKQAFTCTPKKIRNIIYMFLPITKWLPAYKFKEYVLGDLVSGISTGVLQLPQGLAFAMLAAVPPIFGLYSSFYPVIMYCFLGTSRHISIGPFAVISLMIGGVAVRLVPDDIVIPGGVNATNGTEARDALRVKVAMSVTLLSGIIQFCLGVCRFGFVAIYLTEPLVRGFTTAAAVHVFTSMLKYLFGVKTKRYSGIFSVVYSTVAVLQNVKNLNVCSLGVGLMVFGLLLGGKEFNERFKEKLPAPIPLEFFAVVMGTGISAGFNLKESYNVDVVGTLPLGLLPPANPDTSLFHLVYVDAIAIAIVGFSVTISMAKTLANKHGYQVDGNQELIALGLCNSIGSLFQTFSISCSLSRSLVQEGTGGKTQLAGCLASLMILLVILATGFLFESLPQAVLSAIVIVNLKGMFMQFSDLPFFWRTSKIELTIWLTTFVSSLFLGLDYGLITAVIIALLTVIYRTQSPSYKVLGKLPETDVYIDIDAYEEVKEIPGIKIFQINAPIYYANSDLYSNALKRKTGVNPAVIMGARRKAMRKYAKEVGNANMANATVVKADAEVDGEDATKPEEEDGEVKYPPIVIKSTFPEEMQRFMPPGDNVHTVILDFTQVNFIDSVGVKTLAGIVKEYGDVGIYVYLAGCSAFIQR

SEQ ID NO: 64357 - protein, 177 aa, Homo sapiens
MGARRKAMRKYAKEVGNANMANATVVKADAEVDGEDATKPEEEDGEVKYPPIVIKSTFPEEMQRFMPPGDNVHTVILDFTQVNFIDSVGVKTLAGIVKEYGDVGIYVYLAGCSAQVVNDLTRNRFFENPALWELLFHSIHDAVLGSQLREALAEQEASAPPSQEDLEPNATPATPEA

SEQ ID NO: 64358 - protein, 335 aa, Homo sapiens
MDHAEENEILAATQRYYVERPIFSHPVLQERLHTKDKVPDSIADKLKQAFTCTPKKIRNIIYMFLPITKWLPAYKFKEYVLGDLVSGISTGVLQLPQGLAFAMLAAVPPIFGLYSSFYPVIMYCFLGTSRHISIGPFAVISLMIGGVAVRLVPDDIVIPGGVNATNGTEARDALRVKVAMSVTLLSGIIQFCLGVCRFGFVAIYLTEPLVRGFTTAAAVHVFTSMLKYLFGVKTKRYSGIFSVVYSTVAVLQNVKNLNVCSLGVGLMVFGLLLGGKEFNERFKEKLPAPIPLEFFAVVMGTGISAGFNLKESYNVDVVGTLPLGFHTEMTRRWRP

SEQ ID NO: 64359 - protein, 714 aa, Homo sapiens
MDHAEENEILAATQRYYVERPIFSHPVLQERLHTKDKVPDSIADKLKQAFTCTPKKIRNIIYMFLPITKWLPAYKFKEYVLGDLVSGISTGVLQLPQGLAFAMLAAVPPIFGLYSSFYPVIMYCFLGTSRHISIGPFAVISLMIGGVAVRLVPDDIVIPGGVNATNGTEARDALRVKVAMSVTLLSGIIQFCLGVCRFGFVAIYLTEPLVRGFTTAAAVHVFTSMLKYLFGVKTKRYSGIFSVVYSTVAVLQNVKNLNVCSLGVGLMVFGLLLGGKEFNERFKEKLPAPIPLEFFAVVMGTGISAGFNLKESYNVDVVGTLPLGLLPPANPDTSLFHLVYVDAIAIAIVGFSVTISMAKTLANKHGYQVDGNQELIALGLCNSIGSLFQTFSISCSLSRSLVQEGTGGKTQLAGCLASLMILLVILATGFLFESLPQTIWLTTFVSSLFLGLDYGLITAVIIALLTVIYRTQSPSYKVLGKLPETDVYIDIDAYEEVKEIPGIKIFQINAPIYYANSDLYSNALKRKTGVNPAVIMGARRKAMRKYAKEVGNANMANATVVKATQDAEVDGEDATKPEEEDGEVKYPPIVIKSTFPEEMQRFMPPGDNVHTVILDFTQVNFIDSVGVKTLAGIVKEYGDVGIYVYLAGCSAQVVNDLTRNRFFENPALWELLFHSIHDAVLGSQLREALAEQEASAPPSQEDLEPNATPATPEA

SEQ ID NO: 64360 - protein, 746 aa, Homo sapiens
MDHAEENEILAATQRYYVERPIFSHPVLQERLHTKDKVPDSIADKLKQAFTCTPKKIRNIIYMFLPITKWLPAYKFKEYVLGDLVSGISTGVLQLPQGLAFAMLAAVPPIFGLYSSFYPVIMYCFLGTSRHISIGPFAVISLMIGGVAVRLVPDDIVIPGGVNATNGTEARDALRVKVAMSVTLLSGIIQFCLGVCRFGFVAIYLTEPLVRGFTTAAAVHVFTSMLKYLFGVKTKRYSGIFSVVYSTVAVLQNVKNLNVCSLGVGLMVFGLLLGGKEFNERFKEKLPAPIPLEFFAVVMGTGISAGFNLKESYNVDVVGTLPLGLLPPANPDTSLFHLVYVDAIAIAIVGFSVTISMAKTLANKHGYQVDGNQELIALGLCNSIGSLFQTFSISCSLSRSLVQEGTGGKTQLAGCLASLMILLVILATGFLFESLPQAVLSAIVIVNLKGMFMQFSDLPFFWRTSKIELTIWLTTFVSSLFLGLDYGLITAVIIALLTVIYRTQSPSYKVLGKLPETDVYIDIDAYEEVKEIPGIKIFQINAPIYYANSDLYSNALKRKTGVNPAVIMGARRKAMRKYAKEVGNANMANATVVKATQDAEVDGEDATKPEEEDGEVKYPPIVIKSTFPEEMQRFMPPGDNVHTVILDFTQVNFIDSVGVKTLAGIVKEYGDVGIYVYLAGCSAQVVNDLTRNRFFENPALWELLFHSIHDAVLGSQLREALAEQEASAPPSQEDLEPNATPATPEA

SEQ ID NO: 64361 - protein, 707 aa, Homo sapiens
MDHAEENEILAATQRYYVERPIFSHPVLQERLHTKDKVPDSIADKLKQAFTCTPKKIRNIIYMFLPITKWLPAYKFKEYVLGDLVSGISTGVLQLPQGPFAVISLMIGGVAVRLVPDDIVIPGGVNATNGTEARDALRVKVAMSVTLLSGIIQFCLGVCRFGFVAIYLTEPLVRGFTTAAAVHVFTSMLKYLFGVKTKRYSGIFSVVYSTVAVLQNVKNLNVCSLGVGLMVFGLLLGGKEFNERFKEKLPAPIPLEFFAVVMGTGISAGFNLKESYNVDVVGTLPLGLLPPANPDTSLFHLVYVDAIAIAIVGFSVTISMAKTLANKHGYQVDGNQELIALGLCNSIGSLFQTFSISCSLSRSLVQEGTGGKTQLAGCLASLMILLVILATGFLFESLPQAVLSAIVIVNLKGMFMQFSDLPFFWRTSKIELTIWLTTFVSSLFLGLDYGLITAVIIALLTVIYRTQSPSYKVLGKLPETDVYIDIDAYEEVKEIPGIKIFQINAPIYYANSDLYSNALKRKTGVNPAVIMGARRKAMRKYAKEVGNANMANATVVKADAEVDGEDATKPEEEDGEVKYPPIVIKSTFPEEMQRFMPPGDNVHTVILDFTQVNFIDSVGVKTLAGIVKEYGDVGIYVYLAGCSAQVVNDLTRNRFFENPALWELLFHSIHDAVLGSQLREALAEQEASAPPSQEDLEPNATPATPEA

SEQ ID NO: 64362 - protein, 712 aa, Homo sapiens
MDHAEENEILAATQRYYVERPIFSHPVLQERLHTKDKVPDSIADKLKQAFTCTPKKIRNIIYMFLPITKWLPAYKFKEYVLGDLVSGISTGVLQLPQGLAFAMLAAVPPIFGLYSSFYPVIMYCFLGTSRHISIGPFAVISLMIGGVAVRLVPDDIVIPGGVNATNGTEARDALRVKVAMSVTLLSGIIQFCLGVCRFGFVAIYLTEPLVRGFTTAAAVHVFTSMLKYLFGVKTKRYSGIFSVVYSTVAVLQNVKNLNVCSLGVGLMVFGLLLGGKEFNERFKEKLPAPIPLEFFAVVMGTGISAGFNLKESYNVDVVGTLPLGLLPPANPDTSLFHLVYVDAIAIAIVGFSVTISMAKTLANKHGYQVDGNQELIALGLCNSIGSLFQTFSISCSLSRSLVQEGTGGKTQLAGCLASLMILLVILATGFLFESLPQTIWLTTFVSSLFLGLDYGLITAVIIALLTVIYRTQSPSYKVLGKLPETDVYIDIDAYEEVKEIPGIKIFQINAPIYYANSDLYSNALKRKTGVNPAVIMGARRKAMRKYAKEVGNANMANATVVKADAEVDGEDATKPEEEDGEVKYPPIVIKSTFPEEMQRFMPPGDNVHTVILDFTQVNFIDSVGVKTLAGIVKEYGDVGIYVYLAGCSAQVVNDLTRNRFFENPALWELLFHSIHDAVLGSQLREALAEQEASAPPSQEDLEPNATPATPEA

SEQ ID NO: 64363 - protein, 516 aa, Homo sapiens
MDHAEENEILAATQRYYVERPIFSHPVLQERLHTKDKVPDSIADKLKQAFTCTPKKIRNIIYMFLPITKWLPAYKFKEYVLGDLVSGISTGVLQLPQGLAFAMLAAVPPIFGLYSSFYPVIMYCFLGTSRHISIGPFAVISLMIGGVAVRLVPDDIVIPGGVNATNGTEARDALRVKVAMSVTLLSGIIQFCLGVCRFGFVAIYLTEPLVRGFTTAAAVHVFTSMLKYLFGVKTKRYSGIFSVVYSTVAVLQNVKNLNVCSLGVGLMVFGLLLGGKEFNERFKEKLPAPIPLEFFAVVMGTGISAGFNLKESYNVDVVGTLPLGLLPPANPDTSLFHLVYVDAIAIAIVGFSVTISMAKTLANKHGYQVDGNQELIALGLCNSIGSLFQTFSISCSLSRSLVQEGTGGKTQLAGCLASLMILLVILATGFLFESLPQAVLSAIVIVNLKGMFMQFSDLPFFWRTSKIELTIWLTTFVSSLFLGLDYGLITAVIIALLTVIYRTQSFHTEMTRRWRP

SEQ ID NO: 64364 - protein, 473 aa, Homo sapiens
MDHAEENEILAATQRYYVERPIFSHPVLQERLHTKDKVPDSIADKLKQAFTCTPKKIRNIIYMFLPITKWLPAYKFKEYVLGDLVSGISTGVLQLPQGLAFAMLAAVPPIFGLYSSFYPVIMYCFLGTSRHISIGPFAVISLMIGGVAVRLVPDDIVIPGGVNATNGTEARDALRVKVAMSVTLLSGIIQFCLGVCRFGFVAIYLTEPLVRGFTTAAAVHVFTSMLKYLFGVKTKRYSGIFSVVYSTVAVLQNVKNLNVCSLGVGLMVFGLLLGGKEFNERFKEKLPAPIPLEFFAVVMGTGISAGFNLKESYNVDVVGTLPLGLLPPANPDTSLFHLVYVDAIAIAIVGFSVTISMAKTLANKHGYQVDGNQELIALGLCNSIGSLFQTFSISCSLSRSLVQEGTGGKTQLAGCLASLMILLVILATGFLFESLPQTIWLTTFVSSLFLGLDYGLITAVIIALLTVIYRTQR

SEQ ID NO: 64365 - protein, 712 aa, Homo sapiens; identical to SEQ ID NO: 64362

SEQ ID NO: 64366 - protein, 447 aa, Homo sapiens
MDHAEENEILAATQRYYVERPIFSHPVLQERLHTKDKVPDSIADKLKQAFTCTPKKIRNIIYMFLPITKWLPAYKFKEYVLGDLVSGISTGVLQLPQGLAFAMLAAVPPIFGLYSSFYPVIMYCFLGTSRHISIGPFAVISLMIGGVAVRLVPDDIVIPGGVNATNGTEARDALRVKVAMSVTLLSGIIQFCLGVCRFGFVAIYLTEPLVRGFTTAAAVHVFTSMLKYLFGVKTKRYSGIFSVVYSTVAVLQNVKNLNVCSLGVGLMVFGLLLGGKEFNERFKEKLPAPIPLEFFAVVMGTGISAGFNLKESYNVDVVGTLPLGLLPPANPDTSLFHLVYVDAIAIAIVGFSVTISMAKTLANKHGYQVDGNQELIALGLCNSIGSLFQTFSISCSLSRSLVQEGTGGKTQTIWLTTFVSSLFLGLDYGLITAVIIALLTVIYRTQR

SEQ ID NO: 64367 - protein, 651 aa, Homo sapiens
MGLADASGPRDTQALLSATQAMDLRRRDYHMERPLLNQEHLEELGRWGSAPRTHQWRTWLQCSRARAYALLLQHLPVLVWLPRYPVRDWLLGDLLSGLSVAIMQLPQGLAYALLAGLPPVFGLYSSFYPVFIYFLFGTSRHISVVLEVCWKLPQSKVGTVVTAAVAGVVLVVVKLLNDKLQQQLPMPIPGELLTLIGATGISYGMGLKHRFEVDVVGNIPAGLVPPVAPNTQLFSKLVGSAFTIAVVGFAIAISLGKIFALRHGYRVDSNQELVALGLSNLIGGIFQCFPVSCSMSRSLVQESTGGNSQVAGAISSLFILLIIVKLGELFHDLPKAVLAAIIIVNLKGMLRQLSDMRSLWKANRADLLIWLVTFTATILLNLDLGLVVAVIFSLLLVVVRTQMPHYSVLGQVPDTDIYRDVAEYSEAKEVRGVKVFRSSATVYFANAEFYSDALKQRCGVDVDFLISQKKKLLKKQEQLKLKQLQKEEKLRKQAASPKGASVSINVNTSLEDMRSNNVEDCKMMVSSGDKMEDATANGQEDSKAPDGSTLKALGLPQPDFHSLILDLGALSFVDTVCLKSLKNIFHDFREIEVEVYMAACHSPVVSQLEAGHFFDASITKKHLFASVHDAVTFALQHPRPVPDSPVSVTRL

SEQ ID NO: 64368 - protein, 738 aa, Homo sapiens
MDLRRRDYHMERPLLNQEHLEELGRWGSAPRTHQWRTWLQCSRARAYALLLQHLPVLVWLPRYPVRDWLLGDLLSGLSVAIMQLPQGLAYALLAGLPPVFGLYSSFYPVFIYFLFGTSRHISVGTFAVMSVMVGSVTESLAPQALNDSMINETARDAARVQVASTLSVLVGLFQVGLGLIHFGFVVTYLSEPLVRGYTTAAAVQVFVSQLKYVFGLHLSSHSGPLSLIYTVLEVCWKLPQSKVGTVVTAAVAGVVLVVVKLLNDKLQQQLPMPIPGELLTLIGATGISYGMGLKHRFEVDVVGNIPAGLVPPVAPNTQLFSKLVGSAFTIAVVGFAIAISLGKIFALRHGYRVDSNQELVALGLSNLIGGIFQCFPVSCSMSRSLVQESTGGNSQVAGAISSLFILLIIVKLGELFHDLPKAVLAAIIIVNLKGMLRQLSDMRSLWKANRADLLIWLVTFTATILLNLDLGLVVAVIFSLLLVVVRTQMPHYSVLGQVPDTDIYRDVAEYSEAKEVRGVKVFRSSATVYFANAEFYSDALKQRCGVDVDFLISQKKKLLKKQEQLKLKQLQKEEKLRKQAASPKGASVSINVNTSLEDMRSNNVEDCKMMQVSSGDKMEDATANGQEDSKAPDGSTLKALGLPQPDFHSLILDLGALSFVDTVCLKSLKNIFHDFREIEVEVYMAACHSPVVSQLEAGHFFDASITKKHLFASVHDAVTFALQHPRPVPDSPVSVTRL

SEQ ID NO: 64369 - protein, 740 aa, Homo sapiens
MGLADASGPRDTQALLSATQAMDLRRRDYHMERPLLNQEHLEELGRWGSAPRTHQWRTWLQCSRARAYALLLQHLPVLVWLPRYPVRDWLLGDLLSGLSVAIMQLPQGLAYALLAGLPPVFGLYSSFYPVFIYFLFGTSRHISVGTFAVMSVMVGSVTESLAPQALNDSMINETARDAARVQVASTLSVLVGLFQVGLGLIHFGFVVTYLSEPLVRGYTTAAAVQVFVSQLKYVFGLHLSSHSGPLSLIYTVLEVCWKLPQSKVGTVVTAAVAGVVLVVVKLLNDKLQQQLPMPIPGELLTLIGATGISYGMGLKHRFEVDVVGNIPAGLVPPVAPNTQLFSKLVGSAFTIAVVGFAIAISLGKIFALRHGYRVDSNQELVALGLSNLIGGIFQCFPVSCSMSRSLVQESTGGNSQVAGAISSLFILLIIVKLGELFHDLPKAVLAAIIIVNLKGMLRQLSDMRSLWKANRADLLIWLVTFTATILLNLDLGLVVAVIFSLLLVVVRTQMPHYSVLGQVPDTDIYRDVAEYSEAKEVRGVKVFRSSATVYFANAEFYSDALKQRCGVDVDFLISQKKKLLKKQEQLKLKQLQKEEKLRKQAGPLLSACLAPQQVSSGDKMEDATANGQEDSKAPDGSTLKALGLPQPDFHSLILDLGALSFVDTVCLKSLKNIFHDFREIEVEVYMAACHSPVVSQLEAGHFFDASITKKHLFASVHDAVTFALQHPRPVPDSPVSVTRL

SEQ ID NO: 64370 - protein, 759 aa, Homo sapiens
MGLADASGPRDTQALLSATQAMDLRRRDYHMERPLLNQEHLEELGRWGSAPRTHQWRTWLQCSRARAYALLLQHLPVLVWLPRYPVRDWLLGDLLSGLSVAIMQLPQGLAYALLAGLPPVFGLYSSFYPVFIYFLFGTSRHISVGTFAVMSVMVGSVTESLAPQALNDSMINETARDAARVQVASTLSVLVGLFQVGLGLIHFGFVVTYLSEPLVRGYTTAAAVQVFVSQLKYVFGLHLSSHSGPLSLIYTVLEVCWKLPQSKVGTVVTAAVAGVVLVVVKLLNDKLQQQLPMPIPGELLTLIGATGISYGMGLKHRFEVDVVGNIPAGLVPPVAPNTQLFSKLVGSAFTIAVVGFAIAISLGKIFALRHGYRVDSNQELVALGLSNLIGGIFQCFPVSCSMSRSLVQESTGGNSQVAGAISSLFILLIIVKLGELFHDLPKAVLAAIIIVNLKGMLRQLSDMRSLWKANRADLLIWLVTFTATILLNLDLGLVVAVIFSLLLVVVRTQMPHYSVLGQVPDTDIYRDVAEYSEAKEVRGVKVFRSSATVYFANAEFYSDALKQRCGVDVDFLISQKKKLLKKQEQLKLKQLQKEEKLRKQAASPKGASVSINVNTSLEDMRSNNVEDCKMMQVSSGDKMEDATANGQEDSKAPDGSTLKALGLPQPDFHSLILDLGALSFVDTVCLKSLKNIFHDFREIEVEVYMAACHSPVVSQLEAGHFFDASITKKHLFASVHDAVTFALQHPRPVPDSPVSVTRL

SEQ ID NO: 64371 - protein, 758 aa, Homo sapiens
MGLADASGPRDTQALLSATQAMDLRRRDYHMERPLLNQEHLEELGRWGSAPRTHQWRTWLQCSRARAYALLLQHLPVLVWLPRYPVRDWLLGDLLSGLSVAIMQLPQGLAYALLAGLPPVFGLYSSFYPVFIYFLFGTSRHISVGTFAVMSVMVGSVTESLAPQALNDSMINETARDAARVQVASTLSVLVGLFQVGLGLIHFGFVVTYLSEPLVRGYTTAAAVQVFVSQLKYVFGLHLSSHSGPLSLIYTVLEVCWKLPQSKVGTVVTAAVAGVVLVVVKLLNDKLQQQLPMPIPGELLTLIGATGISYGMGLKHRFEVDVVGNIPAGLVPPVAPNTQLFSKLVGSAFTIAVVGFAIAISLGKIFALRHGYRVDSNQELVALGLSNLIGGIFQCFPVSCSMSRSLVQESTGGNSQVAGAISSLFILLIIVKLGELFHDLPKAVLAAIIIVNLKGMLRQLSDMRSLWKANRADLLIWLVTFTATILLNLDLGLVVAVIFSLLLVVVRTQMPHYSVLGQVPDTDIYRDVAEYSEAKEVRGVKVFRSSATVYFANAEFYSDALKQRCGVDVDFLISQKKKLLKKQEQLKLKQLQKEEKLRKQAASPKGASVSINVNTSLEDMRSNNVEDCKMMVSSGDKMEDATANGQEDSKAPDGSTLKALGLPQPDFHSLILDLGALSFVDTVCLKSLKNIFHDFREIEVEVYMAACHSPVVSQLEAGHFFDASITKKHLFASVHDAVTFALQHPRPVPDSPVSVTRL

SEQ ID NO: 64372 - protein, 753 aa, Homo sapiens
MGLADASGPRDTQALLSATQAMDLRRRDYHMERPLLNQEHLEELGRWGSAPRTHQWRTWLQCSRARAYALLLQHLPVLVWLPRYPVRDWLLGDLLSGLSVAIMQLPQDLLSRLHCYHSTLGLAYALLAGLPPVFGLYSSFYPVFIYFLFGTSRHISVGTFAVMSVMVGSVTESLAPQALNDSMINETARDAARVQVASTLSVLVGLFQVGLGLIHFGFVVTYLSEPLVRGYTTAAAVQVFVSQLKYVFGLHLSSHSGPLSLIYTVLEVCWKLPQSKVGTVVTAAVAGVVLVVVKLLNDKLQQQLPMPIPGELLTLIGATGISYGMGLKHRFEVDVVGNIPAGLVPPVAPNTQLFSKLVGSAFTIAVVGFAIAISLGKIFALRHGYRVDSNQELVALGLSNLIGGIFQCFPVSCSMSRSLVQESTGGNSQVAGAISSLFILLIIVKLGELFHDLPKAVLAAIIIVNLKGMLRQLSDMRSLWKANRADLLIWLVTFTATILLNLDLGLVVAVIFSLLLVVVRTQMPHYSVLGQVPDTDIYRDVAEYSEAKEVRGVKVFRSSATVYFANAEFYSDALKQRCGVDVDFLISQKKKLLKKQEQLKLKQLQKEEKLRKQAGPLLSACLAPQQVSSGDKMEDATANGQEDSKAPDGSTLKALGLPQPDFHSLILDLGALSFVDTVCLKSLKNIFHDFREIEVEVYMAACHSPVVSQLEAGHFFDASITKKHLFASVHDAVTFALQHPRPVPDSPVSVTRL

SEQ ID NO: 64373 - protein, 723 aa, Homo sapiens
MGLADASGPRDTQALLSATQAMDLRRRDYHMERPLLNQEHLEELGRWGSAPRTHQWRTWLQCSRARAYALLLQHLPVLVWLPRYPVRDWLLGDLLSGLSVAIMQLPQGLAYALLAGLPPVFGLYSSFYPVFIYFLFGTSRHISVATPGPLPLLTAPGRPTGGAGPDPLRLRGHLPVRTSCPRLYHSCSCAGLRLTAQVCVWPPSEQPLWATVPHLLLEVCWKLPQSKVGTVVTAAVAGVVLVVVKLLNDKLQQQLPMPIPGELLTLIGATGISYGMGLKHRFEVDVVGNIPAGLVPPVAPNTQLFSKLVGSAFTIAVVGFAIAISLGKIFALRHGYRVDSNQELVALGLSNLIGGIFQCFPVSCSMSRSLVQESTGGNSQVAGAISSLFILLIIVKLGELFHDLPKAVLAAIIIVNLKGMLRQLSDMRSLWKANRADLLIWLVTFTATILLNLDLGLVVAVIFSLLLVVVRTQMPHYSVLGQVPDTDIYRDVAEYSEAKEVRGVKVFRSSATVYFANAEFYSDALKQRCGVDVDFLISQKKKLLKKQEQLKLKQLQKEEKLRKQAASPKGASVSINVNTSLEDMRSNNVEDCKMMQVSSGDKMEDATANGQEDSKAPDGSTLKALGLPQPDFHSLILDLGALSFVDTVCLKSLKNIFHDFREIEVEVYMAACHSPVVSQLEAGHFFDASITKKHLFASVHDAVTFALQHPRPVPDSPVSVTRL

SEQ ID NO: 64374 - protein, 646 aa, Homo sapiens
MRAPGAGAASVVSLALLWLLGLPWTWSAAAALGVYVGSGGWRFLRIVCKTARRDLFGLSVLIRVRLELRRHQRAGHTIPRIFQAVVQRQPERLALVDAGTGECWTFAQLDAYSNAVANLFRQLGFAPGDVVAIFLEGRPEFVGLWLGLAKAGMEAALLNVNLRREPLAFCLGTSGAKALIFGGEMVAAVAEVSGHLGKSLIKFCSGDLGPEGILPDTHLLDPLLKEASTAPLAQIPSKGMDDRLFYIYTSGTTGLPKAAIVVHSRYYRMAAFGHHAYRMQAADVLYDCLPLYHSAGNIIGVGQCLIYGLTVVLRKKFSASRFWDDCIKYNCTVVQYIGEICRYLLKQPVREAERRHRVRLAVGNGLRPAIWEEFTERFGVRQIGEFYGATECNCSIANMDGKVGSCGFNSRILPHVYPIRLVKVNEDTMELLRDAQGLCIPCQAGEPGLLVGQINQQDPLRRFDGYVSESATSKKIAHSVFSKGDSAYLSGDVLVMDELGYMYFRDRSGDTFRWRGENVSTTEVEGVLSRLLGQTDVAVYGVAVPGVEGKAGMAAVADPHSLLDPNAIYQELQKVLAPYARPIFLRLLPQVDTTGTFKIQKTRLQREGFDPRQTSDRLFFLDLKQGHYLPLNEAVYTRICSGAFAL

SEQ ID NO: 64375 - protein, 240 aa, Homo sapiens
PEFVGLWLGLAKAGMEAALLNVNLRREPLAFCLGTSGAKALIFGGEMVAAVAEVSGHLGKSLIKFCSGDLGPEGILPDTHLLDPLLKEASTAPLAQIPSKGMDDRLFYIYTSGTTGLPKAAIVVHSRYYRMAAFGHHAYRMQAADVLYDCLPLYHSAGNIIGVGQCLIYGLTVVLRKKFSASRFWDDCIKYNCTWHGPSWTEKLEPQRNPCLSAALVPLCLPPLPAFQPLSPSIPVPVWP

SEQ ID NO: 64376 - protein, 646 aa, Homo sapiens; identical to SEQ ID NO: 64374

SEQ ID NO: 64377 - protein, 620 aa, Homo sapiens
MLSAIYTVLAGLLFLPLLVNLCCPYFFQDIGYFLKVAAVGRRVRSYGKRRPARTILRAFLEKARQTPHKPFLLFRDETLTYAQVDRRSNQVARALHDHLGLRQGDCVALLMGNEPAYVWLWLGLVKLGCAMACLNYNIRAKSLLHCFQCCGAKVLLVSPELQAAVEEILPSLKKDDVSIYYVSRTSNTDGIDSFLDKVDEVSTEPIPESWRSEVTFSTPALYIYTSGTTGLPKAAMITHQRIWYGTGLTFVSGLKADDVIYITLPFYHSAALLIGIHGCIVAGATLALRTKFSASQFWDDCRKYNVTVIQYIGELLRYLCNSPQKPNDRDHKVRLALGNGLRGDVWRQFVKRFGDICIYEFYAATEGNIGFMNYARKVGAVGRVNYLQKKIITYDLIKYDVEKDEPVRDENGYCVRVPKGEVGLLVCKITQLTPFNGYAGAKAQTEKKKLRDVFKKGDLYFNSGDLLMVDHENFIYFHDRVGDTFRWKGENVATTEVADTVGLVDFVQEVNVYGVHVPDHEGRIGMASIKMKENHEFDGKKLFQHIADYLPSYARPRFLRIQDTIEITGTFKHRKMTLVEEGFNPAVIKDALYFLDDTAKMYVPMTEDIYNAISAKTLKL

SEQ ID NO: 64378 - protein, 567 aa, Homo sapiens
MLSAIYTVLAGLLFLPLLVNLCCPYFFQDIGYFLKVAAVGRRVRSYGKRRPARTILRAFLEKARQTPHKPFLLFRDETLTYAQVDRRSNQVARALHDHLGLRQGDCVALLMGNEPAYVWLWLGLVKLGCAMACLNYNIRAKSLLHCFQCCGAKVLLVSPELQAAVEEILPSLKKDDVSIYYVSRTSNTDGIDSFLDKVDEVSTEPIPESWRSEVTFSTPALYIYTSGTTGATLALRTKFSASQFWDDCRKYNVTVIQYIGELLRYLCNSPQKPNDRDHKVRLALGNGLRGDVWRQFVKRFGDICIYEFYAATEGNIGFMNYARKVGAVGRVNYLQKKIITYDLIKYDVEKDEPVRDENGYCVRVPKGEVGLLVCKITQLTPFNGYAGAKAQTEKKKLRDVFKKGDLYFNSGDLLMVDHENFIYFHDRVGDTFRWKGENVATTEVADTVGLVDFVQEVNVYGVHVPDHEGRIGMASIKMKENHEFDGKKLFQHIADYLPSYARPRFLRIQDTIEITGTFKHRKMTLVEEGFNPAVIKDALYFLDDTAKMYVPMTEDIYNAISAKTLKL

SEQ ID NO: 64379 - protein, 811 aa, Homo sapiens
MPKPPKPRNNLEDRHNPGIQGRREHRPGPGRVRAASSPGGSAPRAERRLWGEGWESGAAPHPHSSRVSALRPCGVVGAWVGMGVCQRTRAPWKEKSQLERAALGFRKGGSGMFASGWNQTVPIEEAGSMAALLLLPLLLLLPLLLLKLHLWPQLRWLPADLAFAVRALCCKRALRARALAAAAADPEGPEGGCSLAWRLAELAQQRAAHTFLIHGSRRFSYSEAERESNRAARAFLRALGWDWGPDGGDSGEGSAGEGERAAPGAGDAAAGSGAEFAGGDGAARGGGAAAPLSPGATVALLLPAGPEFLWLWFGLAKAGLRTAFVPTALRRGPLLHCLRSCGARALVLAPEFLESLEPDLPALRAMGLHLWAAGPGTHPAGISDLLAEVSAEVDGPVPGYLSSPQSITDTCLYIFTSGTTGLPKAARISHLKILQCQGFYQLCGVHQEDVIYLALPLYHMSGSLLGIVGCMGIGATVVLKSKFSAGQFWEDCQQHRVTVFQYIGELCRYLVNQPPSKAERGHKVRLAVGSGLRPDTWERFVRRFGPLQVLETYGLTEGNVATINYTGQRGAVGRASWLYKHIFPFSLIRYDVTTGEPIRDPQGHCMATSPGEPGLLVAPVSQQSPFLGYAGGPELAQGKLLKDVFRPGDVFFNTGDLLVCDDQGFLRFHDRTGDTFRWKGENVATTEVAEVFEALDFLQEVNVYGVTVPGHEGRAGMAALVLRPPHALDLMQLYTHVSENLPPYARPRFLRLQESLATTETFKQQKVRMANEGFDPSTLSDPLYVLDQAVGAYLPLTTARYSALLAGNLRI

SEQ ID NO: 64380 - protein, 730 aa, Homo sapiens
MGVCQRTRAPWKEKSQLERAALGFRKGGSGMFASGWNQTVPIEEAGSMAALLLLPLLLLLPLLLLKLHLWPQLRWLPADLAFAVRALCCKRALRARALAAAAADPEGPEGGCSLAWRLAELAQQRAAHTFLIHGSRRFSYSEAERESNRAARAFLRALGWDWGPDGGDSGEGSAGEGERAAPGAGDAAAGSGAEFAGGDGAARGGGAAAPLSPGATVALLLPAGPEFLWLWFGLAKAGLRTAFVPTALRRGPLLHCLRSCGARALVLAPEFLESLEPDLPALRAMGLHLWAAGPGTHPAGISDLLAEVSAEVDGPVPGYLSSPQSITDTCLYIFTSGTTGLPKAARISHLKILQCQGFYQLCGVHQEDVIYLALPLYHMSGSLLGIVGCMGIGATVVLKSKFSAGQFWEDCQQHRVTVFQYIGELCRYLVNQPPSKAERGHKVRLAVGSGLRPDTWERFVRRFGPLQVLETYGLTEGNVATINYTGQRGAVGRASWLYKHIFPFSLIRYDVTTGEPIRDPQGHCMATSPGEPGLLVAPVSQQSPFLGYAGGPELAQGKLLKDVFRPGDVFFNTGDLLVCDDQGFLRFHDRTGDTFRWKGENVATTEVAEVFEALDFLQEVNVYGVTVPGHEGRAGMAALVLRPPHALDLMQLYTHVSENLPPYARPRFLRLQESLATTETFKQQKVRMANEGFDPSTLSDPLYVLDQAVGAYLPLTTARYSALLAGNLRI

SEQ ID NO: 64381 - protein, 643 aa, Homo sapiens
MLLGASLVGVLLFSKLVLKLPWTQVGFSLLFLYLGSGGWRFIRVFIKTIRRDIFGGLVLLKVKAKVRQCLQERRTVPILFASTVRRHPDKTALIFEGTDTHWTFRQLDEYSSSVANFLQARGLASGDVAAIFMENRNEFVGLWLGMAKLGVEAALINTNLRRDALLHCLTTSRARALVFGSEMASAICEVHASLDPSLSLFCSGSWEPGAVPPSTEHLDPLLKDAPKHLPSCPDKGFTDKLFYIYTSGTTGLPKAAIVVHSRYYRMAALVYYGFRMRPNDIVYDCLPLYHSAGNIVGIGQCLLHGMTVVIRKKFSASRFWDDCIKYNCTIVQYIGELCRYLLNQPPREAENQHQVRMALGNGLRQSIWTNFSSRFHIPQVAEFYGATECNCSLGNFDSQVGACGFNSRILSFVYPIRLVRVNEDTMELIRGPDGVCIPCQPGEPGQLVGRIIQKDPLRRFDGYLNQGANNKKIAKDVFKKGDQAYLTGDVLVMDELGYLYFRDRTGDTFRWKGENVSTTEVEGTLSRLLDMADVAVYGVEVPGTEGRAGMAAVASPTGNCDLERFAQVLEKELPLYARPIFLRLLPELHKTGTYKFQKTELRKEGFDPAIVKDPLFYLDAQKGRYVPLDQEAYSRIQAGEEKL

SEQ ID NO: 64382 - protein, 237 aa, Homo sapiens
MPLTLSTLLQPGRIWTGRRAAEPTPGHNAAWSLSGGGAAVLQAGAETALDPGGILPVVPLLGIWRLALHPGLHQDHQAYLTGDVLVMDELGYLYFRDRTGDTFRWKGENVSTTEVEGTLSRLLDMADVAVYGVEVPGTEGRAGMAAVASPTGNCDLERFAQVLEKELPLYARPIFLRLLPELHKTGTYKFQKTELRKEGFDPAIVKDPLFYLDAQKGRYVPLDQEAYSRIQAGEEKL

SEQ ID NO: 64383 - protein, 690 aa, Homo sapiens
MGVRQQLALLLLLLLLLWGLGQPVWPVAVALTLRWLLGDPTCCVLLGLAMLARPWLGPWVPHGLSLAAAALALTLLPARLPPGLRWLPADVIFLAKILHLGLKIRGCLSRQPPDTFVDAFERRARAQPGRALLVWTGPGAGSVTFGELDARACQAAWALKAELGDPASLCAGEPTALLVLASQAVPALCMWLGLAKLGCPTAWINPHGRGMPLAHSVLSSGARVLVVDPDLRESLEEILPKLQAENIRCFYLSHTSPTPGVGALGAALDAAPSHPVPADLRAGITWRSPALFIYTSGTTGLPKPAILTHERVLQMSKMLSLSGATADDVVYTVLPLYHVMGLVVGILGCLDLGATCVLAPKFSTSCFWDDCRQHGVTVILYVGELLRYLCNIPQQPEDRTHTVRLAMGNGLRADVWETFQQRFGPIRIWEVYGSTEGNMGLVNYVGRCGALGKMSCLLRMLSPFELVQFDMEAAEPVRDNQGFCIPVGLGEPGLLLTKVVSQQPFVGYRGPRELSERKLVRNVRQSGDVYYNTGDVLAMDREGFLYFRDRLGDTFRWKGENVSTHEVEGVLSQVDFLQQVNVYGVCVPGCEGKVGMAAVQLAPGQTFDGEKLYQHVRAWLPAYATPHFIRIQDAMEVTSTFKLMKTRLVREGFNVGIVVDPLFVLDNRAQSFRPLTAEMYQAVCEGTWRL

SEQ ID NO: 64384 - protein, 649 aa, Homo sapiens
MENDPSRRRESISLTPVAKGLENMGADFLESLEEGQLPRSDLSPAEIRSSWSEAAPKPFSRWRNLQPALRARSFCREHMQLFRWIGTGLLCTGLSAFLLVACLLDFQRALALFVLTCVVLTFLGHRLLKRLLGPKLRRFLKPQGHPRLLLWFKRGLALAAFLGLVLWLSLDTSQRPEQLVSFAGICVFVALLFACSKHHCAVSWRAVSWGLGLQFVLGLLVIRTEPGFIAFEWLGEQIRIFLSYTKAGSSFVFGEALVKDVFAFQVLPIIVFFSCVISVLYHVGLMQWVILKIAWLMQVTMGTTATETLSVAGNIFVSQTEAPLLIRPYLADMTLSEVHVVMTGGYATIAGSLLGAYISFGIDATSLIAASVMAAPCALALSKLVYPEVEESKFRREEGVKLTYGDAQNLIEAASTGAAISVKVVANIAANLIAFLAVLDFINAALSWLGDMVDIQGLSFQLICSYILRPVAFLMGVAWEDCPVVAELLGIKLFLNEFVAYQDLSKYKQRRLAGAEEWVGDRKQWISVRAEVLTTFALCGFANFSSIGIMLGGLTSMVPQRKSDFSQIVLRALFTGACVSLVNACMAGILYMPRGAEVDCMSLLNTTLSSSSFEIYQCCREAFQSVNPEFSPEALDNCCRFYNHTICAQ

SEQ ID NO: 64385 - protein, 175 aa, Homo sapiens
MENDPSRRRESISLTPVAKGLENMGADFLESLEEGQLPRSDLSPAEIRSSWSEAAPKPFSRWRNLQPALRARSFCREHMQLFRWIGTGLLCTGLSAFLLVACLLDFQRALALFVLTCVVLTFLGHRLLKRLLGPKLRRFLKPQGHPRLLLWFKRDPRPWSKEGPNQYLPQITWTV

SEQ ID NO: 64386 - protein, 649 aa, Homo sapiens; identical to SEQ ID NO: 64384

SEQ ID NO: 64387 - protein, 543 aa, Homo sapiens
MENDPSRRRESISLTPVAKGLENMGADFLESLEEGQLPRSDLSPAEIRSSWSEAAPKPFSRWRNLQPALRARSFCREHMQLFRWIGTGLLCTGLSAFLLVACLLDFQRALALFVLTCVVLTFLGHRLLKRLLGPKLRRFLKPQGHPRLLLWFKRGLALAAFLGLVLWLSLDTSQRPEQLVSFAGICVFVALLFACSKHHCAVSWRAVSWGLGLQFVLGLLVIRTEPGFIAFEWLGEQIRIFLSYTKAGSSFVFGEALVKDVFAFQVLPIIVFFSCVISVLYHVGLMQWVILKIAWLMQVTMGTTATETLSVAGNIFVSQTEAPLLIRPYLADMTLSEVHVVMTGGYATIAGSLLGAYISFGIDATSLIAASVMAAPCALALSKLVYPEVEESKFRREEGVKLTYGDAQNLIEAASTGAAISVKVVANIAANLIAFLAVLDFINAALSWLGDMVDIQGLSFQLICSYILRPVAFLMGVAWEDCPVVAELLGIKLFLNEFVAYQDLSKYKQRRLAGAEEWVGDRKQWISRRGLAMLTRLVLNSWP

SEQ ID NO: 64388 - protein, 636 aa, Homo sapiens
MENDPSRRRESISLTPVAKGLENMGADFLESLEEGQLPRSDLSPAEIRSSWSEAAPKPFSRWRNLQPALRARSFCREHMQLFRWIGTGLLCTGLSAFLLVACLLDFQRALALFVLTCVVLTFLGHRLLKRLLGPKLRRFLKPQGHPRLLLWFKRGLALAAFLGLVLWLSLDTSQRPEQLVSFAGICVFVALLFACSKHHCAVSWRAVSWGLGLQFVLGLLVIRTEPGFIAFEWLGEQIRIFLSYTKAGSSFVFGEALVKDVFAFQVLPIIVFFSCVISVLYHVGLMQWVILKIAWLMQVTMGTTATETLSVAGNIFVSQTEAPLLIRPYLADMTLSEVHVVMTGGYATIAGSLLGAYISFGIDATSLIAASVMAAPCALALSKLVYPEVEESKFRREEGVKLTYGDAQNLIEAASTGAAISVKVVANIAANLIAFLAVLDFINAALSWLGDMVDIQGLSFQLICSYILRPVAFLMGVAWEDCPVVAELLGIKLFLNEFVAYQDLSKYKQRRLAGAEEWVGDRKQWISVRAEVLTTFALCGFANFSSIGIMLGGLTSMVPQRKSDFSQIVLRALFTGACVSLVNACMAGILYMPRGAEVDCMSLLNTTLSSSSFEIYQCCREAFQRIFKSTPAESQP

SEQ ID NO: 64389 - protein, 287 aa, Homo sapiens
MQLFRWIGTGLLCTGLSAFLLVACLLDFQRALALFVLTCVVLTFLGHRLLKRLLGPKLRRFLKPQGHPRLLLWFKRGLALAAFLGLVLWLSLDTSQRPEQLVSFAGICVFVALLFACSKHHCAVSWRAVSWGLGLQFVLGLLVIRTEPGFIAFEWLGEQIRIFLSYTKAGSSFVFGEALVKDVFAFQVLPIIVFFSCVISVLYHVGLMQWVILKIAWLMQVTMGTTATETLSVAGNIFVSQTEAPLLIRPYLADMTLSEVHVVMTGGYATIAGSLLGAYISFGLEKL

SEQ ID NO: 64390 - protein, 483 aa, Homo sapiens
MENDPSRRRESISLTPVAKGLENMGADFLESLEEGQLPRSDLSPAEIRSSWSEAAPKPFSRWRNLQPALRARSFCREHMQLFRWIGTGLLCTGLSAFLLVACLLDFQRALALFVLTCVVLTFLGHRLLKRLLGPKLRRFLKPQGHPRLLLWFKRGLALAAFLGLVLWLSLDTSQRPEQLVSFAGICVFVALLFACSKHHCAVSWRAVSWGLGLQFVLGLLVIRTEPGFIAFEWLGEQIRIFLSYTKAGSSFVFGEALVKDVFAFQVLPIIVFFSCVISVLYHVGLMQWVILKIAWLMQVTMGTTATETLSVAGNIFVSQTEAPLLIRPYLADMTLSEVHVVMTGGYATIAGSLLGAYISFGVRAEVLTTFALCGFANFSSIGIMLGGLTSMVPQRKSDFSQIVLRALFTGACVSLVNACMAGILYMPRGAEVDCMSLLNTTLSSSSFEIYQCCREAFQSVNPEFSPEALDNCCRFYNHTICAQ

SEQ ID NO: 64391 - protein, 658 aa, Homo sapiens
MEKASGRQSIALSTVETGTVNPGLELMEKEVEPEGSKRTDAQGHSLGDGLGPSTYQRRSRWPFSKARSFCKTHASLFKKILLGLLCLAYAAYLLAACILNFQRALALFVITCLVIFVLVHSFLKKLLGKKLTRCLKPFENSRLRLWTKWVFAGVSLVGLILWLALDTAQRPEQLIPFAGICMFILILFACSKHHSAVSWRTVFSGLGLQFVFGILVIRTDLGYTVFQWLGEQVQIFLNYTVAGSSFVFGDTLVKDVFAFQALPIIIFFGCVVSILYYLGLVQWVVQKVAWFLQITMGTTATETLAVAGNIFVGMTEAPLLIRPYLGDMTLSEIHAVMTGGFATISGTVLGAFIAFGVDASSLISASVMAAPCALASSKLAYPEVEESKFKSEEGVKLPRGKERNVLEAASNGAVDAIGLATNVAANLIAFLAVLAFINAALSWLGELVDIQGLTFQVICSYLLRPMVFMMGVEWTDCPMVAEMVGIKFFINEFVAYQQLSQYKNKRLSGMEEWIEGEKQWISVRAEIITTFSLCGFANLSSIGITLGGLTSIVPHRKSDLSKVVVRALFTGACVSLISACMAGILYVPRGAEADCVSFPNTSFTNRTYETYMCCRGLFQSTSLNGTNPPSFSGPWEDKEFSAMALTNCCGFYNNTVCA

SEQ ID NO: 64392 - protein, 691 aa, Homo sapiens
MELRSTAAPRAEGYSNVGFQNEENFLENENTSGNNSIRSRAVQSREHTNTKQDEEQVTVEQDSPRNREHMEDDDEEMQQKGCLERRYDTVCGFCRKHKTTLRHIIWGILLAGYLVMVISACVLNFHRALPLFVITVAAIFFVVWDHLMAKYEHRIDEMLSPGRRLLNSHWFWLKWVIWSSLVLAVIFWLAFDTAKLGQQQLVSFGGLIMYIVLLFLFSKYPTRVYWRPVLWGIGLQFLLGLLILRTDPGFIAFDWLGRQVQTFLEYTDAGASFVFGEKYKDHFFAFKVLPIVVFFSTVMSMLYYLGLMQWIIRKVGWIMLVTTGSSPIESVVASGNIFVGQTESPLLVRPYLPYITKSELHAIMTAGFSTIAGSVLGAYISFGVPSSHLLTASVMSAPASLAAAKLFWPETEKPKITLKNAMKMESGDSGNLLEAATQGASSSISLVANIAVNLIAFLALLSFMNSALSWFGNMFDYPQLSFELICSYIFMPFSFMMGVEWQDSFMVARLIGYKTFFNEFVAYEHLSKWIHLRKEGGPKFVNGVQQYISIRSEIIATYALCGFANIGSLGIVIGGLTSMAPSRKRDIASGAVRALIAGTVACFMTACIAGILSSTPVDINCHHVLENAFNSTFPGNTTKVIACCQSLLSSTVAKGPGEVIPGGNHSLYSLKGCCTLLNPSTFNCNGISNTF

SEQ ID NO: 64393 - protein, 622 aa, Homo sapiens
MEDDDEEMQQKGCLERRYDTVCGFCRKHKTTLRHIIWGILLAGYLVMVISACVLNFHRALPLFVITVAAIFFVVWDHLMAKYEHRIDEMLSPGRRLLNSHWFWLKWVIWSSLVLAVIFWLAFDTAKLGQQQLVSFGGLIMYIVLLFLFSKYPTRVYWRPVLWGIGLQFLLGLLILRTDPGFIAFDWLGRQVQTFLEYTDAGASFVFGEKYKDHFFAFKVLPIVVFFSTVMSMLYYLGLMQWIIRKVGWIMLVTTGSSPIESVVASGNIFVGQTESPLLVRPYLPYITKSELHAIMTAGFSTIAGSVLGAYISFGVPSSHLLTASVMSAPASLAAAKLFWPETEKPKITLKNAMKMESGDSGNLLEAATQGASSSISLVANIAVNLIAFLALLSFMNSALSWFGNMFDYPQLSFELICSYIFMPFSFMMGVEWQDSFMVARLIGYKTFFNEFVAYEHLSKWIHLRKEGGPKFVNGVQQYISIRSEIIATYALCGFANIGSLGIVIGGLTSMAPSRKRDIASGAVRALIAGTVACFMTACIAGILSSTPVDINCHHVLENAFNSTFPGNTTKVIACCQSLLSSTVAKGPGEVIPGGNHSLYSLKGCCTLLNPSTFNCNGISNTF

SEQ ID NO: 64394 - protein, 535 aa, Homo sapiens
MRRERTRGPQAWEFPSPTKSGCSLQSLSRDLRELREGEKPEDQAETEESWQGLARKTPGKACAPEGGSCQPGKTENTITMTTSHQPQDRYKAVWLIFFMLGLGTLLPWNFFMTATQYFTNRLDMSQNVSLVTAELSKDAQASAAPAAPLPERNSLSAIFNNVMTLCAMLPLLLFTYLNSFLHQRIPQSVRILGSLVAILLVFLITAILVKVQLDALPFFVITMIKIVLINSFGAILQGSLFGLAGLLPASYTAPIMSGQGLAGFFASVAMICAIASGSELSESAFGYFITACAVIILTIICYLGLPRLEFYRYYQQLKLEGPGEQETKLDLISKGEEPRAGKEESGVSVSNSQPTNESHSIKAILKNISVLAFSVCFIFTITIGMFPAVTVEVKSSIAGSSTWERYFIPVSCFLTFNIFDWLGRSLTAVFMWPGKDSRWLPSLVLARLVFVPLLLLCNIKPRRYLTVVFEHDAWFIFFMAAFAFSNGYLASLCMCFGPKKVKPAEAETAGAIMAFFLCLGLALGAVFSFLFRAIV

SEQ ID NO: 64395 - protein, 456 aa, Homo sapiens [sequence omitted]

SEQ ID NO: 64396 - protein, 456 aa, Homo sapiens [sequence omitted]

SEQ ID NO: 64397 - protein, 456 aa, Homo sapiens [sequence omitted]

SEQ ID NO: 64398 - protein, 456 aa, Homo sapiens [sequence omitted]

SEQ ID NO: 64399 - protein, 456 aa, Homo sapiens [sequence omitted]

SEQ ID NO: 64400 - protein, 456 aa, Homo sapiens [sequence omitted]

SEQ ID NO: 64401 - protein, 456 aa, Homo sapiens [sequence omitted]

SEQ ID NO: 64402 - protein, 456 aa, Homo sapiens [sequence omitted]

SEQ ID NO: 64403 - protein, 456 aa, Homo sapiens [sequence omitted]

SEQ ID NO: 64404 - protein, 169 aa, Homo sapiens
MRRERTRGPQAWEFPSPTKSGCSLQSLSRYKAVWLIFFMLGLGTLLPWNFFMTATQYFTNRLDMSQNVSLVTAELSKDAQASAAPAAPLPERNSLSAIFNNVMTLCAMLPLLLFTYLNSFLHQRIPQSVRILGSLVAILLVFLITAILVKVQLDALPFFVITMIKIVLI

SEQ ID NO: 64405 - protein, 456 aa, Homo sapiens
MARGDAPRDSYHLVGISFFILGLGTLLPWNFFITAIPYFQARLAGAGNSTARILSTNHTGPEDAFNFNNWVTLLSQLPLLLFTLLNSFLYQCVPETVRILGSLLAILLLFALTAALVKVDMSPGPFFSITMASVCFINSFSAVLQGSLFGQLGTMPSTYSTLFLSGQGLAGIFAALAMLLSMASGVDAETSALGYFITPCVGILMSIVCYLSLPHLKFARYYLANKSSQAQAQELETKAELLQSDENGIPSSPQKVALTLDLDLEKEPESEPDEPQKPGKPSVFTVFQKIWLTALCLVLVFTVTLSVFPAITAMVTSSTSPGKWSQFFNPICCFLLFNIMDWLGRSLTSYFLWPDEDSRLLPLLVCLRFLFVPLFMLCHVPQRSRLPILFPQDAYFITFMLLFAVSNGYLVSLTMCLAPRQVLPHEREVAGALMTFFLALGLSCGASLSFLFKALL

SEQ ID NO: 64406 - protein, 456 aa, Homo sapiens; identical to SEQ ID NO: 64405

SEQ ID NO: 64407 - protein, 456 aa, Homo sapiens; identical to SEQ ID NO: 64405

SEQ ID NO: 64408 - protein, 475 aa, Homo sapiens
MAVVSEDDFQHSSNSTYRTTSSSLRADQEALLEKLLDRPPPGLQRPEDRFCGTYIIFFSLGIGSLLPWNFFITAKEYWMFKLRNSSSPATGEDPEGSDILNYFESYLAVASTVPSMLCLVANFLLVNRVAVHIRVLASLTVILAIFMVITALVKVDTSSWTRGFFAVTIVCMVILSGASTVFSSSIYGMTGSFPMRNSQALISGGAMGGTVSAVASLVDLAASSDVRNSALAFFLTATVFLVLCMGLYLLLSRLEYARYYMRPVLAAHVFSGEEELPQDSLSAPSVASRFIDSHTPPLRPILKKTASLGFCVTYVFFITSLIYPAICTNIESLNKGSGSLWTTKFFIPLTTFLLYNFADLCGRQLTAWIQVPGPNSKALPGFVLLRTCLIPLFVLCNYQPRVHLKTVVFQSDVYPALLSSLLGLSNGYLSTLALLYGPKIVPRELAEATGVVMSFYVCLGLTLGSACSTLLVHLI

SEQ ID NO: 64409 - protein, 529 aa, Homo sapiens
MSQDTEVDMKEVELNELEPEKQPMNAASGAAMSLAGAEKNGLVKIKVAEDEAEAAAAAKFTGLSKEELLKVAGSPGWVRTRWALLLLFWLGWLGMLAGAVVIIVRAPRCRELPAQKWWHTGALYRIGDLQAFQGHGAGNLAGLKGRLDYLSSLKVKGLVLGPIHKNQKDDVAQTDLLQIDPNFGSKEDFDSLLQSAKKKSIRVILDLTPNYRGENSWFSTQVDTVATKVKDALEFWLQAGVDGFQVRDIENLKDASSFLAEWQNITKGFSEDRLLIAGTNSSDLQQILSLLESNKDLLLTSSYLSDSGSTGEHTKSLVTQYLNATGNRWCSWSLSQARLLTSFLPAQLLRLYQLMLFTLPGTPVFSYGDEIGLDAAALPGQPMEAPVMLWDESSFPDIPGAVSANMTVKGQSEDPGSLLSLFRRLSDQRSKERSLLHGDFHAFSAGPGLFSYIRHWDQNERFLVVLNFGDVGLSAGLQASDLPASASLPAKADLLLSTQPGREEGSPLELERLKLEPHEGLLLRFPYAA

SEQ ID NO: 64410 - protein, 568 aa, Homo sapiens
MELQPPEASIAVVSIPRQLPGSHSEAGVQGLSAGDDSGTMSQDTEVDMKEVELNELEPEKQPMNAASGAAMSLAGAEKNGLVKIKVAEDEAEAAAAAKFTGLSKEELLKVAGSPGWVRTRWALLLLFWLGWLGMLAGAVVIIVRAPRCRELPAQKWWHTGALYRIGDLQAFQGHGAGNLAGLKGRLDYLSSLKVKGLVLGPIHKNQKDDVAQTDLLQIDPNFGSKEDFDSLLQSAKKKSIRVILDLTPNYRGENSWFSTQVDTVATKVKDALEFWLQAGVDGFQVRDIENLKDASSFLAEWQNITKGFSEDRLLIAGTNSSDLQQILSLLESNKDLLLTSSYLSDSGSTGEHTKSLVTQYLNATGNRWCSWSLSQARLLTSFLPAQLLRLYQLMLFTLPGTPVFSYGDEIGLDAAALPGQPMEAPVMLWDESSFPDIPGAVSANMTVKGQSEDPGSLLSLFRRLSDQRSKERSLLHGDFHAFSAGPGLFSYIRHWDQNERFLVVLNFGDVGLSAGLQASDLPASASLPAKADLLLSTQPGREEGSPLELERLKLEPHEGLLLRFPYAA

SEQ ID NO: 64411 - protein, 630 aa, Homo sapiens
MELQPPEASIAVVSIPRQLPGSHSEAGVQGLSAGDDSELGSHCVAQTGLELLASGDPLPSASQNAEMIETGSDCVTQAGLQLLASSDPPALASKNAEVTGTMSQDTEVDMKEVELNELEPEKQPMNAASGAAMSLAGAEKNGLVKIKVAEDEAEAAAAAKFTGLSKEELLKVAGSPGWVRTRWALLLLFWLGWLGMLAGAVVIIVRAPRCRELPAQKWWHTGALYRIGDLQAFQGHGAGNLAGLKGRLDYLSSLKVKGLVLGPIHKNQKDDVAQTDLLQIDPNFGSKEDFDSLLQSAKKKSIRVILDLTPNYRGENSWFSTQVDTVATKVKDALEFWLQAGVDGFQVRDIENLKDASSFLAEWQNITKGFSEDRLLIAGTNSSDLQQILSLLESNKDLLLTSSYLSDSGSTGEHTKSLVTQYLNATGNRWCSWSLSQARLLTSFLPAQLLRLYQLMLFTLPGTPVFSYGDEIGLDAAALPGQPMEAPVMLWDESSFPDIPGAVSANMTVKGQSEDPGSLLSLFRRLSDQRSKERSLLHGDFHAFSAGPGLFSYIRHWDQNERFLVVLNFGDVGLSAGLQASDLPASASLPAKADLLLSTQPGREEGSPLELERLKLEPHEGLLLRFPYAA

SEQ ID NO: 64412 - protein, 631 aa, Homo sapiens
MELQPPEASIAVVSIPRQLPGSHSEAGVQGLSAGDDSETGSDCVTQAGLQLLASSDPPALASKNAEVTVETGFHHVSQADIEFLTSIDPTASASGSAGITGTMSQDTEVDMKEVELNELEPEKQPMNAASGAAMSLAGAEKNGLVKIKVAEDEAEAAAAAKFTGLSKEELLKVAGSPGWVRTRWALLLLFWLGWLGMLAGAVVIIVRAPRCRELPAQKWWHTGALYRIGDLQAFQGHGAGNLAGLKGRLDYLSSLKVKGLVLGPIHKNQKDDVAQTDLLQIDPNFGSKEDFDSLLQSAKKKSIRVILDLTPNYRGENSWFSTQVDTVATKVKDALEFWLQAGVDGFQVRDIENLKDASSFLAEWQNITKGFSEDRLLIAGTNSSDLQQILSLLESNKDLLLTSSYLSDSGSTGEHTKSLVTQYLNATGNRWCSWSLSQARLLTSFLPAQLLRLYQLMLFTLPGTPVFSYGDEIGLDAAALPGQPMEAPVMLWDESSFPDIPGAVSANMTVKGQSEDPGSLLSLFRRLSDQRSKERSLLHGDFHAFSAGPGLFSYIRHWDQNERFLVVLNFGDVGLSAGLQASDLPASASLPAKADLLLSTQPGREEGSPLELERLKLEPHEGLLLRFPYAA

SEQ ID NO: 64413 - protein, 661 aa, Homo sapiens
MELQPPEASIAVVSIPRQLPGSHSEAGVQGLSAGDDSELGSHCVAQTGLELLASGDPLPSASQNAEMIETGSDCVTQAGLQLLASSDPPALASKNAEVTETGFHHVSQADIEFLTSIDPTASASGSAGITGTMSQDTEVDMKEVELNELEPEKQPMNAASGAAMSLAGAEKNGLVKIKVAEDEAEAAAAAKFTGLSKEELLKVAGSPGWVRTRWALLLLFWLGWLGMLAGAVVIIVRAPRCRELPAQKWWHTGALYRIGDLQAFQGHGAGNLAGLKGRLDYLSSLKVKGLVLGPIHKNQKDDVAQTDLLQIDPNFGSKEDFDSLLQSAKKKSIRVILDLTPNYRGENSWFSTQVDTVATKVKDALEFWLQAGVDGFQVRDIENLKDASSFLAEWQNITKGFSEDRLLIAGTNSSDLQQILSLLESNKDLLLTSSYLSDSGSTGEHTKSLVTQYLNATGNRWCSWSLSQARLLTSFLPAQLLRLYQLMLFTLPGTPVFSYGDEIGLDAAALPGQPMEAPVMLWDESSFPDIPGAVSANMTVKGQSEDPGSLLSLFRRLSDQRSKERSLLHGDFHAFSAGPGLFSYIRHWDQNERFLVVLNFGDVGLSAGLQASDLPASASLPAKADLLLSTQPGREEGSPLELERLKLEPHEGLLLRFPYAA

SEQ ID NO: 64414 - protein, 511 aa, Homo sapiens
MSQDTEVDMKEVELNELEPEKQPMNAASGAAMSLAGAEKNGLVKIKVAEDEAEAAAAAKFTGLSKEELLFWLGWLGMLAGAVVIIVRAPRCRELPAQKWWHTGALYRIGDLQAFQGHGAGNLAGLKGRLDYLSSLKVKGLVLGPIHKNQKDDVAQTDLLQIDPNFGSKEDFDSLLQSAKKKSIRVILDLTPNYRGENSWFSTQVDTVATKVKDALEFWLQAGVDGFQVRDIENLKDASSFLAEWQNITKGFSEDRLLIAGTNSSDLQQILSLLESNKDLLLTSSYLSDSGSTGEHTKSLVTQYLNATGNRWCSWSLSQARLLTSFLPAQLLRLYQLMLFTLPGTPVFSYGDEIGLDAAALPGQPMEAPVMLWDESSFPDIPGAVSANMTVKGQSEDPGSLLSLFRRLSDQRSKERSLLHGDFHAFSAGPGLFSYIRHWDQNERFLVVLNFGDVGLSAGLQASDLPASASLPAKADLLLSTQPGREEGSPLELERLKLEPHEGLLLRFPYAA

SEQ ID NO: 64415 - protein, 135 aa, Homo sapiens
MSQDTEVDMKEVELNELEPEKQPMNAASGAAMSLAGAEKNGLVKIKVAEDEAEAAAAAKFTGLSKEELLKVAGSPGWVRTRWALLLLFWLGWLGMLAGAVVIIVRAPRCRELPAQKWWHTGALYRIGDLQAFQGH

SEQ ID NO: 64416 - protein, 685 aa, Homo sapiens
MAEDKSKRDSIEMSMKGCQTNNGFVHNEDILEQTPDPGSSTDNLKHSTRGILGSQEPDFKGVQPYAGMPKEVLFQFSGQARYRIPREILFWLTVASVLVLIAATIAIIALSPKCLDWWQEGPMYQIYPRSFKDSNKDGNGDLKGIQDKLDYITALNIKTVWITSFYKSSLKDFRYGVEDFREVDPIFGTMEDFENLVAAIHDKGLKLIIDFIPNHTSDKHIWFQLSRTRTGKYTDYYIWHDCTHENGKTIPPNNWLSVYGNSSWHFDEVRNQCYFHQFMKEQPDLNFRNPDVQEEIKEILRFWLTKGVDGFSLDAVKFLLEAKHLRDEIQVNKTQIPDTVTQYSELYHDFTTTQVGMHDIVRSFRQTMDQYSTEPGRYRFMGTEAYAESIDRTVMYYGLPFIQEADFPFNNYLSMLDTVSGNSVYEVITSWMENMPEGKWPNWMIGGPDSSRLTSRLGNQYVNVMNMLLFTLPGTPITYYGEEIGMGNIVAANLNESYDINTLRSKSPMQWDNSSNAGFSEASNTWLPTNSDYHTVNVDVQKTQPRSALKLYQDLSLLHANELLLNRGWFCHLRNDSHYVVYTRELDGIDRIFIVVLNFGESTLLNLHNMISGLPAKMRIRLSTNSADKGSKVDTSGIFLDKGEGLIFEHNTKNLLHRQTAFRDRCFVSNRACYSSVLNILYTSC

SEQ ID NO: 64417 - protein, 621 aa, Homo sapiens
MKTFWSRPRIQFSGQARYRIPREILFWLTVASVLVLIAATIAIIALSPKCLDWWQEGPMYQIYPRSFKDSNKDGNGDLKGIQDKLDYITALNIKTVWITSFYKSSLKDFRYGVEDFREVDPIFGTMEDFENLVAAIHDKGLKLIIDFIPNHTSDKHIWFQLSRTRTGKYTDYYIWHDCTHENGKTIPPNNWLSVYGNSSWHFDEVRNQCYFHQFMKEQPDLNFRNPDVQEEIKEILRFWLTKGVDGFSLDAVKFLLEAKHLRDEIQVNKTQIPDTVTQYSELYHDFTTTQVGMHDIVRSFRQTMDQYSTEPGRYRFMGTEAYAESIDRTVMYYGLPFIQEADFPFNNYLSMLDTVSGNSVYEVITSWMENMPEGKWPNWMIGGPDSSRLTSRLGNQYVNVMNMLLFTLPGTPITYYGEEIGMGNIVAANLNESYDINTLRSKSPMQWDNSSNAGFSEASNTWLPTNSDYHTVNVDVQKTQPRSALKLYQDLSLLHANELLLNRGWFCHLRNDSHYVVYTRELDGIDRIFIVVLNFGESTLLNLHNMISGLPAKMRIRLSTNSADKGSKVDTSGIFLDKGEGLIFEHNTKNLLHRQTAFRDRCFVSNRACYSSVLNILYTSC

SEQ ID NO: 64418 - protein, 551 aa, Homo sapiens
MAEDKSKRDSIEMSMKGCQTNNGFVHNEDILEQTPDPGSSTDNLKHSTRGILGSQEPDFKGVQPYAGMPKEVLFQFSGQARYRIPREILFWLTVASVLVLIAATIAIIALSPKCLDWWQEGPMYQIYPRSFKDSNKDGNGDLKGIQDKLDYITALNIKTVWITSFYKSSLKDFRYGVEDFREVDPIFGTMEDFENLVAAIHDKGLKLIIDFIPNHTSDKHIWFQLSRTRTGKYTDYYIWHDCTHENGKTIPPNNWLSVYGNSSWHFDEVRNQCYFHQFMKEQPDLNFRNPDVQEEIKEILRFWLTKGVDGFSLDAVKFLLEAKHLRDEIQVNKTQIPDTVTQYSELYHDFTTTQVGMHDIVRSFRQTMDQYSTEPGRYRFMGTEAYAESIDRTVMYYGLPFIQEADFPFNNYLSMLDTVSGNSVYEVITSWMENMPEGKWPNWMIGGPDSSRLTSRLGNQYVNVMNMLLFTLPGTPITYYGEEIGMGNIVAANLNESYDINTLRSKSPMQWDNSSNAGFSEASNTWLPTNSDYHTVNVDVLLRHPCSSAVA

SEQ ID NO: 64419 - protein, 507 aa, Homo sapiens
MGCWGRNRGRLLCMLALTFMFMVLEVVVSRVTSSLAMLSDSFHMLSDVLALVVALVAERFARRTHATQKNTFGWIRAEVMGALVNAIFLTGLCFAILLEAIERFIEPHEMQQPLVVLGVGVAGLLVNVLGLCLFHHHSGFSQDSGHGHSHGGHGHGHGLPKGPRVKSTRPGSSDINVAPGEQGPDQEETNTLVANTSNSNGLKLDPADPENPRSGDTVEVQVNGNLVREPDHMELEEDRAGQLNMRGVFLHVLGDALGSVIVVVNALVFYFSWKGCSEGDFCVNPCFPDPCKAFVEIINSTHASVYEAGPCWVLYLDPTLCVVMVCILLYTTYPLLKESALILLQTVPKQIDIRNLIKELRNVEGVEEVHELHVWQLAGSRIIATAHIKCEDPTSYMEVAKTIKDVFHNHGIHATTIQPEFASVGSKSSVVPCELACRTQCALKQCCGTLPQAPSGKDAEKTPAVSISCLELSNNLEKKPRRTKAENIPAVVIEIKNMPNKQPESSL

SEQ ID NO: 64420 - protein, 372 aa, Homo sapiens
MEAKEKQHLLDARPAIRSYTGSLWQEGAGWIPLPRPGLDLQAIELAAQSNHHCHAQKGPDSHCDPKKGKAQRQLYVASAICLLFMIGEVVGGYLAHSLAVMTDAAHLLTDFASMLISLFSLWMSSRPATKTMNFGWQRAEILGALVSVLSIWVVTGVLVYLAVERLISGDYEIDGGTMLITSGCAVAVNIIMGLTLHQSGHGHSHGTTNQQEENPSVRAAFIHVIGDFMQSMGVLVAAYILYFKPEYKYVDPICTFVFSILVLGTTLTILRDVILVLMEGTPKGVDFTAVRDLLLSVEGVEALHSLHIWALTVAQPVLSVHIAIAQNTDAQAVLKTASSRLQGKFHFHTVTIQIEDYSEDMKDCQACQGPSD

SEQ ID NO: 64421 - protein, 323 aa, Homo sapiens
MEAKEKQHLLDARPAIRSYTGSLWQEGAGWIPLPRPGLDLQAIELAAQSNHHCHAQKGPDSHCDPKKGKAQRQLYVASAICLLFMIGEVVEILGALVSVLSIWVVTGVLVYLAVERLISGDYEIDGGTMLITSGCAVAVNIIMGLTLHQSGHGHSHGTTNQQEENPSVRAAFIHVIGDFMQSMGVLVAAYILYFKPEYKYVDPICTFVFSILVLGTTLTILRDVILVLMEGTPKGVDFTAVRDLLLSVEGVEALHSLHIWALTVAQPVLSVHIAIAQNTDAQAVLKTASSRLQGKFHFHTVTIQIEDYSEDMKDCQACQGPSD

SEQ ID NO: 64422 - protein, 388 aa, Homo sapiens
MEPSPAAGGLETTRLVSPRDRGGAGGSLRLKSLFTEPSEPLPEESKPVEMPFHHCHRDPLPPPGLTPERLHARRQLYAACAVCFVFMAGEVVGGYLAHSLAIMTDAAHLLADVGSMMGSLFSLWLSTRPATRTMTFGWHRSETLGALASVVSLWMVTGILLYLAFVRLLHSDYHIEGGAMLLTASIAVCANLLMAFVLHQAGPPHSHGSRGAEYAPLEEGPEEPLPLGNTSVRAAFVHVLGDLLQSFGVLAASILIYFKPQYKAADPISTFLFSICALGSTAPTLRDVLRILMEGTPRNVGFEPVRDTLLSVPGVRATHELHLWALTLTYHVASAHLAIDSTADPEAVLAEASSRLYSRFGFSSCTLQVEQYQPEMAQCLRCQEPPQA

SEQ ID NO: 64423 - protein, 99 aa, Homo sapiens
MPFHHCHRDPLPPPGLTPERLHARRQLYAACAVCFVFMAGEVVGGYLAHSLAIMTDAAHLLADVGSMMGSLFSLWLSTRPATRTMTFGWHRSETLGALA

SEQ ID NO: 64424 - protein, 240 aa, Homo sapiens
MPFHHCHRDPLPPPGLTPERLHARRQLYAACAVCFVFMAGEVVGGYLAHSLAIMTDAAHLLADVGSMMGSLFSLWLSTRPATRTMTFGWHRSETLGALASVVSLWMVTGILLYLAFVRLLHSDYHIEGGAMLLTASIAVCANLLMAFVLHQAGPPHSHGSRGAEYAPLEEGPEEPLPLGNTSVRAAFVHVLGDLLQSFGVLAASILIYFKPQYKAADPISTFLFSICALGSTAPTLRDVL

SEQ ID NO: 64425 - protein, 383 aa, Homo sapiens
MRVAAGARGENIEHLKLRLEARPPTLLLFTEPSEPLPEESKPVEMPFHHCHRDPLPPPGLTPERLHARRQLYAACAVCFVFMAGEVVGGYLAHSLAIMTDAAHLLADVGSMMGSLFSLWLSTRPATRTMTFGWHRSETLGALASVVSLWMVTGILLYLAFVRLLHSDYHIEGGAMLLTASIAVCANLLMAFVLHQAGPPHSHGSRGAEYAPLEEGPEEPLPLGNTSVRAAFVHVLGDLLQSFGVLAASILIYFKPQYKAADPISTFLFSICALGSTAPTLRDVLRILMEGTPRNVGFEPVRDTLLSVPGVRATHELHLWALTLTYHVASAHLAIDSTADPEAVLAEASSRLYSRFGFSSCTLQVEQYQPEMAQCLRCQEPPQA

SEQ ID NO: 64426 - protein, 111 aa, Homo sapiens
MPFHHCHRDPLPPPGLTPERLHARRQLYAACAVCFVFMAGEVVGGYLAHSLAIMTDAAHLLADVGSMMGSLFSLWLSTRPATRTMTFGWHRSETLGALASVVSLWMVTGIL

SEQ ID NO: 64427 - protein, 429 aa, Homo sapiens
MAGSGAWKRLKSMLRKDDAPLFLNDTSAFDFSDEAGDEGLSRFNKLRVVVADDGSEAPERPVNGAHPTLQADDDSLLDQDLPLTNSQLSLKVDSCDNCSKQREILKQRKVKARLTIAAVLYLLFMIGELVGGYIANSLAIMTDALHMLTDLSAIILTLLALWLSSKSPTKRFTFGFHRLEVLSAMISVLLVYILMGFLLYEAVQRTIHMNYEINGDIMLITAAVGVAVNVIMGFLLNQSGHRHSHSHSLPSNSPTRGSGCERNHGQDSLAVRAAFVHALGDLVQSVGVLIAAYIIRFKPEYKIADPICTYVFSLLVAFTTFRIIWDTVVIILEGVPSHLNVDYIKEALMKIEDVYSVEDLNIWSLTSGKSTAIVHIQLIPGSSSKWEEVQSKANHLLLNTFGMYRCTIQLQSYRQEVDRTCANCQSSSP

SEQ ID NO: 64428 - protein, 118 aa, Homo sapiens
MEEKYGGDVLAGPGGGGGLGPVDVPSARLTKYIVLLCFTKFLKAVGLFESYDLLKAVHIVQFIFILKLGTAFFMVLFQKPFSSGKTITKHQIIGSLKIPGRKEFKDKKLNDPRKLVGN

SEQ ID NO: 64429 - protein, 765 aa, Homo sapiens
MEEKYGGDVLAGPGGGGGLGPVDVPSARLTKYIVLLCFTKFLKAVGLFESYDLLKAVHIVQFIFILKLGTAFFMVLFQKPFSSGKTITKHQWIKIFKHAVAGCIISLLWFFGLTLCGPLRTLLLFEHSDIVVISLLSVLFTSSGGGPAKTRGAAFFIIAVICLLLFDNDDLMAKMAEHPEGHHDSALTHMLYTAIAFLGVADHKGGVLLLVLALCCKVGFHTASRKLSVDVGGAKRLQALSHLVSVLLLCPWVIVLSVTTESKVESWFSLIMPFATVIFFVMILDFYVDSICSVKMEVSKCARYGSFPIFISALLFGNFWTHPITDQLRAMNKAAHQESTEHVLSGGVVVSAIFFILSANILSSPSKRGQKGTLIGYSPEGTPLYNFMGDAFQHSSQSIPRFIKESLKQILEESDSRQIFYFLCLNLLFTFVELFYGVLTNSLGLISDGFHMLFDCSALVMGLFAALMSRWKATRIFSYGYGRIEILSGFINGLFLIVIAFFVFMESVARLIDPPELDTHMLTPVSVGGLIVNLIGICAFSHAHSHAHGASQGSCHSSDHSHSHHMHGHSDHGHGHSHGSAGGGMNANMRGVFLHVLADTLGSIGVIVSTVLIEQFGWFIADPLCSLFIAILIFLSVVPLIKDACQVLLLRLPPEYEKELHIALEKIQKIEGLISYRDPHFWRHSASIVAGTIHIQVTSDVLEQRIVQQVTGILKDAGVNNLTIQVEKEAYFQHMSGLSTGFHDVLAMTKQMESMKYCKDGTYIM

SEQ ID NO: 64430 - protein, 360 aa, Homo sapiens [sequence omitted]

SEQ ID NO: 64431 - protein, 461 aa, Homo sapiens
MGTIHLFRKPQRSFFGKLLREFRLVAADRRSWKILLFGVINLICTGFLLMWCSSTNSIALTAYTYLTIFDLFSLMTCLISYWVTLRKPSPVYSFGFERLEVLAVFASTVLAQLGALFILKESAERFLEQPEIHTGRLLVGTFVALCFNLFTMLSIRNKPFAYVSEAASTSWLQEHVADLSRSLCGIIPGLSSIFLPRMNPFVLIDLAGAFALCITYMLIEINNYFAVDTASAIAIALMTFGTMYPMSVYSGKVLLQTTPPHVIGQLDKLIREVSTLDGVLEVRNEHFWTLGFGSLAGSVHVRIRRDANEQMVLAHVTNRLYTLVSTLTVQIFKDDWIRPALLSGPVAANVLNFSDHHVIPMPLLKGTDDLNPVTSTPAKPSSPPPEFSFNTPGKNVNPVILLNTQTRPYGFGLNHGHTPYSSMLNQGLGVPGIGATQGLRTGFTNIPSRYGTNNRIGQPRP

SEQ ID NO: 64432 - protein, 264 aa, Homo sapiens
MNPFVLIDLAGAFALCITYMLIEINNYFAVDTASAIAIALMTFGTMYPMSVYSGKVLLQTTPPHVIGQLDKLIREVSTLDGVLEVRNEHFWTLGFGSLAGSVHVRIRRDANEQMVLAHVTNRLYTLVSTLTVQIFKDDWIRPALLSGPVAANVLNFSDHHVIPMPLLKGTDDLNPVTSTPAKPSSPPPEFSFNTPGKNVNPVILLNTQTRPYGFGLNHGHTPYSSMLNQGLGVPGIGATQGLRTGFTNIPSRYGTNNRIGQPRP

SEQ ID NO: 64433 - protein, 501 aa, Homo sapiens
MGTIHLFRKPQRSFFGKLLREFRLVAADRRSWKILLFGVINLICTGFLLMWCSSTNSIALTAYTYLTIFDLFRDGVSPFWLGWSQTPDLKWSTHLGLPKCWDNRRELPCLSNSLMTCLISYWVTLRKPSPVYSFGFERLEVLAVFASTVLAQLGALFILKESAERFLEQPEIHTGRLLVGTFVALCFNLFTMLSIRNKPFAYVSEAASTSWLQEHVADLSRSLCGIIPGLSSIFLPRMNPFVLIDLAGAFALCITYMLIEINNYFAVDTASAIAIALMTFGTMYPMSVYSGKVLLQTTPPHVIGQLDKLIREVSTLDGVLEVRNEHFWTLGFGSLAGSVHVRIRRDANEQMVLAHVTNRLYTLVSTLTVQIFKDDWIRPALLSGPVAANVLNFSDHHVIPMPLLKGTDDLNPVTSTPAKPSSPPPEFSFNTPGKNVNPVILLNTQTRPYGFGLNHGHTPYSSMLNQGLGVPGIGATQGLRTGFTNIPSRYGTNNRIGQPRP

SEQ ID NO: 64434 - protein, 387 aa, Homo sapiens
MTCLISYWVTLRKPSPVYSFGFERLEVLAVFASTVLAQLGALFILKESAERFLEQPEIHTGRLLVGTFVALCFNLFTMLSIRNKPFAYVSEAASTSWLQEHVADLSRSLCGIIPGLSSIFLPRMNPFVLIDLAGAFALCITYMLIEINNYFAVDTASAIAIALMTFGTMYPMSVYSGKVLLQTTPPHVIGQLDKLIREVSTLDGVLEVRNEHFWTLGFGSLAGSVHVRIRRDANEQMVLAHVTNRLYTLVSTLTVQIFKDDWIRPALLSGPVAANVLNFSDHHVIPMPLLKGTDDLNPVTSTPAKPSSPPPEFSFNTPGKNVNPVILLNTQTRPYGFGLNHGHTPYSSMLNQGLGVPGIGATQGLRTGFTNIPSRYGTNNRIGQPRP

SEQ ID NO: 64435 - protein, 438 aa, Homo sapiens
MGTIHLFRKPQRSFFGKLLREFRLVAADRRSWKILLFGVINLICTGFLLMWCSSTNSIALTAYTYLTIFDLFSLMTCLISYWVTLRKPSPVYSFGFERLEVLAVFASTVLAQLGALFILKESAERFLEQPEIHTGRLLVGTFVALCFNLFTMLSIRNKPFAYVSEAASTSWLQEHVADLSRSLCGIIPGLSSIFLPRMNPFVLIDLAGAFALCITYMLIEINNYFAVDTASAIAIALMTFGTMYPMSVYSGKVLLQTTPPHVIGQLDKLIREAGSVHVRIRRDANEQMVLAHVTNRLYTLVSTLTVQIFKDDWIRPALLSGPVAANVLNFSDHHVIPMPLLKGTDDLNPVTSTPAKPSSPPPEFSFNTPGKNVNPVILLNTQTRPYGFGLNHGHTPYSSMLNQGLGVPGIGATQGLRTGFTNIPSRYGTNNRIGQPRP

SEQ ID NO: 64436 - protein, 432 aa, Homo sapiens
MSWKILLFGVINLICTGFLLMWCSSTNSIALTAYTYLTIFDLFSLMTCLISYWVTLRKPSPVYSFGFERLEVLAVFASTVLAQLGALFILKESAERFLEQPEIHTGRLLVGTFVALCFNLFTMLSIRNKPFAYVSEAASTSWLQEHVADLSRSLCGIIPGLSSIFLPRMNPFVLIDLAGAFALCITYMLIEINNYFAVDTASAIAIALMTFGTMYPMSVYSGKVLLQTTPPHVIGQLDKLIREVSTLDGVLEVRNEHFWTLGFGSLAGSVHVRIRRDANEQMVLAHVTNRLYTLVSTLTVQIFKDDWIRPALLSGPVAANVLNFSDHHVIPMPLLKGTDDLNPVTSTPAKPSSPPPEFSFNTPGKNVNPVILLNTQTRPYGFGLNHGHTPYSSMLNQGLGVPGIGATQGLRTGFTNIPSRYGTNNRIGQPRP

SEQ ID NO: 64437 - protein, 376 aa, Homo sapiens
MLPLSIKDDEYKPPKFNLFGKISGWFRSILSDKTSRNLFFFLCLNLSFAFVELLYGIWSNCLGLISDSFHMFFDSTAILAGLAASVISKWRDNDAFSYGYVRAEVLAGFVNGLFLIFTAFFIFSEGVERALAPPDVHHERLLLVSILGFVVNLIGIFVFKHGGHGHSHGSGHGHSHSLFNGALDQAHGHVDHCHSHEVKHGAAHSHDHAHGHGHFHSHDGPSLKETTGPSRQILQGVFLHILADTLGSIGVIASAIMMQNFGLMIADPICSILIAILIVVSVIPLLRESVGILMQRTPPLLENSLPQCYQRVQQLQGVYSLQEQHFWTLCSDVYVGTLKLIVAPDADARWILSQTHNIFTQAGVRQLYVQIDFAAM

SEQ ID NO: 64438 - protein, 90 aa, Homo sapiens
  VARIANT 1: note = MOD_RES - Any amino acid
XVIPLLRESVGILMQRTPPLLENSLPQCYQRVQQLQGVYSLQEQHFWTLCSDVYVGTLKLIVAPDADARWILSQTHNIFTQKLEEENENL

SEQ ID NO: 64439 - protein, 376 aa, Homo sapiens; identical to SEQ ID NO: 64437

SEQ ID NO: 64440 - protein, 320 aa, Homo sapiens
MYHCHSGSKPTEKGANEYAYAKWKLCSASAICFIFMIAEVVGGHIAGSLAVVTDAAHLLIDLTSFLLSLFSLWLSSKPPSKRLTFGWHRAEILGALLSILCIWVVTGVLVYLACERLLYPDYQIQATVMIIVSSCAVAANIVLTVVLHQRCLGHNHKEVQANASVRAAFVHALGDLFQSISVLISALIIYFKPEYKIADPICTFIFSILVLASTITILKDFSILLMEGVPKSLNYSGVKELILAVDGVLSVHSLHIWSLTMNQVILSAHVATAASRDSQVVRREIAKALSKSFTMHSLTIQMESPVDQDPDCLFCEDPCD

SEQ ID NO: 64441 - protein, 369 aa, Homo sapiens
MEFLERTYLVNDKAAKMYAFTLESVELQQKPVNKDQCPRERPEELESGGMYHCHSGSKPTEKGANEYAYAKWKLCSASAICFIFMIAEVVGGHIAGSLAVVTDAAHLLIDLTSFLLSLFSLWLSSKPPSKRLTFGWHRAEILGALLSILCIWVVTGVLVYLACERLLYPDYQIQATVMIIVSSCAVAANIVLTVVLHQRCLGHNHKEVQANASVRAAFVHALGDLFQSISVLISALIIYFKPEYKIADPICTFIFSILVLASTITILKDFSILLMEGVPKSLNYSGVKELILAVDGVLSVHSLHIWSLTMNQVILSAHVATAASRDSQVVRREIAKALSKSFTMHSLTIQMESPVDQDPDCLFCEDPCD

SEQ ID NO: 64442 - protein, 485 aa, Homo sapiens
MGRYSGKTCRLLFMLVLTVAFFVAELVSGYLGNSIALLSDSFNMLSDLISLCVGLSAGYIARRPTRGFSATYGYARAEVVGALSNAVFLTALCFTIFVEAVLRLARPERIDDPELVLIVGVLGLLVNVVGLLIFQDCAAWFACCLRGRSRRLQQRQQLAEGCVPGAFGGPQGAEDPRRAADPTAPGSDSAVTLRGTSVERKREKGATVFANVAGDSFNTQNEPEDMMKKEKKSEALNIRGVLLHVMGDALGSVVVVITAIIFYVLPLKSEDPCNWQCYIDPSLTVLMVIIILSSAFPLIKETAAILLQMVPKGVNMEELMSKLSAVPGISSVHEVHIWELVSGKIIATLHIKYPKDRGYQDASTKIREIFHHAGIHNVTIQFENVDLKEPLEQKDLLLLCNSPCISKGCAKQLCCPPGALPLAHVNGCAEHNGGPSLDTYGSDGLSRRDAREVAIEVSLDSCLSDHGQSLNKTQEDQCYVNRTHF

SEQ ID NO: 64443 - protein, 240 aa, Homo sapiens
MGDALGSVVVVITAIIFYVLPLKSEDPCNWQCYIDPSLTVLMVIIILSSAFPLIKETAAILLQMVPKGVNMEELMSKLSAVPGISSVHEVHIWELVSGKIIATLHIKYPKDRGYQDASTKIREIFHHAGIHNVTIQFENVDLKEPLEQKDLLLLCNSPCISKGCAKQLCCPPGALPLAHVNGCAEHNGGPSLDTYGSDGLSRRDAREVAIEVSLDSCLSDHGQSLNKTQEDQCYVNRTHF

SEQ ID NO: 64444 - protein, 223 aa, Homo sapiens
MGRYSGKTCRLLFMLVLTVAFFVAELVSGYLGNSIALLSDSFNMLSDLISLCVGLSAGYIARRPTRGFSATYGYARAEVVGALSNAVFLTALCFTIFVEAVLRLARPERIDDPELVLIVGVLGLLVNVVGLLIFQDCAAWFACCLRGRSRRLQQRQQLAEGCVPGAFGGPQGAEDPRRAADPTAPGSDSAVTLRGTSVERKREKGATVFANVAELIHNTRFLL

SEQ ID NO: 64445 - protein, 188 aa, Homo sapiens
MDHSHHMGMSYMDSNSTMQPSHHHPTTSASHSHGGGDSSMMMMPMTFYFGFKNVELLFSGLVINTAGEMAGAFVAVFLLAMFYEGLKIARESLLRKSQVSIRYNSMPVPGPNGTILMETHKTVGQQMLSFPHLLQTCWDYRHEPPHLSLSPSYYSDLNYPKKAKVLLRVSVELMIQEALMITAGDSLC

SEQ ID NO: 64446 - protein, 190 aa, Homo sapiens
MDHSHHMGMSYMDSNSTMQPSHHHPTTSASHSHGGGDSSMMMMPMTFYFGFKNVELLFSGLVINTAGEMAGAFVAVFLLAMFYEGLKIARESLLRKSQVSIRYNSMPVPGPNGTILMETHKTVGQQMLSFPHLLQTVLHIIQVVISYFLMLIFMTYNGYLCIAVAAGAGTGYFLFSWKKAVVVDITEHCH

SEQ ID NO: 64447 - protein, 143 aa, Homo sapiens
MAMHFIFSDTAVLLFDFWSVHSPAGMALSVLVLLLLAVLYEGIKVGKAKLLNQVLVNLPTSISQQTIAETDGDSAGSDSFPVGRTHHRWYLCHFGQSLIHVIQVVIGYFIMLAVMSYNTWIFLGVVLGSAVGYYLAYPLLSTA

SEQ ID NO: 64448 - protein, 549 aa, Homo sapiens
MSPTISHKDSSRQRRPGNFSHSLDMKSGPLPPGGWDDSHLDSAGREGDREALLGDTGTGDFLKAPQSFRAELSSILLLLFLYVLQGIPLGLAGSIPLILQSKNVSYTDQAFFSFVFWPFSLKLLWAPLVDAVYVKNFGRRKSWLVPTQYILGLFMIYLSTQVDRLLGNTDDRTPDVIALTVAFFLFEFLAATQDIAVDGWALTMLSRENVGYASTCNSVGQTAGYFLGNVLFLALESADFCNKYLRFQPQPRGIVTLSDFLFFWGTVFLITTTLVALLKKENEVSVVKEETQGITDTYKLLFAIIKMPAVLTFCLLILTAKIGFSAADAVTGLKLVEEGVPKEHLALLAVPMVPLQIILPLIISKYTAGPQPLNTFYKAMPYRLLLGLEYALLVWWTPKVEHQGGFPIYYYIVVLLSYALHQVTVYSMYVSIMAFNAKVSDPLIGGTYMTLLNTVSNLGGNWPSTVALWLVDPLTVKECVGASNQNCRTPDAVELCKKLGGSCVTALDGYYVESIICVFIGFGWWFFLGPKFKKLQDEGSSSWKCKRNN

SEQ ID NO: 64449 - protein, 549 aa, Homo sapiens; identical to SEQ ID NO: 64448

SEQ ID NO: 64450 - protein, 639 aa, Homo sapiens
MLSYGERLGSPAVSPLPVRGGHVMRGTAFAYVPSPQVLHRIPGTSAYAFPSLGPVALAEHTCPCGEVLERHEPLPAKLALEEEQKPESRLVPKLRQAGAMLLKVPLMLTFLYLFVCSLDMLSSAFQLAGGKVAGDIFKDNAILSNPVAGLVVGILVTVLVQSSSTSTSIIVSMVSSGLLEVSSAIPIIMGSNIGTSVTNTIVALMQAGDRTDFRRAFAGATVHDCFNWLSVLVLLPLEAATGYLHHITRLVVASFNIHGGRDAPDLLKIITEPFTKLIIQLDESVITSIATGDESLRNHSLIQIWCHPDSLQAPTSMSRAEANSSQTLGNATMEKCNHIFVDTGLPDLAVGLILLAGSLVLLCTCLILLVKMLNSLLKGQVAKVIQKVINTDFPAPFTWVTGYFAMVVGASMTFVVQSSSVFTSAITPLIGLGVISIERAYPLTLGSNIGTTTTAILAALASPREKLSSAFQIALCHFFFNISGILLWYPVPCTRLPIRMAKALGKRTAKYRWFAVLYLLVCFLLLPSLVFGISMAGWQVMVGVGTPFGALLAFVVLINVLQSRSPGHLPKWLQTWDFLPRWMHSLKPLDHLITRATLCCARPEPRSPPLPPRVFLEELPPATPSPRLALPAHHNATRL

SEQ ID NO: 64451 - protein, 109 aa, Homo sapiens
MLSYGERLGSPAVSPLPVRGGHVMRGTAFAYVPSPQVLHRIPGTSAYAFPSLGPVALAEHTCPCGEVLERHEPLPAKLALEEEQKPESRLVPKLRQAGAMLLKVPLMLT

SEQ ID NO: 64452 - protein, 340 aa, Homo sapiens
MLSYGERLGSPAVSPLPVRGGHVMRGTAFAYVPSPQVLHRIPGTSAYAFPSLGPVALAEHTCPCGEVLERHEPLPAKLALEEEQKPESRLVPKLRQAGAMLLKVPLMLTFLYLFVCSLDMLSSAFQLAGGKVAGDIFKDNAILSNPVAGLVVGILVTVLVQSSSTSTSIIVSMVSSGLLEVSSAIPIIMGSNIGTSVTNTIVALMQAGDRTDFRRAFAGATVHDCFNWLSVLVLLPLEAATGYLHHITRLVVASFNIHGGRDAPDLLKIITEPFTKLIIQLDESVITSIATGDESLRNHSLIQIWCHPDSLQQNLEGREITHFDLRKKQAMEDSSVPHCP

SEQ ID NO: 64453 - protein, 690 aa, Homo sapiens
MAPWPELGDAQPNPDKYLEGAAGQQPTAPDKSKETNKTDNTEAPVTKIELLPSYSTATLIDEPTEVDDPWNLPTLQDSGIKWSERDTKGKILCFFQGIGRLILLLGFLYFFVCSLDILSSAFQLVGGKMAGQFFSNSSIMSNPLLGLVIGVLVTVLVQSSSTSTSIVVSMVSSSLLTVRAAIPIIMGANIGTSITNTIVALMQVGDRSEFRRAFAGATVHDFFNWLSVLVLLPVEVATHYLEIITQLIVESFHFKNGEDAPDLLKVITKPFTKLIVQLDKKVISQIAMNDEKAKNKSLVKIWCKTFTNKTQINVTVPSTANCTSPSLCWTDGIQNWTMKNVTYKENIAKCQHIFVNFHLPDLAVGTILLILSLLVLCGCLIMIVKILGSVLKGQVATVIKKTINTDFPFPFAWLTGYLAILVGAGMTFIVQSSSVFTSALTPLIGIGVITIERAYPLTLGSNIGTTTTAILAALASPGNALRSSLQIALCHFFFNISGILLWYPIPFTRLPIRMAKGLGNISAKYRWFAVFYLIIFFFLIPLTVFGLSLAGWRVLVGVGVPVVFIIILVLCLRLLQSRCPRVLPKKLQNWNFLPLWMRSLKPWDAVVSKFTGCFQMRCCCCCRVCCRACCLLCDCPKCCRCSKCCEDLEEAQEGQDVPVKAPETFDNITISREAQGEVPASDSKTECTAL

SEQ ID NO: 64454 - protein, 689 aa, Homo sapiens
MAPWPELGDAQPNPDKYLEGAAGQQPTAPDKSKETNKNNTEAPVTKIELLPSYSTATLIDEPTEVDDPWNLPTLQDSGIKWSERDTKGKILCFFQGIGRLILLLGFLYFFVCSLDILSSAFQLVGGKMAGQFFSNSSIMSNPLLGLVIGVLVTVLVQSSSTSTSIVVSMVSSSLLTVRAAIPIIMGANIGTSITNTIVALMQVGDRSEFRRAFAGATVHDFFNWLSVLVLLPVEVATHYLEIITQLIVESFHFKNGEDAPDLLKVITKPFTKLIVQLDKKVISQIAMNDEKAKNKSLVKIWCKTFTNKTQINVTVPSTANCTSPSLCWTDGIQNWTMKNVTYKENIAKCQHIFVNFHLPDLAVGTILLILSLLVLCGCLIMIVKILGSVLKGQVATVIKKTINTDFPFPFAWLTGYLAILVGAGMTFIVQSSSVFTSALTPLIGIGVITIERAYPLTLGSNIGTTTTAILAALASPGNALRSSLQIALCHFFFNISGILLWYPIPFTRLPIRMAKGLGNISAKYRWFAVFYLIIFFFLIPLTVFGLSLAGWRVLVGVGVPVVFIIILVLCLRLLQSRCPRVLPKKLQNWNFLPLWMRSLKPWDAVVSKFTGCFQMRCCCCCRVCCRACCLLCDCPKCCRCSKCCEDLEEAQEGQDVPVKAPETFDNITISREAQGEVPASDSKTECTAL

SEQ ID NO: 64455 - protein, 689 aa, Homo sapiens; identical to SEQ ID NO: 64454

SEQ ID NO: 64456 - protein, 161 aa, Homo sapiens
MAPWPELGDAQPNPDKYLEGAAGQQPTAPDKSKETNKTDNTEAPVTKIELLPSYSTATLIDEPTEVDDPWNLPTLQDSGIKWSERDTKGKILCFFQGIGRLILLLGFLYFFVCSLDILSSAFQLVGGKMAGQFFSNSSIMSNPLLGLVIGVLVTVLVQSSS

SEQ ID NO: 64457 - protein, 163 aa, Homo sapiens
MAPWPELGDAQPNPDKYLEGAAGQQPTAPDKSKETNKNNTEAPVTKIELLPSYSTATLIDEPTEVDDPWNLPTLQDSGIKWSERDTKGKILCFFQGIGRLILLLGFLYFFVCSLDILSSAFQLVGGKMAGQFFSNSSIMSNPLLGLVIGVLVTVLVQSSSTST

SEQ ID NO: 64458 - protein, 599 aa, Homo sapiens
MPSSLPGSQVPHPTLDAVDLVEKTLRNEGTSSSAPVLEEGDTDPWTLPQLKDTSQPWKELRVAGRLRRVAGSVLKACGLLGSLYFFICSLDVLSSAFQLLGSKVAGDIFKDNVVLSNPVAGLVIGVLVTALVQSSSTSSSIVVSMVAAKLLTVRVSVPIIMGVNVGTSITSTLVSMAQSGDRDEFQRAFSGSAVHGIFNWLTVLVLLPLESATALLERLSELALGAASLTPRAQAPDILKVLTKPLTHLIVQLDSDMIMSSATGNATNSSLIKHWCGTTGQPTQENSSCGAFGPCTEKNSTAPADRLPCRHLFAGTELTDLAVGCILLAGSLLVLCGCLVLIVKLLNSVLRGRVAQVVRTVINADFPFPLGWLGGYLAVLAGAGLTFALQSSSVFTAAVVPLMGVGVISLDRAYPLLLGSNIGTTTTALLAALASPADRMLSALQVALIHFFFNLAGILLWYLVPALRLPIPLARHFGVVTARYRWVAGVYLLLGFLLLPLAAFGLSLAGGMELAAVGGPLVGLVLLVILVTVLQRRRPAWLPVRLRSWAWLPVWLHSLEPWDRLVTRCCPCNVCSPPKATTKEAYCYENPEILASQQL

SEQ ID NO: 64459 - protein, 599 aa, Homo sapiens; identical to SEQ ID NO: 64458

SEQ ID NO: 64460 - protein, 189 aa, Homo sapiens
MTLMAAVYTIALRYTRTSDKELYFSTTAVCITEVIKLLLSVGILAKETGSLGRFKASLRENVLGSPKELLKLSVPSLVYAVQNNMAFLALSNLDAAVYQVTYQLKIPCTALCTVLMLNRTLSKLQWVSVFMLCAGVTLVQWKPAQATKVVEYILKKFKEFRYFSLGEKHSNVSIRDYCDISWRLLVRWS

SEQ ID NO: 64461 - protein, 337 aa, Homo sapiens
MAAPRDNVTLLFKLYCLAVMTLMAAVYTIALRYTRTSDKELYFSTTAVCITEVIKLLLSVGILAKETGSLGRFKASLRENVLGSPKELLKLSVPSLVYAVQNNMAFLALSNLDAAVYQVTYQLKIPCTALCTVLMLNRTLSKLQWVSVFMLCAGVTLVQWKPAQATKVVVEQNPLLGFGAIAIAVLCSGFAGVYFEKVLKSSDTSLWVRNIQMYLSGIIVTLAGVYLSDGAEIKEKGFFYGYTYYVWFVIFLASVGGLYTSVVVKYTDNIMKGFSAAAAIVLSTIASVMLFGLQITLTFALGTLLVCVSIYLYGLPRQDTTSIQQGETASKERVIGV

SEQ ID NO: 64462 - protein, 278 aa, Homo sapiens
MAAPRDNVTLLFKLYCLAVMTLMAAVYTIALRYTRTSDKELYFSTTAVCITEVIKLLLSVGILAKETGSLGRFKASLRENVLGSPKELLKLSVPSLVYAVQNNMAFLALSNLDAAVYQVTYQLKIPCTALCTVLMLNRTLSKLQWVSVFMLCAGVTLVQWKPAQATKVVVEQNPLLGFGAIAIAVLCSGFAVLASVGGLYTSVVVKYTDNIMKGFSAAAAIVLSTIASVMLFGLQITLTFALGTLLVCVSIYLYGLPRQDTTSIQQGETASKERVIGV

SEQ ID NO: 64463 - protein, 189 aa, Homo sapiens
MAAPRDNVTLLFKLYCLAVMTLMAAVYTIALRYTRTSDKELYFSTTAVCITEVIKLLLSVGILAKETGSLGRFKASLRENVLGSPKELLKLSVPSLVYAVQNNMAFLALSNLDAAVYQVTYQLKIPCTALCTVLMLNRTLSKLQWVSVFMLCAGVTLVQWKPAQATKVVFLQVLVASTLLLWLSTQTTS

SEQ ID NO: 64464 - protein, 178 aa, Homo sapiens
MAAPRDNVTLLFKLYCLAVMTLMAAVYTIALRYTRTSDKELYFSTTAVCITEVIKLLLSVGILAKETGSLGRFKASLRENVLGSPKELLKLSVPSLVYAVQNNMAFLALSNLDAAVYQVTYQLKIPCTALCTVLMLNRTLSKLQKKDFSMVTHIMSGLSSVSIQELKVLSRSFIFFLS

SEQ ID NO: 64465 - protein, 203 aa, Homo sapiens
MLNRTLSKLQWVSVFMLCAGVTLVQWKPAQATKVVVEQNPLLGFGAIAIAVLCSGFAGVYFEKVLKSSDTSLWVRNIQMYLSGIIVTLAGVYLSDGAEIKEKGFFYGYTYYVWFVIFLASVGGLYTSVVVKYTDNIMKGFSAAAAIVLSTIASVMLFGLQITLTFALGTLLVCVSIYLYGLPRQDTTSIQQGETASKERVIGV

SEQ ID NO: 64466 - protein, 396 aa, Homo sapiens
MAAVGAGGSTAAPGPGAVSAGALEPGTASAAHRRLKYISLAVLVVQNASLILSIRYARTLPGDRFFATTAVVMAEVLKGLTCLLLLFAQKRGNVKHLVLFLHEAVLVQYVDTLKLAVPSLIYTLQNNLQYVAISNLPAATFQVTYQLKILTTALFSVLMLNRSLSRLQWASLLLLFTGVAIVQAQQAGGGGPRPLDQNPGAGLAAVVASCLSSGFAGVYFEKILKGSSGSVWLRNLQLGLFGTALGLVGLWWAEGTAVATRGFFFGYTPAVWGVVLNQAFGGLLVAVVVKYADNILKGFATSLSIVLSTVASIRLFGFHVDPLFALGAGLVIGAVYLYSLPRGAAKAIASASASASGPCVHQQPPGQPPPPQLSSHRGDLITEPFLPKLLTKVKGS

SEQ ID NO: 64467 - protein, 163 aa, Homo sapiens
MAAVGAGGSTAAPGPGAVSAGALEPGTASAAHRRLKYISLAVLVVQNASLILSIRYARTLPGDRFFATTAVVMAEVLKGLTCLLLLFAQKRGNVKHLVLFLHEAVLVQYVDTLKLAVPSLIYTLQNNLQYVAISNLPAATFQVSPKPSMAPEELTGLGTGVWE

SEQ ID NO: 64468 - protein, 218 aa, Homo sapiens
MKLCRDAHRRLKYISLAVLVVQNASLILSIRYARTLPGDRFFATTAVVMAEVLKGLTCLLLLFAQKRGNVKHLVLFLHEAVLVQYVDTLKLAVPSLIYTLQNNLQYVAISNLPAATFQPSPRCSQSHSLCLCLRLRALRSPAASRAATTTAAVFPPWRPHHGALSAKVSAGEVRAGSNGGTQGRGTGVEGVGHLQDPSRHPPGPGSSGFGRWSFLPGH

SEQ ID NO: 64469 - protein, 393 aa, Homo sapiens
MAAVGAGGSTAAPGPGAVSAGALEPGTASAAHRRLKYISLAVLVVQNASLILSIRYARTLPGDRFFATTAVVMAEVLKGLTCLLLLFAQKRGNVKHLVLFLHEAVLVQYVDTLKLAVPSLIYTLQNNLQYVAISNLPAATFQVTYQLKILTTALFSVLMLNRSLSRLQWASLLLLFTGVAIVQAQQAGGGGPRPLDQNPGAGLAAVVASCLSSGFAGVYFEKILKGSSGSVWLRNLQLGLFGTALGLVGLWWAEGTAVATRGFFFGYTPAVWGVVLNQAFGGLLVAVVVKYADNILKGFATSLSIVLSTVASIRLFGFHVDPLFALGAGLVIGAVYLYSLPRGAAKAIASASASASGPCVHQQPPGQPPPPQLSSHRGDLITEPFLPKSVLVK

SEQ ID NO: 64470 - protein, 224 aa, Homo sapiens
MAAVGAGGSTAAPGPGAVSAGALEPGTASAAHRRLKYISLAVLVVQNASLILSIRYARTLPGDRFFATTAVVMAEVLKGLTCLLLLFAQKRGNVKHLVLFLHEAVLVQYVDTLKLAVPSLIYTLQNNLQYVAISNLPAATFQPSPRCSQSHSLCLCLRLRALRSPAASRAATTTAAVFPPWRPHHGALSAKVAHQGEGFLAAGIEDIGLASFSLLALGPAGTKL

SEQ ID NO: 64471 - protein, 332 aa, Homo sapiens
MAAVGAGGSTAAPGPGAVSAGALEPGTASAGNVKHLVLFLHEAVLVQYVDTLKLAVPSLIYTLQNNLQYVAISNLPAATFQVTYQLKILTTALFSVLMLNRSLSRLQWASLLLLFTGVAIVQAQQAGGGGPRPLDQNPGAGLAAVVASCLSSGFAGVYFEKILKGSSGSVWLRNLQLGLFGTALGLVGLWWAEGTAVATRGFFFGYTPAVWGVVLNQAFGGLLVAVVVKYADNILKGFATSLSIVLSTVASIRLFGFHVDPLFALGAGLVIGAVYLYSLPRGAAKAIASASASASGPCVHQQPPGQPPPPQLSSHRGDLITEPFLPKSVLVK

SEQ ID NO: 64472 - protein, 242 aa, Homo sapiens
MAAVGAGGSTAAPGPGAVSAGALEPGTASAAHRRLKYISLAVLVVQNASLILSIRYARTLPGDRFFATTAVVMAEVLKGLTCLLLLFAQKRGNVKHLVLFLHEAVLVQYVDTLKLAVPSLIYTLQNNLQYVAISNLPAATFQPSPRCSQSHSLCLCLRLRALRSPAASRAATTTAAVFPPWRPHHGALSAKVSAGEVRAGSNGGTQGRGTGVEGVGHLQDPSRHPPGPGSSGFGRWSFLPGH

SEQ ID NO: 64473 - protein, 176 aa, Homo sapiens
MAEVLKGLTCLLLLFAQKRGNVKHLVLFLHEAVLVQYVDTLKLAVPSLIYTLQNNLQYVAISNLPAATFQVTYQLKILTTALFSVLMLNRSLSRLQWASLLLLFTGVAIVQAQQAGGGGPRPLDQNPGAGLAAVVASCLSSGFAGVYFEKILKGSSGSVWLRNLQLGLFGTALGLV

SEQ ID NO: 64474 - protein, 421 aa, Homo sapiens
MAAVGAGGSTAAPGPGAVSAGALEPGTASAELLLTWEEAEARGQGLPQPLPDTSVRIPAHRRLKYISLAVLVVQNASLILSIRYARTLPGDRFFATTAVVMAEVLKGLTCLLLLFAQKRGNVKHLVLFLHEAVLVQYVDTLKLAVPSLIYTLQNNLQYVAISNLPAATFQVTYQLKILTTALFSVLMLNRSLSRLQWASLLLLFTGVAIVQAQQAGGGGPRPLDQNPGAGLAAVVASCLSSGFAGVYFEKILKGSSGSVWLRNLQLGLFGTALGLVGLWWAEGTAVATRGFFFGYTPAVWGVVLNQAFGGLLVAVVVKYADNILKGFATSLSIVLSTVASIRLFGFHVDPLFALGAGLVIGAVYLYSLPRGAAKAIASASASASGPCVHQQPPGQPPPPQLSSHRGDLITEPFLPKSVLVK

SEQ ID NO: 64475 - protein, 355 aa, Homo sapiens
MAEVHRRQHARVKGEAPAKSSTLRDEEELGMASAETLTVFLKLLAAGFYGVSSFLIVVVNKSVLTNYRFPSSLCVGLGQMVATVAVLWVGKALRVVKFPDLDRNVPRKTFPLPLLYFGNQITGLFSTKKLNLPMFTVLRRFSILFTMFAEGVLLKKTFSWGIKMTVFAMIIGAFVAASSDLAFDLEGYAFILINDVLTAANGAYVKQKLDSKELGKYGLLYYNALFMILPTLAIAYFTGDAQKAVEFEGWADTLFLLQFTLSCVMGFILMYATVLCTQYNSALTTTIVGCIKNILITYIGMVFGGDYIFTWTNFIGLNISIAGSLVYSYITFTEEQLSKQSEANNKLDIKGKGAV

SEQ ID NO: 64476 - protein, 260 aa, Homo sapiens
MVATVAVLWVGKALRVVKFPDLDRNVPRKTFPLPLLYFGNQITGLFSTKKLNLPMFTVLRRFSILFTMFAEGVLLKKTFSWGIKMTVFAMIIGAFVAASSDLAFDLEGYAFILINDVLTAANGAYVKQKLDSKELGKYGLLYYNALFMILPTLAIAYFTGDAQKAVEFEGWADTLFLLQFTLSCVMGFILMYATVLCTQYNSALTTTIVGCIKNILITYIGMVFGGDYIFTWTNFIGLNISCICHRGLCELRVGSATLGG

SEQ ID NO: 64477 - protein, 367 aa, Homo sapiens
MSSRSVLSPVVGTDAPDQHLELKKPQELKEMERLPLANEDKTMFANLKYVSLGILVFQTTSLVLTMRYSRTLKEEGPRYLSSTAVVVAELLKIMACILLVYKDSKCSLRALNRVLHDEILNKPMETLKLAIPSGIYTLQNNLLYVALSNLDAATYQVTYQLKILTTALFSVSMLSKKLGVYQWLSLVILMTGVAFVQWPSDSQLDSKELSAGSQFVGLMAVLTACFSSGFAGVYFEKILKETKQSVWIRNIQLGFFGSIFGLMGVYIYDGELVSKNGFFQGYNRLTWIVVVLQALGGLVIAAVIKYADNILKGFATSLSIILSTLISYFWLQDFVPTSVFFLGAILVITATFLYGYDPKPAGNPTKA

SEQ ID NO: 64478 - protein, 325 aa, Homo sapiens
MFANLKYVSLGILVFQTTSLVLTMRYSRTLKEEGPRYLSSTAVVVAELLKIMACILLVYKDSKCSLRALNRVLHDEILNKPMETLKLAIPSGIYTLQNNLLYVALSNLDAATYQVTYQLKILTTALFSVSMLSKKLGVYQWLSLVILMTGVAFVQWPSDSQLDSKELSAGSQFVGLMAVLTACFSSGFAGVYFEKILKETKQSVWIRNIQLGFFGSIFGLMGVYIYDGELVSKNGFFQGYNRLTWIVVVLQALGGLVIAAVIKYADNILKGFATSLSIILSTLISYFWLQDFVPTSVFFLGAILVITATFLYGYDPKPAGNPTKA

SEQ ID NO: 64479 - protein, 224 aa, Homo sapiens
MFANLKYVSLGILVFQTTSLVLTMRYSRTLKEEGPRYLSSTAVVVAELLKIMACILLVYKDSKCSLRALNRVLHDEILNKPMETLKLAIPSGIYTLQNNLLYVALSNLDAATYQVTYQLKILTTALFSVSMLSKKLGVYQWLSLVILMTGVAFVQWPSDSQLDSKELSAGSQFVGLMAVLTACFSSGFAGVYFEKILKETKQSVWIRNIQLGFFGSIFGLMGVY

SEQ ID NO: 64480 - protein, 325 aa, Homo sapiens; identical to SEQ ID NO: 64478

SEQ ID NO: 64481 - protein, 220 aa, Homo sapiens
MFANLKYVSLGILVFQTTSLVLTMRYSRTLKEEGPRYLSSTAVVVAELLKIMACILLVYKDSKCSLRALNRVLHDEILNKPMETLKLAIPSGIYTLQNNLLYVALSNLDAATYQVTYQLKILTTALFSVSMLSKKLGVYQWLSLVILMTGVAFVQWPSDSQLDSKELSAGSQFVGLMAVLTACFSSGFAGVYFEKILKETKQSVWIRNIQLVSFSLEPSL

SEQ ID NO: 64482 - protein, 85 aa, Homo sapiens
MFANLKYVSLGILVFQTTSLVLTMRYSRTLKEEGPRYLSSTAVVVAELLKIMACILLVYKDSKCSLRALNRVLHDEILNKPMETL

SEQ ID NO: 64483 - protein, 367 aa, Homo sapiens; identical to SEQ ID NO: 64477

SEQ ID NO: 64484 - protein, 322 aa, Homo sapiens
MASSSSLVPDRLRLPLCFLGVFVCYFYYGILQEKITRGKYGEGAKQETFTFALTLVFIQCVINAVFAKILIQFFDTARVDRTRSWLYAACSISYLGAMVSSNSALQFVNYPTQVLGKSCKPIPVMLLGVTLLKKKYPLAKYLCVLLIVAGVALFMYKPKKVVGIEEHTVGYGELLLLLSLTLDGLTGVSQDHMRAHYQTGSNHMMLNINLWSTLLLGMGILFTGELWEFLSFAERYPAIIYNILLFGLTSALGQSFIFMTVVYFGPLTCSIITTTRKFFTILASVILFANPISPMQWVGTVLVFLGLGLDAKFGKGAKKTSH

SEQ ID NO: 64485 - protein, 149 aa, Homo sapiens
PQSCLIGKISRARDQSRGCRFPWPSGMEPRTRVGPLLVLPDACKQPIRPRPWCHSRNTVSSCLGTRGKYGEGAKQETFTFALTLVFIQCVINAVFAKIWWIVPGAGSMLPVLSPIWVPWSPAIQHYSLSTTQLRSLVNPASQSQSCSLG

SEQ ID NO: 64486 - protein, 359 aa, Homo sapiens
MRPLPPVGDVRLELSPPPPLLPVPVVSGSPVGSSGRLMASSSSLVPDRLRLPLCFLGVFVCYFYYGILQEKITRGKYGEGAKQETFTFALTLVFIQCVINAVFAKILIQFFDTARVDRTRSWLYAACSISYLGAMVSSNSALQFVNYPTQVLGKSCKPIPVMLLGVTLLKKKYPLAKYLCVLLIVAGVALFMYKPKKVVGIEEHTVGYGELLLLLSLTLDGLTGVSQDHMRAHYQTGSNHMMLNINLWSTLLLGMGILFTGELWEFLSFAERYPAIIYNILLFGLTSALGQSFIFMTVVYFGPLTCSIITTTRKFFTILASVILFANPISPMQWVGTVLVFLGLGLDAKFGKGAKKTSH

SEQ ID NO: 64487 - protein, 239 aa, Homo sapiens
MASSSSLVPDRLRLPLCFLGVFVCYFYYGILQEKITRGKYGEGAKQETFTFALTLVFIQCVINAVFAKILIQFFDTARVDRTRSWLYAACSISYLGAMVSSNSALQFVNYPTQVLGKSCKPIPVMLLGVTLLKKKYPLAKYLCVLLIVAGVALFMYKPKKVVGIEEHTVGYGELLLLLSLTLDGLTGVSQDHMRAHYQTGSNHMMLNINLWSTLLLGMGESQFCCSSHVSPEGRLPSSF

SEQ ID NO: 64488 - protein, 198 aa, Homo sapiens
MLLGVTLLKKKYPLAKYLCVLLIVAGVALFMYKPKKVVGIEEHTVGYGELLLLLSLTLDGLTGVSQDHMRAHYQTGSNHMMLNINLWSTLLLGMGILFTGELWEFLSFAERYPAIIYNILLFGLTSALGQSFIFMTVVYFGPLTCSIITTTRKFFTILASVILFANPISPMQWVGTVLVFLGLGLDAKFGKGAKKTSH

SEQ ID NO: 64489 - protein, 189 aa, Homo sapiens
MLLGVTLLKKKYPLAKYLCVLLIVAGVALFMYKPKKVVGIEEHTVGYGELLLLLSLTLDGLTGVSQDHMRAHYQTGSNHMMLNINLWSTLLLGMGILFTGELWEFLSFAERYPAIIYNILLFGLTSALGQSFIFMTVVYFGPLTCSIITTTRKFFTILASVILFANPISPMQWVGTVLVFLAMGSCCVA

SEQ ID NO: 64490 - protein, 392 aa, Homo sapiens
MDARWWAVVVLAAFPSLGAGGETPEAPPESWTQLWFFRFVVNAAGYASFMVPGYLLVQYFRRKNYLETGRGLCFPLVKACVFGNEPKASDEVPLAPRTEAAETTPMWQALKLLFCATGLQVSYLTWGVLQERVMTRSYGATATSPGERFTDSQFLVLMNRVLALIVAGLSCVLCKQPRHGAPMYRYSFASLSNVLSSWCQYEALKFVSFPTQVLAKASKVIPVMLMGKLVSRRSYEHWEYLTATLISIGVSMFLLSSGPEPRSSPATTLSGLFTVGSLLEQGALLEGTRFMGRHSEFAAHALLLSICSACGQLFIFYTIGQFGAAVFTIIMTLRQAFAILLSCLLYGHTVTVVGGLGVAVVFAALLLRVYARGRLKQRGKKAVPVESPVQKV

SEQ ID NO: 64491 - protein, 432 aa, Homo sapiens
MDARWWAVVVLAAFPSLGAGGETPEAPPESWTQLWFFRFVVNAAGYASFMVPGYLLVQYFRRKNYLETGRGLCFPLVKACVFGNEPKASDEVPLAPRTEAAETTPMWQALKLLFCATGLQVSYLTWGVLQERVMTRSYGATATSPGERFTDSQFLVLMNRVLALIVAGLSCVLCKQPRHGAPMYRYSFASLSNVLSSWCQYEALKFVSFPTQVLAKASKVIPVMLMGKLVSRRSYEHWEYLTATLISIGVSMFLLSSGPEPRSSPATTLSGLILLAGYIAFDSFTSNWQDALFAYKMSSVQMMFGVNFFSCLFTVGSLLEQGALLEGTRFMGRHSEFAAHALLLSICSACGQLFIFYTIGQFGAAVFTIIMTLRQAFAILLSCLLYGHTVTVVGGLGVAVVFAALLLRVYARGRLKQRGKKAVPVESPVQKV

SEQ ID NO: 64492 - protein, 299 aa, Homo sapiens
MTRSYGATATSPGERFTDSQFLVLMNRVLALIVAGLSCVLCKQPRHGAPMYRYSFASLSNVLSSWCQYEALKFVSFPTQVLAKASKVIPVMLMGKLVSRRSYEHWEYLTATLISIGVSMFLLSSGPEPRSSPATTLSGLILLAGYIAFDSFTSNWQDALFAYKMSSVQMMFGVNFFSCLFTVGSLLEQGALLEGTRFMGRHSEFAAHALLLSICSACGQLFIFYTIGQFGAAVFTIIMTLRQAFAILLSCLLYGHTVTVVGGLGVAVVFAALLLRVYARGRLKQRGKKAVPVESPVQKV

SEQ ID NO: 64493 - protein, 339 aa, Homo sapiens
MLLAMPALWYLATSWCSTSGGRTTWRPVSYLTWGVLQERVMTRSYGATATSPGERFTDSQFLVLMNRVLALIVAGLSCVLCKQPRHGAPMYRYSFASLSNVLSSWCQYEALKFVSFPTQVLAKASKVIPVMLMGKLVSRRSYEHWEYLTATLISIGVSMFLLSSGPEPRSSPATTLSGLILLAGYIAFDSFTSNWQDALFAYKMSSVQMMFGVNFFSCLFTVGSLLEQGALLEGTRFMGRHSEFAAHALLLSICSACGQLFIFYTIGQFGAAVFTIIMTLRQAFAILLSCLLYGHTVTVVGGLGVAVVFAALLLRVYARGRLKQRGKKAVPVESPVQKV

SEQ ID NO: 64494 - protein, 283 aa, Homo sapiens
MDLTQQAKDIQNITVQETNKNNSESIECSKITMDLKFNNSRKYISITVPSKTQTMSPHIKSVDDVVVLGMNLSKFNKLTQFFICVAGVFVFYLIYGYLQELIFSVEGFKSCGWYLTLVQFAFYSIFGLIELQLIQDKRRRIPGKTYMIIAFLTVGTMGLSNTSLGYLNYPTQVIFKCCKLIPVMLGGVFIQGKRYNVADVSAAICMSLGLIWFTLADSTTAPNFNLTGVVLISLALCADAVIGNVQEKAMKLHNASNSEMNITTSSYSGVFIFPNKLKIPLVL

SEQ ID NO: 64495 - protein, 401 aa, Homo sapiens
MDLTQQAKDIQNITVQETNKNNSESIECSKITMDLKFNNSRKYISITVPSKTQTMSPHIKSVDDVVVLGMNLSKFNKLTQFFICVAGVFVFYLIYGYLQELIFSVEGFKSCGWYLTLVQFAFYSIFGLIELQLIQDKRRRIPGKTYMIIAFLTVGTMGLSNTSLGYLNYPTQVIFKCCKLIPVMLGGVFIQGKRYNVADVSAAICMSLGLIWFTLADSTTAPNFNLTGVVLISLALCADAVIGNVQEKAMKLHNASNSEMVLYSYSIGFVYILLGLTCTSGLGPAVTFCAKNPVRTYGYAFLFSLTGYFGISFVLALIKIFGALIAVTVTTGRKAMTIVLSFIFFAKPFTFQYVWSGLLVVLGIFLNVYSKNMDKIRLPSLYDLINKSVEARKSRTLAQTV

SEQ ID NO: 64496 - protein, 218 aa, Homo sapiens [sequence omitted]

SEQ ID NO: 64497 - protein, 331 aa, Homo sapiens
MRPALAVGLVFAGCCSNVIFLELLARKHPGCGNIVTFAQFLFIAVEGFLFEADLGRKPPAIPIRYYAIMVTMFFTVSVVNNYALNLNIAMPLHMIFRSGSLIANMILGIIILKKRYSIFKYTSIALVSVGIFICTFMSAKQVTSQSSLSENDGFQAFVWWLLGIGALTFALLMSARMGIFQETLYKRFGKHSKEALFYNHALPLPGFVFLASDIYDHAVLFNKSELYEIPVIGVTLPIMWFYLLMNIITQYVCIRGVFILTTECASLTVTLVVTLRKFVSLIFSILYFQNPFTLWHWLGTLFVFIGTLMYTEVWNNLGTTKSEPQKDSKKN

SEQ ID NO: 64498 - protein, 364 aa, Homo sapiens
MNRAPLKRSRILHMALTGASDPSAEAEANGEKPFLLRALQIALVVSLYWVTSISMVFLNKYLLDSPSLRLDTPIFVTFYQCLVTTLLCKGLSALAACCPGAVDFPSLRLDLRVARSVLPLSVVFIGMITFNNLCLKYVGVAFYNVGRSLTTVFNVLLSYLLLKQTTSFYALLTCGIIIGGFWLGVDQEGAEGTLSWLGTVFGVLASLCVSLNAIYTTKVLPAVDGSIWRLTFYNNVNACILFLPLLLLLGELQALRDFAQLGSAHFWGMMTLGGLFGFAIGYVTGLQIKFTSPLTHNVSGTAKACAQTVLAVLYYEETKSFLWWTSNMMVLGGSSAYTWVRGWEMKKTPEEPSPKDSEKSAMGV

SEQ ID NO: 64499 - protein, 351 aa, Homo sapiens
MALTGASDPSAEAEANGEKPFLLRALQIALVVSLYWVTSISMVFLNKYLLDSPSLRLDTPIFVTFYQCLVTTLLCKGLSALAACCPGAVDFPSLRLDLRVARSVLPLSVVFIGMITFNNLCLKYVGVAFYNVGRSLTTVFNVLLSYLLLKQTTSFYALLTCGIIIGGFWLGVDQEGAEGTLSWLGTVFGVLASLCVSLNAIYTTKVLPAVDGSIWRLTFYNNVNACILFLPLLLLLGELQALRDFAQLGSAHFWGMMTLGGLFGFAIGYVTGLQIKFTSPLTHNVSGTAKACAQTVLAVLYYEETKSFLWWTSNMMVLGGSSAYTWVRGWEMKKTPEEPSPKDSEKSAMGV

SEQ ID NO: 64500 - protein, 351 aa, Homo sapiens; identical to SEQ ID NO: 64499

SEQ ID NO: 64501 - protein, 72 aa, Homo sapiens
MALTGASDPSAEAEANGEKPFLLRALQIALVVSLYWVTSISMVFLNKYLLDSPSLRLDTPIFVTFYQCLVTT

SEQ ID NO: 64502 - protein, 165 aa, Homo sapiens
MALTGASDPSAEAEANGEKPFLLRALQIALVVSLYWVTSISMVFLNKYLLDSPSLRLDTPIFVTFYQCLVTTLLCKGLSALAACCPGAVDFPSLRLDLRVARSVLPLSVVFIGMITFNNLCLKYVGVAFYNVGRSLTTVFNVLLSYLLLKQTTSFYALLTCGIII

SEQ ID NO: 64503 - protein, 246 aa, Homo sapiens
MNRAPLKRSRILHMALTGASDPSAEAEANGEKPFLLRALQIALVVSLYWVTSISMVFLNKYLLDSPSLRLDTPIFVTFYQCLVTTLLCKGLSALAACCPGAVDFPSLRLDLRVARSVLPLSVVFIGMITFNNLCLKYVGVAFYNVGRSLTTVFNVLLSYLLLKQTTSFYALLTCGIIIGGFWLGVDQEGAEGTLSWLGTVFGVLASLCVSLNAIYTTKVLPAVDGSIWRLTFYNNVNACILFLPLL

SEQ ID NO: 64504 - protein, 337 aa, Homo sapiens
MTAGGQAEAEGAGGEPGAARLPSRVARLLSALFYGTCSFLIVLVNKALLTTYGFPSPIFLGIGQMAATIMILYVSKLNKIIHFPDFDKKIPVKLFPLPLLYVGNHISGLSSTSKLSLPMFTVLRKFTIPLTLLLETIILGKQYSLNIILSVFAIILGAFIAAGSDLAFNLEGYIFVFLNDIFTAANGVYTKQKMDPKELGKYGVLFYNACFMIIPTLIISVSTGDLQQATEFNQWKNVVFILQFLLSCFLGFLLMYSTVLCSYYNSALTTAVVGAIKNVSVAYIGILIGGDYIFSLLNFVGLNICMAGGLRYSFLTLSSQLKPKPVGEENICLDLKS

SEQ ID NO: 64505 - protein, 163 aa, Homo sapiens
MTAGGQAEAEGAGGEPGAARLPSRVARLLSALFYGTCSFLIVLVNKALLTTYGFPSPIFLGIGQMAATIMILYVSKLNKIIHFPDFDKKIPVKLFPLPLLYVGNHISGLSSTSKLSLPMFTVLRKFTIPLTLLLETIILGKQYSLNIILSVFAIILGAFIAAG

SEQ ID NO: 64506 - protein, 249 aa, Homo sapiens
MTAGGQAEAEGAGGEPGAARLPSRVARLLSALFYGTCSFLIVLVNKALLTTYGFPSPIFLGIGQMAATIMILYVSKLNKIIHFPDFDKKIPVKLFPLPLLYVGNHISGLSSTSKLSLPMFTVLRKFTIPLTLLLETIILGKQYSLNIILSVFAIILGAFIAAGFLLMYSTVLCSYYNSALTTAVVGAIKNVSVAYIGILIGGDYIFSLLNFVGLNICMAGGLRYSFLTLSSQLKPKPVGEENICLDLKS

SEQ ID NO: 64507 - protein, 416 aa, Homo sapiens
MRQLCRGRVLGISVAIAHGVFSGSLNILLKFLISRYQFSFLTLVQCLTSSTAALSLELLRRLGLIAVPPFGLSLARSFAGVAVLSTLQSSLTLWSLRGLSLPMYVVFKRCLPLVTMLIGVLVLKNGAPSPGVLAAVLITTCGAALAGAGDLTGDPIGYVTGVLAVLVHAAYLVLIQKASADTEHGPLTAQYVIAVSATPLLVICSFASTDSIHAWTFPGWKDPAMVCIFVACILIGCAMNFTTLHCTYINSAVTTSFVGVVKSIATITVGMVAFSDVEPTSLFIAGVVVNTLGSIIYCVAKFMETRKQSNYEDLEAQPRGEEAQLSGDQLPFVMEELPGEGGNGRSEGGEAAGGPAQESRQEVRGSPRGVPLVAGSSEEGSRRSLKDAYLEVWRLVRGTRYMKKDYLIENEELPSP

SEQ ID NO: 64508 - protein, 476 aa, Homo sapiens
MSTQRLRNEDYHDYSSTDVSPEESPSEGLNNLSSPGSYQRFGQSNSTTWFQTLIHLLKGNIGTGLLGLPLAVKNAGIVMGPISLLIIGIVAVHCMGILVKCAHHFCRRLNKSFVDYGDTVMYGLESSPCSWLRNHAHWGRRVVDFFLIVTQLGFCCVYFVFLADNFKQVIEAANGTTNNCHNNETVILTPTMDSRLYMLSFLPFLVLLVFIRNLRALSIFSLLANITMLVSLVMIYQFIVQRIPDPSHLPLVAPWKTYPLFFGTAIFSFEGIGMVLPLENKMKDPRKFPLILYLGMVIVTILYISLGCLGYLQFGANIQGSITLNLPNCWLYQSVKLLYSIGIFFTYALQFYVPAEIIIPFFVSRAPEHCELVVDLFVRTVLVCLTCILAILIPRLDLVISLVGSVSSSALALIIPPLLEVTTFYSEGMSPLTIFKDALISILGFVGFVVGTYEALYELIQPSNAPIFINSTCAFI

SEQ ID NO: 64509 - protein, 386 aa, Homo sapiens
MSTQRLRNEDYHDYSSTDVSPEESPSEGLNNLSSPGSYQRFGQSNSTTWFQTLIHLLKGNIGTGLLGLPLAVKNAGIVMGPISLLIIGIVAVHCMGILVKCAHHFCRRLNKSFVDYGDTVMYGLESSPCSWLRNHAHWGRRVVDFFLIVTQLGFCCVYFVFLADNFKQVIEAANGTTNNCHNNETVILTPTMDSRLYMLSFLPFLVLLVFIRNLRALSIFSLLANITMLVSLVMIYQFIVQRIPDPSHLPLVAPWKTYPLFFGTAIFSFEGIGMVLPLENKMKDPRKFPLILYLGMVIVTILYISLGCLGYLQFGANIQGSITLNLPNCWLYQSVKLLYSIGIFFTYALQFYVPAEIIIPFFVSRAPEHCELVVDLFVRTVLVCLT

SEQ ID NO: 64510 - protein, 70 aa, Homo sapiens
MSTQRLRNEDYHDYSSTDVSPEESPSEGLNNLSSPGSYQRFGQSNSTTWFQTLIHLLKGNIGTGLLGLPL

SEQ ID NO: 64511 - protein, 72 aa, Homo sapiens
MSTQRLRNEDYHDYSSTDVSPEESPSEGLNNLSSPGSYQRFGQSNSTTWFQTLIHLLKGNIGTGLLGLPLAV

SEQ ID NO: 64512 - protein, 476 aa, Homo sapiens; identical to SEQ ID NO: 64508

SEQ ID NO: 64513 - protein, 388 aa, Homo sapiens
MSTQRLRNEDYHDYSSTDVSPEESPSEGLNNLSSPGSYQRFGQSNSTTWFQTLIHLLKGNIGTGLLGLPLAVKNAGIVMGPISLLIIGIVAVHCMGILVKCAHHFCRRLNKSFVDYGDTVMYGLESSPCSWLRNHAHWGRRVVDFFLIVTQLGFCCVYFVFLADNFKQVIEAANGTTNNCHNNETVILTPTMDSRLYMLSFLPFLVLLVFIRNLRALSIFSLLANITMLVSLVMIYQFIVQRIPDPSHLPLVAPWKTYPLFFGTAIFSFEGIGMVLPLENKMKDPRKFPLILYLGMVIVTILYISLGCLGYLQFGANIQGSITLNLPNCWLYQSVKLLYSIGIFFTYALQFYVPAEIIIPFFVSRAPEHCELVVDLFVRTVLVCLTCE

SEQ ID NO: 64514 - protein, 483 aa, Homo sapiens
MSVTKSTEGPQGAVAIKLDLMSPPESAKKLENKDSTFLDESPSESAGLKKTKGITVFQALIHLVKGNMGTGILGLPLAVKNAGILMGPLSLLVMGFIACHCMHILVKCAQRFCKRLNKPFMDYGDTVMHGLEANPNAWLQNHAHWGRHIVSFFLIITQLGFCCVYIVFLADNLKQVVEAVNSTTNNCYSNETVILTPTMDSRLYMLSFLPFLVLLVLIRNLRILTIFSMLANISMLVSLVIIIQYITQEIPDPSRLPLVASWKTYPLFFGTAIFSFESIGVVLPLENKMKNARHFPAILSLGMSIVTSLYIGMAALGYLRFGDDIKASISLNLPNCWLYQSVKLLYIAGILCTYALQFYVPAEIIIPFAISRVSTRWALPLDLSIRLVMVCLTCLLAILIPRLDLVISLVGSVSGTALALIIPPLLEVTTFYSEGMSPLTIFKDALISILGFVGFVVGTYQALDELLKSEDSHPFSNSTTFVR

SEQ ID NO: 64515 - protein, 207 aa, Homo sapiens
MNDTAVLPLENKMKNARHFPAILSLGMSIVTSLYIGMAALGYLRFGDDIKASISLNLPNCWLYQSVKLLYIAGILCTYALQFYVPAEIIIPFAISRVSTRWALPLDLSIRLVMVCLTCLLAILIPRLDLVISLVGSVSGTALALIIPPLLEVTTFYSEGMSPLTIFKDALISILGFVGFVVGTYQALDELLKSEDSHPFSNSTTFVR

SEQ ID NO: 64516 - protein, 470 aa, Homo sapiens
MSLLGRDYNSELNSLDNGPQSPSESSSSITSENVHPAGEAGLSMMQTLIHLLKCNIGTGLLGLPLAIKNAGLLVGPVSLLAIGVLTVHCMVILLNCAQHLSQRLQKTFVNYGEATMYGLETCPNTWLRAHAVWGRYTVSFLLVITQLGFCSVYFMFMADNLQQMVEKAHVTSNICQPREILTLTPILDIRFYMLIILPFLILLVFIQNLKVLSVFSTLANITTLGSMALIFEYIMEGIPYPSNLPLMANWKTFLLFFGTAIFTFEGVGMVLPLKNQMKHPQQFSFVLYLGMSIVIILYILLGTLGYMKFGSDTQASITLNLPNCWLYQSVKLMYSIGIFFTYALQFHVPAEIIIPFAISQVSESWALFVDLSVRSALVCLTCVSAILIPRLDLVISLVGSVSSSALALIIPALLEIVIFYSEDMSCVTIAKDIMISIVGLLGCIFGTYQALYELPQPISHSMANSTGVHA

SEQ ID NO: 64517 - protein, 511 aa, Homo sapiens
MSLLGRDYNSELNSLDNGPQSPSESSSSITSENVHPAGEAGLSMMQTLIHLLKCNIGTGLLGLPLAIKNAGLLVGPVSLLAIGVLTVHCMVILLNCAQHLSQRLQKTFVNYGEATMYGLETCPNTWLRAHAVWGRWNLALSPRLECSGKISAHCNPHLQGSSNSPAQASRVAGIYRYTVSFLLVITQLGFCSVYFMFMADNLQQMVEKAHVTSNICQPREILTLTPILDIRFYMLIILPFLILLVFIQNLKVLSVFSTLANITTLGSMALIFEYIMEGIPYPSNLPLMANWKTFLLFFGTAIFTFEGVGMVLPLKNQMKHPQQFSFVLYLGMSIVIILYILLGTLGYMKFGSDTQASITLNLPNCWLYQSVKLMYSIGIFFTYALQFHVPAEIIIPFAISQVSESWALFVDLSVRSALVCLTCVSAILIPRLDLVISLVGSVSSSALALIIPALLEIVIFYSEDMSCVTIAKDIMISIVGLLGCIFGTYQALYELPQPISHSMANSTGVHA

SEQ ID NO: 64518 - protein, 504 aa, Homo sapiens
MEAAATPAAAGAARREELDMDVMRPLINEQNFDGTSDEEHEQELLPVQKHYQLDDQEGISFVQTLMHLLKGNIGTGLLGLPLAIKNAGIVLGPISLVFIGIISVHCMHILVRCSHFLCLRFKKSTLGYSDTVSFAMEVSPWSCLQKQAAWGRSVVDFFLVITQLGFCSVYIVFLAENVKQVHEGFLESKVFISNSTNSSNPCERRSVDLRIYMLCFLPFIILLVFIRELKNLFVLSFLANVSMAVSLVIIYQYVVRNMPDPHNLPIVAGWKKYPLFFGTAVFAFEGIGVVLPLENQMKESKRFPQALNIGMGIVTTLYVTLATLGYMCFHDEIKGSITLNLPQDVWLYQSVKILYSFGIFVTYSIQFYVPAEIIIPGITSKFHTKWKQICEFGIRSFLVSITCAGAILIPRLDIVISFVGAVSSSTLALILPPLVEILTFSKEHYNIWMVLKNISIAFTGVVGFLLGTYITVEEIIYPTPKVVAGTPQSPFLNLNSTCLTSGLK

SEQ ID NO: 64519 - protein, 533 aa, Homo sapiens
MARLPAGIRFIISFSRDQWYRAFIFILTFLLYASFHLSRKPISIVKGELHKYCTAWDEADVRFSSQNRKSGSAAPHQLPDNETDCGWAPFDKNNYQQLLGALDYSFLCAYAVGMYLSGIIGERLPIRYYLTFGMLASGAFTALFGLGYFYNIHSFGFYVVTQVINGLVQTTGWPSVVTCLGNWFGKGRRGLIMGVWNSHTSVGNILGSLIAGYWVSTCWGLSFVVPGAIVAAMGIVCFLFLIEHPNDVRCSSTLVTHSKGYENGTNRLRLQKQILKSEKNKPLDPEMQCLLLSDGKGSIHPNHVVILPGDGGSGTAAISFTGALKIPGVIEFSLCLLFAKLVSYTFLFWLPLYITNVDHLDAKKAGELSTLFDVGGIFGGILAGVISDRLEKRASTCGLMLLLAAPTLYIFSTVSKMGLEATIAMLLLSGALVSGPYTLITTAVSADLGTHKSLKGNAHALSTVTAIIDGTGSVGAALGPLLAGLLSPSGWSNVFYMLMFADACALLFLIRLIHKELSCPGSATGDQVPFKEQ

SEQ ID NO: 64520 - protein, 533 aa, Homo sapiens; identical to SEQ ID NO: 64519

SEQ ID NO: 64521 - protein, 18 aa, Homo sapiens
MARLPAGIRFIISFSRDQ

SEQ ID NO: 64522 - protein, 18 aa, Homo sapiens
MARLPAGIRFIISFSRDQ

SEQ ID NO: 64523 - protein, 487 aa, Homo sapiens
MMHFKSGLELTELQNMTVPEDDNISNDSNDFTEVENGQINSKFISDRESRRSLTNSHLEKKKCDEYIPGTTSLGMSVFNLSNAIMGSGILGLAFALANTGILLFLVLLTSVTLLSIYSINLLLICSKETGCMVYEKLGEQVFGTTGKFVIFGATSLQNTGAMLSYLFIVKNELPSAIKFLMGKEETFSAWYVDGRVLVVIVTFGIILPLCLLKNLGYLGYTSGFSLSCMVFFLIVVIYKKFQIPCIVPELNSTISANSTNADTCTPKYVTFNSKTVYALPTIAFAFVCHPSVLPIYSELKDRSQKKMQMVSNISFFAMFVMYFLTAIFGYLTFYDNVQSDLLHKYQSKDDILILTVRLAVIVAVILTVPVLFFTVRSSLFELAKKTKFNLCRHTVVTCILLVVINLLVIFIPSMKDIFGVVGVTSANMLIFILPSSLYLKITDQDGDKGTQRIWAALFLGLGVLFSLVSIPLVIYDWACSSSSDEGH

SEQ ID NO: 64524 - protein, 487 aa, Homo sapiens; identical to SEQ ID NO: 64523

SEQ ID NO: 64525 - protein, 487 aa, Homo sapiens; identical to SEQ ID NO: 64523

SEQ ID NO: 64526 - protein, 487 aa, Homo sapiens; identical to SEQ ID NO: 64523

SEQ ID NO: 64527 - protein, 506 aa, Homo sapiens
MKKAEMGRFSISPDEDSSSYSSNSDFNYSYPTKQAALKSHYADVDPENQNFLLESNLGKKKYETEFHPGTTSFGMSVFNLSNAIVGSGILGLSYAMANTGIALFIILLTFVSIFSLYSVHLLLKTANEGGSLLYEQLGYKAFGLVGKLAASGSITMQNIGAMSSYLFIVKYELPLVIQALTNIEDKTGLWYLNGNYLVLLVSLVVILPLSLFRNLGYLGYTSGLSLLCMVFFLIVVICKKFQVPCPVEAALIINETINTTLTQPTALVPALSHNVTENDSCRPHYFIFNSQTVYAVPILIFSFVCHPAVLPIYEELKDRSRRRMMNVSKISFFAMFLMYLLAALFGYLTFYEHVESELLHTYSSILGTDILLLIVRLAVLMAVTLTVPVVIFPIRSSVTHLLCASKDFSWWRHSLITVSILAFTNLLVIFVPTIRDIFGFIGASAASMLIFILPSAFYIKLVKKEPMKSVQKIGALFFLLSGVLVMTGSMALIVLDWVHNAPGGGH

SEQ ID NO: 64528 - protein, 547 aa, Homo sapiens
MDPMELRNVNIEPDDESSSGESAPDSYIGIGNSEKAAMSSQFANEDTESQKFLTNGFLGKKKLADYADEHHPGTTSFGMSSFNLSNAIMGSGILGLSYAMANTGIILFIIMLLAVAILSLYSVHLLLKTAKEGGSLIYEKLGEKAFGWPGKIGAFVSITMQNIGAMSSYLFIIKYELPEVIRAFMGLEENTGEWYLNGNYLIIFVSVGIILPLSLLKNLGYLGYTSGFSLTCMVFFVSVVIYKKFQIPCPLPVLDHSVGNLSFNNTLPMHVVMLPNNSESSDVNFMMDYTHRNPAGLDENQAKGSLHDSGVEYEAHSDDKCEPKYFVFNSRTAYAIPILVFAFVCHPEVLPIYSELKDRSRRKMQTVSNISITGMLVMYLLAALFGYLTFYGEVEDELLHAYSKVYTLDIPLLMVRLAVLVAVTLTVPIVLFPIRTSVITLLFPKRPFSWIRHFLIAAVLIALNNVLVILVPTIKYIFGFIGASSATMLIFILPAVFYLKLVKKETFRSPQKVGALIFLVVGIFFMIGSMALIIIDWIYDPPNSKHH

SEQ ID NO: 64529 - protein, 259 aa, Homo sapiens
MDPMELRNVNIEPDDESSSGESAPDSYIGIGNSEKAAMSSQFANEDTESQKFLTNGFLGKKKLADYADEHHPGTTSFGMSSFNLSNAIMGSGILGLSYAMANTGIILFIIMLLAVAILSLYSVHLLLKTAKEGGSLIYEKLGEKAFGWPGKIGAFVSITMQNIGAMSSYLFIIKYELPEVIRAFMGLEENTGEWYLNGNYLIIFVSVGIILPLSLLKNLGYLGYTSGFSLTCMVFFVSVMIYKKISFFLQIFIILKLFF

SEQ ID NO: 64530 - protein, 547 aa, Homo sapiens; identical to SEQ ID NO: 64528

SEQ ID NO: 64531 - protein, 192 aa, Homo sapiens
MDPMELRNVNIEPDDESSSGESAPDSYIGIGNSEKAAMSSQFANEDTESQKFLTNGFLGKKKLADYADEHHPGTTSFGMSSFNLSNAIMGSGILGLSYAMANTGIILFIIMLLAVAILSLYSVHLLLKTAKEGGSLIYEKLGEKAFGWPGKIGAFVSITMQNIGAMSSYLFIIKYELPEVIRAFMGLEENTG

SEQ ID NO: 64532 - protein, 219 aa, Homo sapiens
MDPMELRNVNIEPDDESSSGESAPDSYIGIGNSEKAAMSSQFANEDTESQKFLTNGFLGKKKLADYADEHHPGTTSFGMSSFNLSNAIMGSGILGLSYAMANTGIILFIIMLLAVAILSLYSVHLLLKTAKEGGSLIYEKLGEKAFGWPGKIGAFVSITMQNIGAMSSYLFIIKYELPEVIRAFMGLEENTGEWYLNGNYLIIFVSVGIILPLSLLKNL

SEQ ID NO: 64533 - protein, 472 aa, Homo sapiens
MELQDPKMNGALPSDAVGYRQEREGFLPSRGPAPGSKPVQFMDFEGKTSFGMSVFNLSNAIMGSGILGLAYAMAHTGVIFFLALLLCIALLSSYSIHLLLTCAGIAGIRAYEQLGQRAFGPAGKVVVATVICLHNVGAMSSYLFIIKSELPLVIGTFLYMDPEGDWFLKGNLLIIIVSVLIILPLALMKHLGYLGYTSGLSLTCMLFFLVSVIYKKFQLGCAIGHNETAMESEALVGLPSQGLNSSCEAQMFTVDSQMSYTVPIMAFAFVCHPEVLPIYTELCRPSKRRMQAVANVSIGAMFCMYGLTATFGYLTFYSSVKAEMLHMYSQKDPLILCVRLAVLLAVTLTVPVVLFPIRRALQQLLFPGKAFSWPRHVAIALILLVLVNVLVICVPTIRDIFGVIGSTSAPSLIFILPSIFYLRIVPSEVEPFLSWPKIQALCFGVLGVLFMAVSLGFMFANWATGQSRMSGH

SEQ ID NO: 64534 - protein, 421 aa, Homo sapiens
MSVFNLSNAIMGSGILGLAYAMAHTGVIFFLALLLCIALLSSYSIHLLLTCAGIAGIRAYEQLGQRAFGPAGKVVVATVICLHNVGAMSSYLFIIKSELPLVIGTFLYMDPEGDWFLKGNLLIIIVSVLIILPLALMKHLGYLGYTSGLSLTCMLFFLVSVIYKKFQLGCAIGHNETAMESEALVGLPSQGLNSSCEAQMFTVDSQMSYTVPIMAFAFVCHPEVLPIYTELCRPSKRRMQAVANVSIGAMFCMYGLTATFGYLTFYSSVKAEMLHMYSQKDPLILCVRLAVLLAVTLTVPVVLFPIRRALQQLLFPGKAFSWPRHVAIALILLVLVNVLVICVPTIRDIFGVIGSTSAPSLIFILPSIFYLRIVPSEVEPFLSWPKIQALCFGVLGVLFMAVSLGFMFANWATGQSRMSGH

SEQ ID NO: 64535 - protein, 472 aa, Homo sapiens; identical to SEQ ID NO: 64533

SEQ ID NO: 64536 - protein, 219 aa, Homo sapiens
MELQDPKMNGALPSDAVGYRQEREGFLPSRGPAPGSKPVQFMDFEGKTSFGMSVFNLSNAIMGSGILGLAYAMAHTGVIFFLALLLCIALLSSYSIHLLLTCAGIAGIRAYEQLGQRAFGPAGKVVVATVICLHNVGAMSSYLFIIKSELPLVIGTFLYMDPEGDWFLKGNLLIIIVSVLIILPLALMKHLGYLGYTSGLSLTCMLFFLVSVIYKKFQL

SEQ ID NO: 64537 - protein, 191 aa, Homo sapiens
MELQDPKMNGALPSDAVGYRQEREGFLPSRGPAPGSKPVQFMDFEGKTSFGMSVFNLSNAIMGSGILGLAYAMAHTGVIFFLALLLCIALLSSYSIHLLLTCAGIAGIRAYEQLGQRAFGPAGKVVVATVICLHNVGAMSSYLFIIKSELPLVIGTFLYMDPEGDWFLKGNLLIIIVSVLIILPLALMKHL

SEQ ID NO: 64538 - protein, 164 aa, Homo sapiens
MELQDPKMNGALPSDAVGYRQEREGFLPSRGPAPGSKPVQFMDFEGKTSFGMSVFNLSNAIMGSGILGLAYAMAHTGVIFFLALLLCIALLSSYSIHLLLTCAGIAGIRAYEQLGQRAFGPAGKVVVATVICLHNVGAMSSYLFIIKSELPLVIGTFLYMDPEG

SEQ ID NO: 64539 - protein, 279 aa, Homo sapiens
MELQDPKMNGALPSDAVGYRQEREGFLPSRGPAPGSKPVQFMDFEGKTSFGMSVFNLSNAIMGSGILGLAYAMAHTGVIFFLALLLCIALLSSYSIHLLLTCAGIAGIRAYEQLGQRAFGPAGKVVVATVICLHNVGAMSSYLFIIKSELPLVIGTFLYMDPEGDWFLKGNLLIIIVSVLIILPLALMKHLGYLGYTSGLSLTCMLFFLVSVIYKKFQLGCAIGHNETAMESEALVGLPSQGLNSSCEAQMFTVDSQMSYTVPIMAFAFVCHPEVLPIY

SEQ ID NO: 64540 - protein, 272 aa, Homo sapiens
MELQDPKMNGALPSDAVGYRQEREGFLPSRGPAPGSKPVQFMDFEGKTSFGMSVFNLSNAIMGSGILGLAYAMAHTGVIFFLALLLCIALLSSYSIHLLLTCAGIAGIRAYEQLGQRAFGPAGKVVVATVICLHNVGAMSSYLFIIKSELPLVIGTFLYMDPEGDWFLKGNLLIIIVSVLIILPLALMKHLGYLGYTSGLSLTCMLFFLVSVIYKKFQLGCAIGHNETAMESEALVGLPSQGLNSSCEAQMFTVDSQMSYTVPIMAFAFVCH

SEQ ID NO: 64541 - protein, 462 aa, Homo sapiens
MAQVSINNDYSEWDLSTDAGERARLLQSPCVDTAPKSEWEASPGGLDRGTTSTLGAIFIVVNACLGAGLLNFPAAFSTAGGVAAGIALQMGMLVFIISGLVILAYCSQASNERTYQEVVWAVCGKLTGVLCEVAIAVYTFGTCIAFLIIIGDQQDKIIAVMAKEPEGASGPWYTDRKFTISLTAFLFILPLSIPREIGFQKYASFLSVVGTWYVTAIVIIKYIWPDKEMTPGNILTRPASWMAVFNAMPTICFGFQCHVSSVPVFNSMQQPEVKTWGGVVTAAMVIALAVYMGTGICGFLTFGAAVDPDVLLSYPSEDMAVAVARAFIILSVLTSYPILHFCGRAVVEGLWLRYQGVPVEEDVGRERRRRVLQTLVWFLLTLLLALFIPDIGKVISVIGGLAACFIFVFPGLCLIQAKLSEMEEVKPASWWVLVSYGVLLVTLGAFIFGQTTANAIFVDLLA

SEQ ID NO: 64542 - protein, 324 aa, Homo sapiens
MGPWGEPELLVWRPEAVASEPPVPVGLEVKLGALVLLLVLTLLCSLVPICVLRRPGANHEGSASRQKALSLVSCFAGGVFLATCLLDLLPDYLAAIDEALAALHVTLQFPLQEFILAMGFFLVLVMEQITLAYKEQSGPSPLEETRALLGTVNGGPQHWHDGPGVPQASGAPATPSALRACVLVFSLALHSVFEGLAVGLQRDRARAMELCLALLLHKGILAVSLSLRLLQSHLRAQVVAGCGILFSCMTPLGIGLGAALAESAGPLHQLAQSVLEGMAAGTFLYITFLEILPQELASSEQRILKVILLLAGFALLTGLLFIQI

SEQ ID NO: 64543 - protein, 324 aa, Homo sapiens; identical to SEQ ID NO: 64542

SEQ ID NO: 64544 - protein, 324 aa, Homo sapiens; identical to SEQ ID NO: 64542

SEQ ID NO: 64545 - protein, 324 aa, Homo sapiens; identical to SEQ ID NO: 64542

SEQ ID NO: 64546 - protein, 240 aa, Homo sapiens
MGPWGEPELLVWRPEAVASEPPVPVGLEVKLGALVLLLVLTLLCSLVPICVLRRPGANHEGSASRQKALSLVSCFAGGVFLATCLLDLLPDYLAAIDEALAALHVTLQFPLQEFILAMGFFLVLVMEQITLAYKEQSGPSPLEETRALLGTVNGGPQHWHDGPGVPQASGAPATPSALRACVLVFSLALHSVFEGLAVGLQRDRARAMELCLALLLHKGILAVSLSLRLLQSHLRAQVVA

SEQ ID NO: 64547 - protein, 206 aa, Homo sapiens
MGPWGEPELLVWRPEAVASEPPVPVGLEVKLGALVLLLVLTLLCSLVPICVLRRPGANHEGSASRQKALSLVSCFAGGVFLATCLLDLLPDYLAAIDEALAALHVTLQFPLQEFILAMGFFLVLVMEQITLAYKEQSGPSPLEETRALLGTVNGGPQHWHDGPGVPQASGAPATPSALRACVLVFSLALHSVFEGLAVGLQRDRAR

SEQ ID NO: 64548 - protein, 321 aa, Homo sapiens
MGPWGEPELLVWRPEAVASEPPVPVGLEVKLGALVLLLVLTLLCSLVPICVLRRPGANHEGSASRQKALSLVSCFAGGVFLATCLLDLLPDYLAAIDEALAALHVTLQFPLQEFILAMGFFLVLVMEQITLAYKEQSGPSPLEETRALLGTVNGGPQHWHDGPGVPQASGAPATPSALRACVLVFSLALHSVFEGLAVGLQRDRARAMELCLALLLHKGILAVSLSLRLLQSHLRAQVVAGCGILFSCMTPLGIGLGAALAESAGPLHQLAQSVLEGMAAGTFLYITFLEILPQELASSEQRILKVILLLAGFALLTGLLF

SEQ ID NO: 64549 - protein, 222 aa, Homo sapiens
MKAQLQFPLQEFILAMGFFLVLVMEQITLAYKEQSGPSPLEETRALLGTVNGGPQHWHDGPGVPQASGAPATPSALRACVLVFSLALHSVFEGLAVGLQRDRARAMELCLALLLHKGILAVSLSLRLLQSHLRAQVVAGCGILFSCMTPLGIGLGAALAESAGPLHQLAQSVLEGMAAGTFLYITFLEILPQELASSEQRILKVILLLAGFALLTGLLFIQI

SEQ ID NO: 64550 - protein, 313 aa, Homo sapiens
MGPWGEPELLVWRPEAVASEPPVPVGLVLTLLCSLVPICVLRRPGANHEGSASRQKALSLVSCFAGGVFLATCLLDLLPDYLAAIDEALAALHVTLQFPLQEFILAMGFFLVLVMEQITLAYKEQSGPSPLEETRALLGTVNGGPQHWHDGPGVPQASGAPATPSALRACVLVFSLALHSVFEGLAVGLQRDRARAMELCLALLLHKGILAVSLSLRLLQSHLRAQVVAGCGILFSCMTPLGIGLGAALAESAGPLHQLAQSVLEGMAAGTFLYITFLEILPQELASSEQRILKVILLLAGFALLTGLLFIQI

SEQ ID NO: 64551 - protein, 364 aa, Homo sapiens
MPGCPCPGCGMAGPRLLFLTALALELLERAGGSQPALRSRGTATACRLDNKESESWGALLSGERLDTWICSLLGSLMVGLSGVFPLLVIPLEMGTMLRSEAGAWRLKQLLSFALGGLLGNVFLHLLPEAWAYTCSASPGGEGQSLQQQQQLGLWVIAGILTFLALEKMFLDSKEEGTSQAPNKDPTAAAAALNGGHCLAQPAAEPGLGAVVRSIKVSGYLNLLANTIDNFTHGLAVAASFLVSKKIGLLTTMAILLHEIPHEVGDFAILLRAGFDRWSAAKLQLSTALGGLLGAGFAICTQSPKGVEETAAWVLPFTSGGFLYIALVNVLPDLLEEEDPWRSLQQLLLLCAGIVVMVLFSLFVD

SEQ ID NO: 64552 - protein, 371 aa, Homo sapiens
MPGCPCPGCGMAGPRLLFLTALALELLERAGGSQPALRSRGTATACRLDNKESESWGALLSGERLDTWICSLLGSLMVGLSGVFPLLVIPLEMGTMLRSEAGAWRLKQLLSFALGGLLGNVFLHLLPEAWAYTCSASPGGEGQSLQQQQQLGLWVIAGILTFLALEKMFLDSKEEGTSQAPNKDPTAAAAALNGGHCLAQPAAEPGLGAVVRSIKVSGYLNLLANTIDNFTHGLAVAASFLVSKKIGLLTTMAILLHEIPHEVGDFAILLRAGFDRWSAAKLQLSTALGGLLGAGFAICTQSPKGVVGCSPAAEETAAWVLPFTSGGFLYIALVNVLPDLLEEEDPWRSLQQLLLLCAGIVVMVLFSLFVD

SEQ ID NO: 64553 - protein, 309 aa, Homo sapiens
MEQLLGIKLGCLFALLALTLGCGLTPICFKWFQIDAARGHHRLVLRLLGCISAGVFLGAGFMHMTAEALEEIESQIQKFMVQNRSASERNSSGDADSAHMEYPYGELIISLGFFFVFFLESLALQCCPGAAGGSTVQDEEWGGAHIFELHSHGHLPSPSKGPLRALVLLLSLSFHSVFEGLAVGLQPTVAATVQLCLAVLAHKGLVVFGVGMRLVHLGTSSRWAVFSILLLALMSPLGLAVGLAVTGGDSEGGRGLAQAVLEGVAAGTFLYVTFLEILPRELASPEAPLAKWSCVAAGFAFMAFIALWA

SEQ ID NO: 64554 - protein, 314 aa, Homo sapiens
MVKLLVAKILCMVGVFFFMLLGSLLPVKIIETDFEKAHRSKKILSLCNTFGGGVFLATCFNALLPAVREKLQKVLSLGHISTDYPLAETILLLGFFMTVFLEQLILTFRKEKPSFIDLETFNAGSDVGSDSEYESPFMGGARGHALYVEPHGHGPSLSVQGLSRASPVRLLSLAFALSAHSVFEGLALGLQEEGEKVVSLFVGVAVHETLVAVALGISMARSAMPLRDAAKLAVTVSAMIPLGIGLGLGIESAQGVPGSVASVLLQGLAGGTFLFITFLEILAKELEEKSDRLLKVLFLVLGYTVLAGMVFLKW

SEQ ID NO: 64555 - protein, 105 aa, Homo sapiens
MVKLLVAKILCMVGVFFFMLLGSLLPVKIIETDFEKAHRSKKILSLCNTFGGGVFLATCFNALLPAVREKVRAPWALAAALGTLWPRDSDAFSTLMPSSVKALML

SEQ ID NO: 64556 - protein, 323 aa, Homo sapiens
MVKLLVAKILCMVGVFFFMLLGSLLPVKIIETDFEKAHRSKKILSLCNTFGGGVFLATCFNALLPAVREKLQKVLSLGHISTDYPLAETILLLGFFMTVFLEQLILTFRKEKPSFIDLETFNAGSDVGSDSEYESPFMGGARGHALYVEPHGHGPSLSVQGLSRASPVRLLSLAFALSAHSVFEGLALGLQEEGEKVVSLFVGVAVHETLVAVALGISMARSAMPLRDAAKLAVTVSAMIPLGIGLGLGIESAQGVPGSVASVLLQGLAGGTFLFITFLEILAKELEEKSDRLLKVLFLVLGYTVLAGMVFLKWISPPEPRVS

SEQ ID NO: 64557 - protein, 622 aa, Homo sapiens
MVDVVGLERETGPRGSPWPGLPLPSLVGPAPLLTCLCPQCLSVEDALGLGEPEGSGLPPGPVLEARYVARLSAAAVLYLSNPEGTCEDARAGLWASHADHLLALLESPKALTPGLSWLLQRMQARAAGQTPKTACVDIPQLLEEAVGAGAPGSAGGVLAALLDHVRSGSCFHALPSPQYFVDFVFQQHSSEVPMTLAELSALMQRLGVGREAHSDHSHRHRGASSWDPVPLISSSNSSSVWDTVCLSARDVMAAYGLSEQAGVTPEAWAQLSPALLQQQLSGACTSQSRPPVQDQLSQSERYLYGSLATLLICLCAVFGLLLLTCTGCRGVTHYILQTFLSLAVGALTGDAVLHLTPKVLGLHTHSEEGLSPQPTWRLLAMLAGLYAFFLFENLFNLLLPRDPEDLEDGPCGHSSHSHGGHSHGVSLQLAPSELRQPKPPHEGSRADLVAEESPELLNPEPRRLSPELRLLPYMITLGDAVHNFADGLAVGAAFASSWKTGLATSLAVFCHELPHELGDFAALLHAGLSVRQALLLNLASALTAFAGLYVALAVGVSEESEAWILAVATGLFLYVALCDMLPAMLKVRDPRPWLLFLLHNVGLLGGWTVLLLLSLYEDDITF

SEQ ID NO: 64558 - protein, 647 aa, Homo sapiens
MASLVSLELGLLLAVLVVTATASPPAGLLSLLTSGQGALDQEALGGLLNTLADRVHCANGPCGKCLSVEDALGLGEPEGSGLPPGPVLEARYVARLSAAAVLYLSNPEGTCEDARAGLWASHADHLLALLESPKALTPGLSWLLQRMQARAAGQTPKTACVDIPQLLEEAVGAGAPGSAGGVLAALLDHVRSGSCFHALPSPQYFVDFVFQQHSSEVPMTLAELSALMQRLGVGREAHSDHSHRHRGASSWDPVPLISSSNSSSVWDTVCLSARDVMAAYGLSEQAGVTPEAWAQLSPALLQQQLSGACTSQSRPPVQDQLSQSERYLYGSLATLLICLCAVFGLLLLTCTGCRGVTHYILQTFLSLAVGALTGDAVLHLTPKVLGLHTHSEEGLSPQPTWRLLAMLAGLYAFFLFENLFNLLLPRDPEDLEDGPCGHSSHSHGGHSHGVSLQLAPSELRQPKPPHEGSRADLVAEESPELLNPEPRRLSPELRLLPYMITLGDAVHNFADGLAVGAAFASSWKTGLATSLAVFCHELPHELGDFAALLHAGLSVRQALLLNLASALTAFAGLYVALAVGVSEESEAWILAVATGLFLYVALCDMLPAMLKVRDPRPWLLFLLHNVGLLGGWTVLLLLSLYEDDITF

SEQ ID NO: 64559 - protein, 469 aa, Homo sapiens
MARGLGAPHWVAVGLLTWATLGLLVAGLGGHDDLHDDLQEDFHGHSHRHSHEDFHHGHSHAHGHGHTHESIWHGHTHDHDHGHSHEDLHHGHSHGYSHESLYHRGHGHDHEHSHGGYGESGAPGIKQDLDAVTLWAYALGATVLISAAPFFVLFLIPVESNSPRHRSLLQILLSFASGGLLGDAFLHLIPHALEPHSHHTLEQPGHGHSHSGQGPILSVGLWVLSGIVAFLVVEKFVRHVKGGHGHSHGHGHAHSHTRGSHGHGRQERSTKEKQSSEEEEKETRGVQKRRGGSTVPKDGPVRPQNAEEEKRGLDLRVSGYLNLAADLAHNFTDGLAIGASFRGGRGLGILTTMTVLLHEVPHEVGDFAILVQSGCSKKQAMRLQLLTAVGALAGTACALLTEGGAVGSEIAGGAGPGWVLPFTAGGFIYVATVSVLPELLREASPLQSLLEVLGLLGGVIMMVLIAHLE

SEQ ID NO: 64560 - protein, 469 aa, Homo sapiens; identical to SEQ ID NO: 64559

SEQ ID NO: 64561 - protein, 469 aa, Homo sapiens; identical to SEQ ID NO: 64559

SEQ ID NO: 64562 - protein, 469 aa, Homo sapiens; identical to SEQ ID NO: 64559

SEQ ID NO: 64563 - protein, 220 aa, Homo sapiens
MDSSLPECRHIGKGIRAKVERNFLFSRDLKAGLPRPSKPGKERIPEPALGATVLISAAPFFVLFLIPVESNSPRHRSLLQILLSFASGGLLGDAFLHLIPHALEPHSHHTLEQPGHGHSHSGQGPILSVGLWVLSGIVAFLVVEKFVRHVKGGHGHSHGHGHAHSHTRGSHGHGRQERSTKEKQSSEEEEKETRGVQKRRGGSTVPKDGPVRPQNAEEEK

SEQ ID NO: 64564 - protein, 220 aa, Homo sapiens; identical to SEQ ID NO: 64563

SEQ ID NO: 64565 - protein, 469 aa, Homo sapiens; identical to SEQ ID NO: 64559

SEQ ID NO: 64566 - protein, 469 aa, Homo sapiens; identical to SEQ ID NO: 64559

SEQ ID NO: 64567 - protein, 469 aa, Homo sapiens; identical to SEQ ID NO: 64559

SEQ ID NO: 64568 - protein, 220 aa, Homo sapiens; identical to SEQ ID NO: 64563

SEQ ID NO: 64569 - protein, 220 aa, Homo sapiens; identical to SEQ ID NO: 64563

SEQ ID NO: 64570 - protein, 469 aa, Homo sapiens; identical to SEQ ID NO: 64559

SEQ ID NO: 64571 - protein, 469 aa, Homo sapiens; identical to SEQ ID NO: 64559

SEQ ID NO: 64572 - protein, 469 aa, Homo sapiens; identical to SEQ ID NO: 64559

SEQ ID NO: 64573 - protein, 469 aa, Homo sapiens; identical to SEQ ID NO: 64559

SEQ ID NO: 64574 - protein, 220 aa, Homo sapiens; identical to SEQ ID NO: 64563

SEQ ID NO: 64575 - protein, 374 aa, Homo sapiens
MARGLGAPHWVAVGLLTWATLGLLVAGLGGHDDLHDDLQEDFHGHSHSADLSSSIFCPLPYPRGVELSPASLSTSDLAQFCFRWAPGRCFLHLIPHALEPHSHHTLEQPGHGHSHSGQGPILSVGLWVLSGIVAFLVVEKFVRHVKGGHGHSHGHGHAHSHTRGSHGHGRQERSTKEKQSSEEEEKETRGVQKRRGGSTVPKDGPVRPQNAEEEKRGLDLRVSGYLNLAADLAHNFTDGLAIGASFRGGRGLGILTTMTVLLHEVPHEVGDFAILVQSGCSKKQAMRLQLLTAVGALAGTACALLTEGGAVGSEIAGGAGPGWVLPFTAGGFIYVATVSVLPELLREASPLQSLLEVLGLLGGVIMMVLIAHLE

SEQ ID NO: 64576 - protein, 450 aa, Homo sapiens
MARGLGAPHWVAVGLLTWATLGLLVAGLGGHDDLHDDLQEDFHGHGHTHESIWHGHTHDHDHGHSHEDLHHGHSHGYSHESLYHRGHGHDHEHSHGGYGESGAPGIKQDLDAVTLWAYALGATVLISAAPFFVLFLIPVESNSPRHRSLLQILLSFASGGLLGDAFLHLIPHALEPHSHHTLEQPGHGHSHSGQGPILSVGLWVLSGIVAFLVVEKFVRHVKGGHGHSHGHGHAHSHTRGSHGHGRQERSTKEKQSSEEEEKETRGVQKRRGGSTVPKDGPVRPQNAEEEKRGLDLRVSGYLNLAADLAHNFTDGLAIGASFRGGRGLGILTTMTVLLHEVPHEVGDFAILVQSGCSKKQAMRLQLLTAVGALAGTACALLTEGGAVGSEIAGGAGPGWVLPFTAGGFIYVATVSVLPELLREASPLQSLLEVLGLLGGVIMMVLIAHLE

SEQ ID NO: 64577 - protein, 220 aa, Homo sapiens; identical to SEQ ID NO: 64563

SEQ ID NO: 64578 - protein, 469 aa, Homo sapiens; identical to SEQ ID NO: 64559

SEQ ID NO: 64579 - protein, 374 aa, Homo sapiens; identical to SEQ ID NO: 64575

SEQ ID NO: 64580 - protein, 450 aa, Homo sapiens; identical to SEQ ID NO: 64576

SEQ ID NO: 64581 - protein, 374 aa, Homo sapiens; identical to SEQ ID NO: 64575

SEQ ID NO: 64582 - protein, 374 aa, Homo sapiens; identical to SEQ ID NO: 64575

SEQ ID NO: 64583 - protein, 450 aa, Homo sapiens; identical to SEQ ID NO: 64576

SEQ ID NO: 64584 - protein, 450 aa, Homo sapiens; identical to SEQ ID NO: 64576

SEQ ID NO: 64585 - protein, 374 aa, Homo sapiens; identical to SEQ ID NO: 64575

SEQ ID NO: 64586 - protein, 450 aa, Homo sapiens; identical to SEQ ID NO: 64576

SEQ ID NO: 64587 - protein, 450 aa, Homo sapiens; identical to SEQ ID NO: 64576

SEQ ID NO: 64588 - protein, 374 aa, Homo sapiens; identical to SEQ ID NO: 64575

SEQ ID NO: 64589 - protein, 796 aa, Homo sapiens
MLAPLRNAPGREGATSPSPPTDATGSLGEWDVDRNVKTEGWVSKERISKLHRLRMADILSQSETLASQDLSGDFKKPALPVSPAARSKAPASSSSNPEEVQKEGPTALQDSNSGEPDIPPPQPDCGDFRSLQEEQSRPPTAVSSPGGPARAPPYQEPPWGGPATAPYSLETLKGGTILGTRSLKGTSYCLFGRLSGCDVCLEHPSVSRYHAVLQHRASGPDGECDSNGPGFYLYDLGSTHGTFLNKTRIPPRTYCRVHVGHVVRFGGSTRLFILQGPEEDREAESELTVTQLKELRKQQQILLEKKMLGEDSDEEEEMDTSERKINAGSQDDEMGCTWGMGEDAVEDDAEENPIVLEFQQEREAFYIKDPKKALQGFFDREGEELEYEFDEQGHSTWLCRVRLPVDDSTGKQLVAEAIHSGKKKEAMIQCSLEACRILDTLGLLRQEAVSRKRKAKNWEDEDFYDSDDDTFLDRTGLIEKKRLNRMKKAGKIDEKPETFESLVAKLNDAERELSEISERLKASSQVLSESPSQDSLDAFMSEMKSGSTLDGVSRKKLHLRTFELRKEQQRLKGLIKIVKPAEIPELKKTETQTTGAENKAKKLTLPLFGAMKGGSKFKLKTGTVGKLPPKRPELPPTLMRMKDEPEVEEEEEEEEEEEKEKEEHEKKKLEDGSLSRPQPEIEPEAAVQEMRPPTDLTHFKETQTHENMSQLSEEEQNKDYQDCSKTTSLCAGPSASKNEYEKSRGELKKKKTPGPGKLPPTLSSKYPEDDPDYCVWVPPEGQSGDGRTHLNDKYGY

SEQ ID NO: 64590 - protein, 1232 aa, Homo sapiens
MDFLLRPQPEPESLGPGTPGFPEQEEDELHRTLGVERFEEILQEAGSRGGEEPGRSYGEEDFEYHRQSSHHIHHPLSTHLPPDARRRKTPQGPGRKPRRRPGASPTGETPTIEEGEEDEDEASEAEGARALTQPSPVSTPSSVQFFLQEDDSADRKAERTSPSSPAPLPHQEATPRASKGAQAGTQVEEAEAEAVAVASGTAGGDDGGASGRPLPKAQPGHRSYNLQERRRIGSMTGAEQALLPRVPTDEIEAQTLATADLDLMKSHRFEDVPGVRRHLVRKNAKGSTQSGREGREPGPTPRARPRAPHKPHEVFVELNELLLDKNQEPQWRETARWIKFEEDVEEETERWGKPHVASLSFRSLLELRRTLAHGAVLLDLDQQTLPGVAHQVVEQMVISDQIKAEDRANVLRALLLKHSHPSDEKDFSFPRNISAGSLGSLLGHHHGQGAESDPHVTEPLMGGVPETRLEVERERELPPPAPPAGITRSKSKHELKLLEKIPENAEATVVLVGCVEFLSRPTMAFVRLREAVELDAVLEVPVPVRFLFLLLGPSSANMDYHEIGRSISTLMSDKQFHEAAYLADEREDLLTAINAFLDCSVVLPPSEVQGEELLRSVAHFQRQMLKKREEQGRLLPTGAGLEPKSAQDKALLQMVEAAGAAEDDPLRRTGRPFGGLIRDVRRRYPHYLSDFRDALDPQCLAAVIFIYFAALSPAITFGGLLGEKTQDLIGVSELIMSTALQGVVFCLLGAQPLLVIGFSGPLLVFEEAFFSFCSSNHLEYLVGRVWIGFWLVFLALLMVALEGSFLVRFVSRFTQEIFAFLISLIFIYETFYKLVKIFQEHPLHGCSASNSSEVDGGENMTWAGARPTLGPGNRSLAGQSGQGKPRGQPNTALLSLVLMAGTFFIAFFLRKFKNSRFFPGRIRRVIGDFGVPIAILIMVLVDYSIEDTYTQKLSVPSGFSVTAPEKRGWVINPLGEKSPFPVWMMVASLLPAILVFILIFMETQITTLIISKKERMLQKGSGFHLDLLLIVAMGGICALFGLPWLAAATVRSVTHANALTVMSKAVAPGDKPKIQEVKEQRVTGLLVALLVGLSIVIGDLLRQIPLAVLFGIFLYMGVTSLNGIQFYERLHLLLMPPKHHPDVTYVKKVRTLRMHLFTALQLLCLALLWAVMSTAASLAFPFILILTVPLRMVVLTRIFTDREMKCLDANEAEPVFDEREGVDEYNEMPMPV

SEQ ID NO: 64591 - protein, 1227 aa, Homo sapiens
MTQPEPESLGPGTPGFPEQEEDELHRTLGVERFEEILQEAGSRGGEEPGRSYGEEDFEYHRQSSHHIHHPLSTHLPPDARRRKTPQGPGRKPRRRPGASPTGETPTIEEGEEDEDEASEAEGARALTQPSPVSTPSSVQFFLQEDDSADRKAERTSPSSPAPLPHQEATPRASKGAQAGTQVEEAEAEAVAVASGTAGGDDGGASGRPLPKAQPGHRSYNLQERRRIGSMTGAEQALLPRVPTDEIEAQTLATADLDLMKSHRFEDVPGVRRHLVRKNAKGSTQSGREGREPGPTPRARPRAPHKPHEVFVELNELLLDKNQEPQWRETARWIKFEEDVEEETERWGKPHVASLSFRSLLELRRTLAHGAVLLDLDQQTLPGVAHQVVEQMVISDQIKAEDRANVLRALLLKHSHPSDEKDFSFPRNISAGSLGSLLGHHHGQGAESDPHVTEPLMGGVPETRLEVERERELPPPAPPAGITRSKSKHELKLLEKIPENAEATVVLVGCVEFLSRPTMAFVRLREAVELDAVLEVPVPVRFLFLLLGPSSANMDYHEIGRSISTLMSDKQFHEAAYLADEREDLLTAINAFLDCSVVLPPSEVQGEELLRSVAHFQRQMLKKREEQGRLLPTGAGLEPKSAQDKALLQMVEAAGAAEDDPLRRTGRPFGGLIRDVRRRYPHYLSDFRDALDPQCLAAVIFIYFAALSPAITFGGLLGEKTQDLIGVSELIMSTALQGVVFCLLGAQPLLVIGFSGPLLVFEEAFFSFCSSNHLEYLVGRVWIGFWLVFLALLMVALEGSFLVRFVSRFTQEIFAFLISLIFIYETFYKLVKIFQEHPLHGCSASNSSEVDGGENMTWAGARPTLGPGNRSLAGQSGQGKPRGQPNTALLSLVLMAGTFFIAFFLRKFKNSRFFPGRIRRVIGDFGVPIAILIMVLVDYSIEDTYTQKLSVPSGFSVTAPEKRGWVINPLGEKSPFPVWMMVASLLPAILVFILIFMETQITTLIISKKERMLQKGSGFHLDLLLIVAMGGICALFGLPWLAAATVRSVTHANALTVMSKAVAPGDKPKIQEVKEQRVTGLLVALLVGLSIVIGDLLRQIPLAVLFGIFLYMGVTSLNGIQFYERLHLLLMPPKHHPDVTYVKKVRTLRMHLFTALQLLCLALLWAVMSTAASLAFPFILILTVPLRMVVLTRIFTDREMKCLDANEAEPVFDEREGVDEYNEMPMPV

SEQ ID NO: 64592 - protein, 801 aa, Homo sapiens
VMEVVEAEKIVLLTSARFLFLLLGPAGKAPQYHEIGRSIATLMTDEIFHDVAYKAKDRNDLLSGIDEFLDQVTVLPPGEWDPSIRIEPPKSVPSQEKRKIPVFHNGSTPTLGETPKEAAHHAGPELQRTGRLFGGLILDIKRKAPFFLSDFKDALSLQCLASILFLYCACMSPVITFGGLLGEATEGRISAIESLFGASLTGIAYSLFAGQPLTILGSTGPVLVFEKILYKFCRDYQLSYLSLRTSIGLWTSFLCIVLVATDASSLVCYITRFTEEAFAALICIIFIYEALEKLFDLGETYAFNMHNNLDKLTSYSCVCTEPPNPSNETLAQWKKDNITAHNISWRNLTVSECKKLRGVFLGSACGHHGPYIPDVLFWCVILFFTTFFLSSFLKQFKTKRYFPTKVRSTISDFAVFLTIVIMVTIDYLVGVPSPKLHVPEKFEPTHPERGWIISPLGDNPWWTLLIAAIPALLCTILIFMDQQITAVIINRKEHKLKKGAGYHLDLLMVGVMLGVCSVMGLPWFVAATVLSISHVNSLKVESECSAPGEQPKFLGIREQRVTGLMIFILMGLSVFMTSVLKFIPMPVLYGVFLYMGVSSLKGIQLFDRIKLFGMPAKHQPDLIYLRYVPLWKVHIFTVIQLTCLVLLWVIKVSAAAVVFPMMVLALVFVRKLMDLCFTKRELSWLDDLMPESKKKKEDDKKKKEKEEAERMLQDDDDTVHLPFEGGSLLQIPVKALKYSVDPSIVNISDEMAKTAQWKALSMNTENAKVTRSNMSPDKPVSVKISFEDEPRKKYVDAETSL

SEQ ID NO: 64593 - protein, 747 aa, Homo sapiens
MPLGRQSHRHHRTHGQKHRRRGRGKGASQGEEGLEALAHDTPSQRVQFILGTEEDEEHVPHELFTELDEICMKEGEDAEWKETARWLKFEEDVEDGGERWSKPYVATLSLHSLFELRSCLINGTVLLDMHANSIEEISDLILDQQELSSDLNDSMRVKVREALLKKHHHQNEKKRNNLIPIVRSFAEVGKKQSDPHLMDKHGQTVSPQSVPTTNLEVKNGVNCEHSPVDLSKVDLHFMKKIPTGAEASNVLVGEVDILDRPIVAFVRLSPAVLLSGLTEVPIPTRFLFILLGPVGKGQQYHEIGRSMATIMTDEIFHDVAYKAKERDDLLAGIDEFLDQVTVLPPGEWDPSIRIEPPKNVPSQEKRKMPGVPNGNVCHIEQEPHGGHSGPELQRTGRLFGGLVLDIKRKAPWYWSDYRDALSLQCLASFLFLYCACMSPVITFGGLLGEATEGRISAIESLFGASMTGIAYSLFAGQALTILGSTGPVLVFEKILFKFCKDYALSYLSLRACIGLWTAFLCIVLVATDASSLVCYITRFTEEAFASLICIIFIYEAIEKLIHLAETYPIHMHSQLDHLSLYYCRCTLPENPNNHTLQYWKDHNIVTAEVHWANLTVSECQEMHGEFMGSACGHHGPYTPDVLFWSCILFFTTFILSSTLKTFKTSRYFPTRMESCSVAWLECGGVILAHCNLRLLPSSWDYRHAPPQPANFCIFSRDGVSPCWPGWSQSLDLVICLPRPPKMLGLQA

SEQ ID NO: 64594 - protein, 1044 aa, Homo sapiens
MPAAGSNEPDGVLSYQRPDEEAVVDQGGTSTILNIHYEKEELEGHRTLYVGVRMPLGRQSHRHHRTHGQKHRRRGRGKGASQGEEGLEALAHDTPSQRVQFILGTEEDEEHVPHELFTELDEICMKEGEDAEWKETARWLKFEEDVEDGGERWSKPYVATLSLHSLFELRSCLINGTVLLDMHANSIEEISDLILDQQELSSDLNDSMRVKVREALLKKHHHQNEKKRNNLIPIVRSFAEVGKKQSDPHLMDKHGQTVSPQSVPTTNLEVKNGVNCEHSPVDLSKVDLHFMKKIPTGAEASNVLVGEVDILDRPIVAFVRLSPAVLLSGLTEVPIPTRFLFILLGPVGKGQQYHEIGRSMATIMTDEIFHDVAYKAKERDDLLAGIDEFLDQVTVLPPGEWDPSIRIEPPKNVPSQEKRKMPGVPNGNVCHIEQEPHGGHSGPELQRTGRLFGGLVLDIKRKAPWYWSDYRDALSLQCLASFLFLYCACMSPVITFGGLLGEATEGRISAIESLFGASMTGIAYSLFAGQALTILGSTGPVLVFEKILFKFCKDYALSYLSLRACIGLWTAFLCIVLVATDASSLVCYITRFTEEAFASLICIIFIYEAIEKLIHLAETYPIHMHSQLDHLSLYYCRCTLPENPNNHTLQYWKDHNIVTAEVHWANLTVSECQEMHGEFMGSACGHHGPYTPDVLFWSCILFFTTFILSSTLKTFKTSRYFPTRVRSMVSDFAVFLTIFTMVIIDFLIGVPSPKLQVPSVFKPTRDDRGWIINPIGPNPWWTVIAAIIPALLCTILIFMDQQITAVIINRKEHKLKKGCGYHLDLLMVAIMLGVCSIMGLPWFVAATVLSITHVNSLKLESECSAPGEQPKFLGIREQRVTGLMIFVLMGCSVFMTAILKFIPMPVLYGVFLYMGVSSLQGIQFFDRLKLFGMPAKHQPDFIYLRHVPLRKVHLFTLIQLTCLVLLWVIKASPAAIVFPMMVLALVFVRKVMDLCFSKRELSWLDDLMPESKKKKLDDAKKKAKEEEVIVLAPTVYLGASNYRT

SEQ ID NO: 64595 - protein, 911 aa, Homo sapiens
MEELQDDYEDMMEENLEQEEYEDPDIPESQMEEPAAHDTEATATDYHTTSHPGTHKVYVELQELVMDEKNQELRWMEAARWVQLEENLGENGAWGRPHLSHLTFWSLLELRRVFTKGTVLLDLQETSLAGVANQLLDRFIFEDQIRPQDREELLRALLLKHSHAGELEALGGVKPAVLTRSGDPSQPLLPQHSSLETQLFCEQGDGGTEGHSPSGILEKIPPDSEATLVLVGRADFLEQPVLGFVRLQEAAELEAVELPVPIRFLFVLLGPEAPHIDYTQLGRAAATLMSERVFRIDAYMAQSRGELLHSLEGFLDCSLVLPPTDAPSEQALLSLVPVQRELLRRRYQSSPAKPDSSFYKGLDLNGGPDDPLQQTGQLFGGLVRDIRRRYPYYLSDITDAFSPQVLAAVIFIYFAALSPAITFGGLLGEKTRNQMGVSELLISTAVQGILFALLGAQPLLVVGFSGPLLVFEEAFFSFCETNGLEYIVGRVWIGFWLILLVVLVVAFEGSFLVRFISRYTQEIFSFLISLIFIYETFSKLIKIFQDHPLQKTYNYNVLMVPKPQGPLPNTALLSLVLMAGTFFFAMMLRKFKNSSYFPGKLRRVIGDFGVPISILIMVLVDFFIQDTYTQKLSVPDGFKVSNSSARGWVIHPLGLRSEFPIWMMFASALPALLVFILIFLESQITTLIVSKPERKMVKGSGFHLDLLLVVGMGGVAALFGMPWLSATTVRSVTHANALTVMGKASTPGAAAQIQEVKEQRISGLLVAVLVGLSILMEPILSRIPLAVLFGIFLYMGVTSLSGIQLFDRILLLFKPPKYHPDVPYVKRVKTWRMHLFTGIQIICLAVLWVVKSTPASLALPFVLILTVPLRRVLLPLIFRNVELQCLDADDAKATFDEEEGRDEYDEVAMPV

SEQ ID NO: 64596 - protein, 1159 aa, Homo sapiens
MSSAPRRPAKGADSFCTPGPGRKPRRRPGASPTGETPTIEEGEEDEDEASEAEGARALTQPSPVSTPSSVQFFLQEDDSADRKAERTSPSSPAPLPHQEATPRASKGAQAGTQVEEAEAEAVAVASGTAGGDDGGASGRPLPKAQPGHRSYNLQERRRIGSMTGAEQALLPRVPTDEIEAQTLATADLDLMKSHRFEDVPGVRRHLVRKNAKGSTQSGREGREPGPTPRARPRAPHKPHEVFVELNELLLDKNQEPQWRETARWIKFEEDVEEETERWGKPHVASLSFRSLLELRRTLAHGAVLLDLDQQTLPGVAHQVVEQMVISDQIKAEDRANVLRALLLKHSHPSDEKDFSFPRNISAGSLGSLLGHHHGQGAESDPHVTEPLMGGVPETRLEVERERELPPPAPPAGITRSKSKHELKLLEKIPENAEATVVLVGCVEFLSRPTMAFVRLREAVELDAVLEVPVPVRFLFLLLGPSSANMDYHEIGRSISTLMSDKQFHEAAYLADEREDLLTAINAFLDCSVVLPPSEVQGEELLRSVAHFQRQMLKKREEQGRLLPTGAGLEPKSAQDKALLQMVEAAGAAEDDPLRRTGRPFGGLIRDVRRRYPHYLSDFRDALDPQCLAAVIFIYFAALSPAITFGGLLGEKTQDLIGVSELIMSTALQGVVFCLLGAQPLLVIGFSGPLLVFEEAFFSFCSSNHLEYLVGRVWIGFWLVFLALLMVALEGSFLVRFVSRFTQEIFAFLISLIFIYETFYKLVKIFQEHPLHGCSASNSSEVDGGENMTWAGARPTLGPGNRSLAGQSGQGKPRGQPNTALLSLVLMAGTFFIAFFLRKFKNSRFFPGRIRRVIGDFGVPIAILIMVLVDYSIEDTYTQKLSVPSGFSVTAPEKRGWVINPLGEKSPFPVWMMVASLLPAILVFILIFMETQITTLIISKKERMLQKGSGFHLDLLLIVAMGGICALFGLPWLAAATVRSVTHANALTVMSKAVAPGDKPKIQEVKEQRVTGLLVALLVGLSIVIGDLLRQIPLAVLFGIFLYMGVTSLNGIQFYERLHLLLMPPKHHPDVTYVKKVRTLRMHLFTALQLLCLALLWAVMSTAASLAFPFILILTVPLRMVVLTRIFTDREMKCLDANEAEPVFDEREGVDEYNEMPMPV

SEQ ID NO: 64597 - protein, 1241 aa, Homo sapiens
MSSAPRRPAKGADSFCTPEPESLGPGTPGFPEQEEDELHRTLGVERFEEILQEAGSRGGEEPGRSYGEEDFEYHRQSSHHIHHPLSTHLPPDARRRKTPQGPGRKPRRRPGASPTGETPTIEEGEEDEDEASEAEGARALTQPSPVSTPSSVQFFLQEDDSADRKAERTSPSSPAPLPHQEATPRASKGAQAGTQVEEAEAEAVAVASGTAGGDDGGASGRPLPKAQPGHRSYNLQERRRIGSMTGAEQALLPRVPTDEIEAQTLATADLDLMKSHRFEDVPGVRRHLVRKNAKGSTQSGREGREPGPTPRARPRAPHKPHEVFVELNELLLDKNQEPQWRETARWIKFEEDVEEETERWGKPHVASLSFRSLLELRRTLAHGAVLLDLDQQTLPGVAHQVVEQMVISDQIKAEDRANVLRALLLKHSHPSDEKDFSFPRNISAGSLGSLLGHHHGQGAESDPHVTEPLMGGVPETRLEVERERELPPPAPPAGITRSKSKHELKLLEKIPENAEATVVLVGCVEFLSRPTMAFVRLREAVELDAVLEVPVPVRFLFLLLGPSSANMDYHEIGRSISTLMSDKQFHEAAYLADEREDLLTAINAFLDCSVVLPPSEVQGEELLRSVAHFQRQMLKKREEQGRLLPTGAGLEPKSAQDKALLQMVEAAGAAEDDPLRRTGRPFGGLIRDVRRRYPHYLSDFRDALDPQCLAAVIFIYFAALSPAITFGGLLGEKTQDLIGVSELIMSTALQGVVFCLLGAQPLLVIGFSGPLLVFEEAFFSFCSSNHLEYLVGRVWIGFWLVFLALLMVALEGSFLVRFVSRFTQEIFAFLISLIFIYETFYKLVKIFQEHPLHGCSASNSSEVDGGENMTWAGARPTLGPGNRSLAGQSGQGKPRGQPNTALLSLVLMAGTFFIAFFLRKFKNSRFFPGRIRRVIGDFGVPIAILIMVLVDYSIEDTYTQKLSVPSGFSVTAPEKRGWVINPLGEKSPFPVWMMVASLLPAILVFILIFMETQITTLIISKKERMLQKGSGFHLDLLLIVAMGGICALFGLPWLAAATVRSVTHANALTVMSKAVAPGDKPKIQEVKEQRVTGLLVALLVGLSIVIGDLLRQIPLAVLFGIFLYMGVTSLNGIQFYERLHLLLMPPKHHPDVTYVKKVRTLRMHLFTALQLLCLALLWAVMSTAASLAFPFILILTVPLRMVVLTRIFTDREMKCLDANEAEPVFDEREGVDEYNEMPMPV

SEQ ID NO: 64598 - protein, 151 aa, Homo sapiens [sequence omitted]

SEQ ID NO: 64599 - protein, 127 aa, Homo sapiens
MSSAPRRPAKGADSFCTPEPESLGPGTPGFPEQEEDELHRTLGVERFEEILQEAGSRGGEEPGRSYGEEDFEYHRQSSHHIHHPLSTHLPPDARRRKTPQGPGRKPRRRPGASPTGETPTIEEGEED

SEQ ID NO: 64600 - protein, 145 aa, Homo sapiens
MSSAPRRPAKGADSFCTPEPESLGPGTPGFPEQEEDELHRTLGVERFEEILQEAGSRGGEEPGRSYGEEDFEYHRQSSHHIHHPLSTHLPPDARRRKTPQGPGRKPRRRPGASPTGETPTIEEGEEDEDEASEAEGARALTQPSP

SEQ ID NO: 64601 - protein, 1241 aa, Homo sapiens; identical to SEQ ID NO: 64597

SEQ ID NO: 64602 - protein, 70 aa, Homo sapiens
MSSAPRRPAKGADSFCTPEPESLGPGTPGFPEQEEDELHRTLGVERFEEILQEAGSRGGEEPGRSYGEED

SEQ ID NO: 64603 - protein, 169 aa, Homo sapiens
MSSAPRRPAKGADSFCTPEPESLGPGTPGFPEQEEDELHRTLGVERFEEILQEAGSRGGEEPGRSYGEEDFEYHRQSSHHIHHPLSTHLPPDARRRKTPQGPGRKPRRRPGASPTGETPTIEEGEEDEDEASEAEGARALTQPSPVSTPSSVQFFLQEDDSADRKAERT

SEQ ID NO: 64604 - protein, 1079 aa, Homo sapiens
MEDEAVLDRGASFLKHVCDEEEVEGHHTIYIGVHVPKSYRRRRRHKRKTGHKEKKEKERISENYSDKSDIENADESSSSILKPLISPAAERIRFILGEEDDSPAPPQLFTELDELLAVDGQEMEWKETARWIKFEEKVEQGGERWSKPHVATLSLHSLFELRTCMEKGSIMLDREASSLPQLVEMIVDHQIETGLLKPELKDKVTYTLLRKHRHQTKKSNLRSLADIGKTVSSASRMFTNPDNGSPAMTHRNLTSSSLNDISDKPEKDQLKNKFMKKLPRDAEASNVLVGEVDFLDTPFIAFVRLQQAVMLGALTEVPVPTRFLFILLGPKGKAKSYHEIGRAIATLMSDEVFHDIAYKAKDRHDLIAGIDEFLDEVIVLPPGEWDPAIRIEPPKSLPSSDKRKNMYSGGENVQMNGDTPHDGGHGGGGHGDCEELQRTGRFCGGLIKDIKRKAPFFASDFYDALNIQALSAILFIYLATVTNAITFGGLLGDATDNMQGVLESFLGTAVSGAIFCLFAGQPLTILSSTGPVLVFERLLFNFSKDNNFDYLEFRLWIGLWSAFLCLILVATDASFLVQYFTRFTEEGFSSLISFIFIYDAFKKMIKLADYYPINSNFKVGYNTLFSCTCVPPDPANISISNDTTLAPEYLPTMSSTDMYHNTTFDWAFLSKKECSKYGGNLVGNNCNFVPDITLMSFILFLGTYTSSMALKKFKTSPYFPTTARKLISDFAIILSILIFCVIDALVGVDTPKLIVPSEFKPTSPNRGWFVPPFGENPWWVCLAAAIPALLVTILIFMDQQITAVIVNRKEHKLKKGAGYHLDLFWVAILMVICSLMALPWYVAATVISIAHIDSLKMETETSAPGEQPKFLGVREQRVTGTLVFILTGLSVFMAPILKFIPMPVLYGVFLYMGVASLNGVQFMDRLKLLLMPLKHQPDFIYLRHVPLRRVHLFTFLQVLCLALLWILKSTVAAIIFPVMILALVAVRKGMDYLFSQHDLSFLDDVIPEKDKKKKEDEKKKKKKKGSLDSDNDDSDCPYSEKVPSIKIPMDIMEQQPFLSDSKPSDRERSPTFLERHTSC

SEQ ID NO: 64605 - protein, 1035 aa, Homo sapiens
MSTENVEGKPSNLGERGRARSSTFLRVVQPMFNHSIFTSAVSPAAERIRFILGEEDDSPAPPQLFTELDELLAVDGQEMEWKETARWIKFEEKVEQGGERWSKPHVATLSLHSLFELRTCMEKGSIMLDREASSLPQLVEMIVDHQIETGLLKPELKDKVTYTLLRKHRHQTKKSNLRSLADIGKTVSSASRMFTNPDNGSPAMTHRNLTSSSLNDISDKPEKDQLKNKFMKKLPRDAEASNVLVGEVDFLDTPFIAFVRLQQAVMLGALTEVPVPTRFLFILLGPKGKAKSYHEIGRAIATLMSDEVFHDIAYKAKDRHDLIAGIDEFLDEVIVLPPGEWDPAIRIEPPKSLPSSDKRKNMYSGGENVQMNGDTPHDGGHGGGGHGDCEELQRTGRFCGGLIKDIKRKAPFFASDFYDALNIQALSAILFIYLATVTNAITFGGLLGDATDNMQGVLESFLGTAVSGAIFCLFAGQPLTILSSTGPVLVFERLLFNFSKDNNFDYLEFRLWIGLWSAFLCLILVATDASFLVQYFTRFTEEGFSSLISFIFIYDAFKKMIKLADYYPINSNFKVGYNTLFSCTCVPPDPANISISNDTTLAPEYLPTMSSTDMYHNTTFDWAFLSKKECSKYGGNLVGNNCNFVPDITLMSFILFLGTYTSSMALKKFKTSPYFPTTARKLISDFAIILSILIFCVIDALVGVDTPKLIVPSEFKPTSPNRGWFVPPFGENPWWVCLAAAIPALLVTILIFMDQQITAVIVNRKEHKLKKGAGYHLDLFWVAILMVICSLMALPWYVAATVISIAHIDSLKMETETSAPGEQPKFLGVREQRVTGTLVFILTGLSVFMAPILKFIPMPVLYGVFLYMGVASLNGVQFMDRLKLLLMPLKHQPDFIYLRHVPLRRVHLFTFLQVLCLALLWILKSTVAAIIFPVMILALVAVRKGMDYLFSQHDLSFLDDVIPEKDKKKKEDEKKKKKKKGSLDSDNDDSDCPYSEKVPSIKIPMDIMEQQPFLSDSKPSDRERSPTFLERHTSC

SEQ ID NO: 64606 - protein, 995 aa, Homo sapiens
MEDEAVLDRGASFLKHVCDEEEVEGHHTIYIGVHVPKSYRRRRRHKRKTGHKEKKEKERISENYSDKSDIENADESSSSILKPLISPAAERIRFILGEEDDSPAPPQLFTELDELLAVDGQEMEWKETARWIKFEEKVEQGGERWSKPHVATLSLHSLFELRTCMEKGSIMLDREASSLPQLVEMIVDHQIETGLLKPELKDKVTYTLLRKHRHQTKKSNLRSLADIGKTVSSASRMFTNPDNGSPAMTHRNLTSSSLNDISDKPEKDQLKNKFMKKLPRDAEASNVLVGEVDFLDTPFIAFVRLQQAVMLGALTEVPVPTRFLFILLGPKGKAKSYHEIGRAIATLMSDEVFHDIAYKAKDRHDLIAGIDEFLDEVIVLPPGEWDPAIRIEPPKSLPSSDKRKNMYSGGENVQMNGDTPHDGGHGGGGHGDCEELQRTGRFCGGLIKDIKRKAPFFASDFYDALNIQALSAILFIYLATVTNAITFGGLLGDATDNMQGVLESFLGTAVSGAIFCLFAGQPLTILSSTGPVLVFERLLFNFSKDNNFDYLEFRLWIGLWSAFLCLILVATDASFLVQYFTRFTEEGFSSLISFIFIYDAFKKMIKLADYYPINSNFKVGYNTLFSCTCVPPDPANISISNDTTLAPEYLPTMSSTDMYHNTTFDWAFLSKKECSKYGGNLVGNNCNFVPDITLMSFILFLGTYTSSMALKKFKTSPYFPTTARKLISDFAIILSILIFCVIDALVGVDTPKLIVPSEFKPTSPNRGWFVPPFGENPWWVCLAAAIPALLVTILIFMDQQITAVIVNRKEHKLKFIPMPVLYGVFLYMGVASLNGVQFMDRLKLLLMPLKHQPDFIYLRHVPLRRVHLFTFLQVLCLALLWILKSTVAAIIFPVMILALVAVRKGMDYLFSQHDLSFLDDVIPEKDKKKKEDEKKKKKKKGSLDSDNDDSDCPYSEKVPSIKIPMDIMEQQPFLSDSKPSDRERSPTFLERHTSC

SEQ ID NO: 64607 - protein, 1094 aa, Homo sapiens
MEDEAVLDRGASFLKHVCDEEEVEGHHTIYIGVHVPKSYRRRRRHKRKTGHKEKKEKERISENYSDKSDIENADESSSSILKPLISPAAERIRFILGEEDDSPAPPQLFTELDELLAVDGQEMEWKETARWIKFEEKVEQGGERWSKPHVATLSLHSLFELRTCMEKGSIMLDREASSLPQLVEMIVDHQIETGLLKPELKDKVTYTLLRKHRHQTKKSNLRSLADIGKTVSSASRMFTNPDNGSPAMTHRNLTSSSLNDISDKPEKDQLKNKFMKKLPRDAEASNVLVGEVDFLDTPFIAFVRLQQAVMLGALTEVPVPTRFLFILLGPKGKAKSYHEIGRAIATLMSDEVFHDIAYKAKDRHDLIAGIDEFLDEVIVLPPGEWDPAIRIEPPKSLPSSDKRKNMYSGGENVQMNGDTPHDGGHGGGGHGDCEELQRTGRFCGGLIKDIKRKAPFFASDFYDALNIQALSAILFIYLATVTNAITFGGLLGDATDNMQGVLESFLGTAVSGAIFCLFAGQPLTILSSTGPVLVFERLLFNFSKDNNFDYLEFRLWIGLWSAFLCLILVATDASFLVQYFTRFTEEGFSSLISFIFIYDAFKKMIKLADYYPINSNFKVGYNTLFSCTCVPPDPANISISNDTTLAPEYLPTMSSTDMYHNTTFDWAFLSKKECSKYGGNLVGNNCNFVPDITLMSFILFLGTYTSSMALKKFKTSPYFPTTARKLISDFAIILSILIFCVIDALVGVDTPKLIVPSEFKPTSPNRGWFVPPFGENPWWVCLAAAIPALLVTILIFMDQQITAVIVNRKEHKLKKGAGYHLDLFWVAILMVICSLMALPWYVAATVISIAHIDSLKMETETSAPGEQPKFLGVREQRVTGTLVFILTGLSVFMAPILKFIPMPVLYGVFLYMGVASLNGVQFMDRLKLLLMPLKHQPDFIYLRHVPLRRVHLFTFLQVLCLALLWILKSTVAAIIFPVMILALVAVRKGMDYLFSQHDLSFLDDVIPEKDKKKKEDEKKKKKKKGSLDSDNDDEKDHQHSLNATHHADKIPFLQSLGMPSPPRTPVKVVPQIRIELEPEDNDYFWRSKGTETTL

SEQ ID NO: 64608 - protein, 1040 aa, Homo sapiens
MKVKEEKAGVGKLDHTNHRRRFPDQKECPPIHIGLPVPTYPQRKTDQKGHLSGLQKVHWGLRPDQPQQELTGPGSGASSQDSSMDLISRTRSPAAEQLQDILGEEDEAPNPTLFTEMDTLQHDGDQMEWKESARWIKFEEKVEEGGERWSKPHVSTLSLHSLFELRTCLQTGTVLLDLDSGSLPQIIDDVIEKQIEDGLLRPELRERVSYVLLRRHRHQTKKPIHRSLADIGKSVSTTNRSPARSPGAGPSLHHSTEDLRMRQSANYGRLCHAQSRSMNDISLTPNTDQRKNKFMKKIPKDSEASNVLVGEVDFLDQPFIAFVRLIQSAMLGGVTEVPVPTRFLFILLGPSGRAKSYNEIGRAIATLMVDDLFSDVAYKARNREDLIAGIDEFLDEVIVLPPGEWDPNIRIEPPKKVPSADKRKSVFSLAELGQMNGSVGGGGGAPGGGNGGGGGGGSGGGAGSGGAGGTSSGDDGEMPAMHEIGEELIWTGRFFGGLCLDIKRKLPWFPSDFYDGFHIQSISAILFIYLGCITNAITFGGLLGDATDNYQGVMESFLGTAMAGSLFCLFSGQPLIILSSTGPILIFEKLLFDFSKGNGLDYMEFRLWIGLHSAVQCLILVATDASFIIKYITRFTEEGFSTLISFIFIYDAIKKMIGAFKYYPINMDFKPNFITTYKCECVAPDTVNTTVFNASAPLAPDTNASLYNLLNLTALDWSLLSKKECLSYGGRLLGNSCKFIPDLALMSFILFFGTYSMTLTLKKFKFSRYFPTKVRALVADFSIVFSILMFCGIDACFGLETPKLHVPSVIKPTRPDRGWFVAPFGKNPWWVYPASILPALLVTILIFMDQQITAVIVNRKENKLKKAAGYHLDLFWVGILMALCSFMGLPWYVAATVISIAHIDSLKMETETSAPGEQPQFLGVREQRVTGIIVFILTGISVFLAPILKILGLIIVRRLLDFIFSQHDLAWIDNILPEKEKKETDKKRKRKKGAHEDCDEEPQFPPPSVIKIPMESVQSDPQNGIHCIARKRSSSWSYSL

SEQ ID NO: 64609 - protein, 1137 aa, Homo sapiens
MKVKEEKAGVGKLDHTNHRRRFPDQKECPPIHIGLPVPTYPQRKTDQKGHLSGLQKVHWGLRPDQPQQELTGPGSGASSQDSSMDLISRTRSPAAEQLQDILGEEDEAPNPTLFTEMDTLQHDGDQMEWKESARWIKFEEKVEEGGERWSKPHVSTLSLHSLFELRTCLQTGTVLLDLDSGSLPQIIDDVIEKQIEDGLLRPELRERVSYVLLRRHRHQTKKPIHRSLADIGKSVSTTNRSPARSPGAGPSLHHSTEDLRMRQSANYGRLCHAQSRSMNDISLTPNTDQRKNKFMKKIPKDSEASNVLVGEVDFLDQPFIAFVRLIQSAMLGGVTEVPVPTRFLFILLGPSGRAKSYNEIGRAIATLMVDDLFSDVAYKARNREDLIAGIDEFLDEVIVLPPGEWDPNIRIEPPKKVPSADKRKSVFSLAELGQMNGSVGGGGGAPGGGNGGGGGGGSGGGAGSGGAGGTSSGDDGEMPAMHEIGEELIWTGRFFGGLCLDIKRKLPWFPSDFYDGFHIQSISAILFIYLGCITNAITFGGLLGDATDNYQGVMESFLGTAMAGSLFCLFSGQPLIILSSTGPILIFEKLLFDFSKGNGLDYMEFRLWIGLHSAVQCLILVATDASFIIKYITRFTEEGFSTLISFIFIYDAIKKMIGAFKYYPINMDFKPNFITTYKCECVAPDTVNTTVFNASAPLAPDTNASLYNLLNLTALDWSLLSKKECLSYGGRLLGNSCKFIPDLALMSFILFFGTYSMTLTLKKFKFSRYFPTKVRALVADFSIVFSILMFCGIDACFGLETPKLHVPSVIKPTRPDRGWFVAPFGKNPWWVYPASILPALLVTILIFMDQQITAVIVNRKENKLKKAAGYHLDLFWVGILMALCSFMGLPWYVAATVISIAHIDSLKMETETSAPGEQPQFLGVREQRVTGIIVFILTGISVFLAPILKCIPLPVLYGVFLYMGVASLNGIQMGTGGSEFKIQKKLTPFWERCKLFLMPAKHQPDHAFLRHVPLRRIHLFTLVQILCLAVLWILKSTVAAIIFPVMILGLIIVRRLLDFIFSQHDLAWIDNILPEKEKKETDKKRKRKKGAHEDCDEEPQFPPPSVIKIPMESVQSDPQNGIHCIARKRSSSWSYSL

SEQ ID NO: 64610 - protein, 1019 aa, Homo sapiens
MKVKEEKAGVGKLDHTNHRRRFPDQKGSPAAEQLQDILGEEDEAPNPTLFTEMDTLQHDGDQMEWKESARWIKFEEKVEEGGERWSKPHVSTLSLHSLFELRTCLQTGTVLLDLDSGSLPQIIDDVIEKQIEDGLLRPELRERVSYVLLRRHRHQTKKPIHRSLADIGKSVSTTNRSPARSPGAGPSLHHSTEDLRMRQSANYGRLCHAQSRSMNDISLTPNTDQRKNKFMKKIPKDSEASNVLVGEVDFLDQPFIAFVRLIQSAMLGGVTEVPVPTRFLFILLGPSGRAKSYNEIGRAIATLMVDDLFSDVAYKARNREDLIAGIDEFLDEVIVLPPGEWDPNIRIEPPKKVPSADKRKSVFSLAELGQMNGSVGGGGGAPGGGNGGGGGGGSGGGAGSGGAGGTSSGDDGEMPAMHEIGEELIWTGRFFGGLCLDIKRKLPWFPSDFYDGFHIQSISAILFIYLGCITNAITFGGLLGDATDNYQGVMESFLGTAMAGSLFCLFSGQPLIILSSTGPILIFEKLLFDFSKGNGLDYMEFRLWIGLHSAVQCLILVATDASFIIKYITRFTEEGFSTLISFIFIYDAIKKMIGAFKYYPINMDFKPNFITTYKCECVAPDTVNTTVFNASAPLAPDTNASLYNLLNLTALDWSLLSKKECLSYGGRLLGNSCKFIPDLALMSFILFFGTYSMTLTLKKFKFSRYFPTKPTRPDRGWFVAPFGKNPWWVYPASILPALLVTILIFMDQQITAVIVNRKENKLKKAAGYHLDLFWVGILMALCSFMGLPWYVAATVISIAHIDSLKMETETSAPGEQPQFLGVREQRVTGIIVFILTGISVFLAPILKCIPLPVLYGVFLYMGVASLNGIQFWERCKLFLMPAKHQPDHAFLRHVPLRRIHLFTLVQILCLAVLWILKSTVAAIIFPVMILGLIIVRRLLDFIFSQHDLAWIDNILPEKEKKETDKKRKRKKGAHEDCDEEPQFPPPSVIKIPMESVQSDPQNGIHCIARKRSSSWSYSL

SEQ ID NO: 64611 - protein, 1019 aa, Homo sapiens; identical to SEQ ID NO: 64610

SEQ ID NO: 64612 - protein, 1040 aa, Homo sapiens; identical to SEQ ID NO: 64608

SEQ ID NO: 64613 - protein, 1137 aa, Homo sapiens; identical to SEQ ID NO: 64609

SEQ ID NO: 64614 - protein, 1121 aa, Homo sapiens
MKVKEEKAGVGKLDHTNHRRRFPDQKECPPIHIGLPVPTYPQRKTDQKGHLSGLQKVHWGLRPDQPQQELTGPGSGASSQDSSMDLISRTRSPAAEQLQDILGEEDEAPNPTLFTEMDTLQHDGDQMEWKESARWIKFEEKVEEGGERWSKPHVSTLSLHSLFELRTCLQTGTVLLDLDSGSLPQIIDDVIEKQIEDGLLRPELRERVSYVLLRRHRHQTKKPIHRSLADIGKSVSTTNRSPARSPGAGPSLHHSTEDLRMRQSANYGRLCHAQSRSMNDISLTPNTDQRKNKFMKKIPKDSEASNVLVGEVDFLDQPFIAFVRLIQSAMLGGVTEVPVPTRFLFILLGPSGRAKSYNEIGRAIATLMVDDLFSDVAYKARNREDLIAGIDEFLDEVIVLPPGEWDPNIRIEPPKKVPSADKRKSVFSLAELGQMNGSVGGGGGAPGGGNGGGGGGGSGGGAGSGGAGGTSSGDDGEMPAMHEIGEELIWTGRFFGGLCLDIKRKLPWFPSDFYDGFHIQSISAILFIYLGCITNAITFGGLLGDATDNYQGVMESFLGTAMAGSLFCLFSGQPLIILSSTGPILIFEKLLFDFSKGNGLDYMEFRLWIGLHSAVQCLILVATDASFIIKYITRFTEEGFSTLISFIFIYDAIKKMIGAFKYYPINMDFKPNFITTYKCECVAPDTVNTTVFNASAPLAPDTNASLYNLLNLTALDWSLLSKKECLSYGGRLLGNSCKFIPDLALMSFILFFGTYSMTLTLKKFKFSRYFPTKVRALVADFSIVFSILMFCGIDACFGLETPKLHVPSVIKPTRPDRGWFVAPFGKNPWWVYPASILPALLVTILIFMDQQITAVIVNRKENKLKKAAGYHLDLFWVGILMALCSFMGLPWYVAATVISIAHIDSLKMETETSAPGEQPQFLGVREQRVTGIIVFILTGISVFLAPILKCIPLPVLYGVFLYMGVASLNGIQFWERCKLFLMPAKHQPDHAFLRHVPLRRIHLFTLVQILCLAVLWILKSTVAAIIFPVMILGLIIVRRLLDFIFSQHDLAWIDNILPEKEKKETDKKRKRKKGAHEDCDEEPQFPPPSVIKIPMESVQSDPQNGIHCIARKRSSSWSYSL

SEQ ID NO: 64615 - protein, 993 aa, Homo sapiens
MKVKEEKAGVGKLDHTNHRRRFPDQKECPPIHIGLPVPTYPQRKTDQKGHLSGLQKVHWGLRPDQPQQELTGPGSGASSQDSSMDLISRTRSPAAEQLQDILGEEDEAPNPTLFTEMDTLQHDGDQMEWKESARWIKFEEKVEEGGERWSKPHVSTLSLHSLFELRTCLQTGTVLLDLDSGSLPQIIDDVIEKQIEDGLLRPELRERVSYVLLRRHRHQTKKPIHRSLADIGKSVSTTNRSPARSPGAGPSLHHSTEDLRMRQSANYGRLCHAQSRSMNDISLTPNTDQRKNKFMKKIPKDSEASNVLVGEVDFLDQPFIAFVRLIQSAMLGGVTEVPVPTRFLFILLGPSGRAKSYNEIGRAIATLMVDDLFSDVAYKARNREDLIAGIDEFLDEVIVLPPGEWDPNIRIEPPKKVPSADKRKSVFSLAELGQMNGSVGGGGGAPGGGNGGGGGGGSGGGAGSGGAGGTSSGDDGEMPAMHEIGEELIWTGRFFGGLCLDIKRKLPWFPSDFYDGFHIQSISAILFIYLGCITNAITFGGLLGDATDNYQGVMESFLGTAMAGSLFCLFSGQPLIILSSTGPILIFEKLLFDFSKGNGLDYMEFRLWIGLHSAVQCLILVATDASFIIKYITRFTEEGFSTLISFIFIYDAIKKMIGAFKYYPINMDFKPNFITTYKCECVAPDTVNTTVFNASAPLAPDTNASLYNLLNLTALDWSLLSKKECLSYGGRLLGNSCKFIPDLALMSFILFFGTYSMTLTLKKFKFSRYFPTKVRALVADFSIVFSILMFCGIDACFGLETPKLHVPSVIKPTRPDRGWFVAPFGKNPWWVYPASILPALLVTILIFMDQQITAVIVNRKENKLKGTESNRHHRLHPDGNLCLPGSHPKVYPPAGAVRSLPLHGRGLPEWHPVLGTLQALPDASQAPAGPCLPAARAAAPDPPLHPGADPLPGGALDPQIHGGCHHLPGHDPGPHHRSKASGFHLFPARPGLD

SEQ ID NO: 64616 - protein, 964 aa, Homo sapiens
MKVKEEKAGVGKLDHTNHRRRFPDQKECPPIHIGLPVPTYPQRKTDQKGHLSGLQKVHWGLRPDQPQQELTGPGSGASSQDSSMDLISRTRSPAAEQLQDILGEEDEAPNPTLFTEMDTLQHDGDQMEWKESARWIKFEEKVEEGGERWSKPHVSTLSLHSLFELRTCLQTGTVLLDLDSGSLPQIIDDVIEKQIEDGLLRPELRERVSYVLLRRHRHQTKKPIHRSLADIGKSVSTTNRSPARSPGAGPSLHHSTEDLRMRQSANYGRLCHAQSRSMNDISLTPNTDQRKNKFMKKIPKDSEASNVLVGEVDFLDQPFIAFVRLIQSAMLGGVTEVPVPTRFLFILLGPSGRAKSYNEIGRAIATLMVDDLFSDVAYKARNREDLIAGIDEFLDEVIVLPPGEWDPNIRIEPPKKVPSADKRKSVFSLAELGQMNGSVGGGGGAPGGGNGGGGGGGSGGGAGSGGAGGTSSGDDGEMPAMHEIGEELIWTGRFFGGLCLDIKRKLPWFPSDFYDGFHIQSISAILFIYLGCITNAITFGGLLGDATDNYQGVMESFLGTAMAGSLFCLFSGQPLIILSSTGPILIFEKLLFDFSKGNGLDYMEFRLWIGLHSAVQCLILVATDASFIIKYITRFTEEGFSTLISFIFIYDAIKKMIGAFKYYPINMDFKPNFITTYKCECVAPDTVNTTVFNASAPLAPDTNASLYNLLNLTALDWSLLSKKECLSYGGRLLGNSCKFIPDLALMSFILFFGTYSMTLTLKKFKFSRYFPTKPTRPDRGWFVAPFGKNPWWVYPASILPALLVTILIFMDQQITAVIVNRKENKLKGTESNRHHRLHPDGNLCLPGSHPKVYPPAGAVRSLPLHGRGLPEWHPVLGTLQALPDASQAPAGPCLPAARAAAPDPPLHPGADPLPGGALDPQIHGGCHHLPGHVSLHHRSWASSSFEGFWISSFPSTTWPGLTTS

SEQ ID NO: 64617 - protein, 129 aa, Homo sapiens
MKVKEEKAGVGKLDHTNHRRRFPDQKECPPIHIGLPVPTYPQRKTDQKGHLSGLQKVHWGLRPDQPQQELTGPGSGASSQDSSMDLISRTRSPAAEQLQDILGEEDEAPNPTLFTEMDTLQHDGDQMEW

SEQ ID NO: 64618 - protein, 145 aa, Homo sapiens
MKVKEEKAGVGKLDHTNHRRRFPDQKECPPIHIGLPVPTYPQRKTDQKGHLSGLQKVHWGLRPDQPQQELTGPGSGASSQDSSMDLISRTRSPAAEQLQDILGEEDEAPNPTLFTEMDTLQHDGDQMEWKESARWIKFEEKVEEG

SEQ ID NO: 64619 - protein, 1142 aa, Homo sapiens
MKVKEEKAGVGKLDHTNHRRRFPDQKECPPIHIGLPVPTYPQRKTDQKGHLSGLQKVHWGLRPDQPQQELTGPGSGASSQDSSMDLISRTRSPAAEQLQDILGEEDEAPNPTLFTEMDTLQHDGDQMEWKESARWIKFEEKVEEGGERWSKPHVSTLSLHSLFELRTCLQTGTVLLDLDSGSLPQIIDDVIEKQIEDGLLRPELRERVSYVLLRRHRHQTKKPIHRSLADIGKSVSTTNRSPARSPGAGPSLHHSTEDLRMRQSANYGRLCHAQSRSMNDISLTPNTDQRKNKFMKKIPKDSEASNVLVGEVDFLDQPFIAFVRLIQSAMLGGVTEVPVPTRFLFILLGPSGRAKSYNEIGRAIATLMVDDLFSDVAYKARNREDLIAGIDEFLDEVIVLPPGEWDPNIRIEPPKKVPSADKRKSVFSLAELGQMNGSVGGGGGAPGGGNGGGGGGGSGGGAGSGGAGGTSSGDDGEMPAMHEIGEELIWTGRFFGGLCLDIKRKLPWFPSDFYDGFHIQSISAILFIYLGCITNAITFGGLLGDATDNYQGVMESFLGTAMAGSLFCLFSGQPLIILSSTGPILIFEKLLFDFSKGNGLDYMEFRLWIGLHSAVQCLILVATDASFIIKYITRFTEEGFSTLISFIFIYDAIKKMIGAFKYYPINMDFKPNFITTYKCECVAPDTVNTTVFNASAPLAPDTNASLYNLLNLTALDWSLLSKKECLSYGGRLLGNSCKFIPDLALMSFILFFGTYSMTLTLKKFKFSRYFPTKVRALVADFSIVFSILMFCGIDACFGLETPKLHVPSVIKPTRPDRGWFVAPFGKNPWWVYPASILPALLVTILIFMDQQITAVIVNRKENKLKKAAGYHLDLFWVGILMALCSFMGLPWYVAATVISIAHIDSLKMETETSAPGEQPQFLGVREQRVTGIIVFILTGISVFLAPILKCIPLPVLYGVFLYMGVASLNGIQMGTGGSEFKIQKKLTPFWERCKLFLMPAKHQPDHAFLRHVPLRRIHLFTLVQILCLAVLWILKSTVAAIIFPVMSLSTTDLGLIIVRRLLDFIFSQHDLAWIDNILPEKEKKETDKKRKRKKGAHEDCDEEPQFPPPSVIKIPMESVQSDPQNGIHCIARKRSSSWSYSL

SEQ ID NO: 64620 - protein, 1214 aa, Homo sapiens
MERFRLEKKLPGPDEEAVVDLGKTSSTVNTKFEKEELESHRAVYIGVHVPFSKESRRRHRHRGHKHHHRRRKDKESDKEDGRESPSYDTPSQRVQFILGTEDDDEEHIPHDLFTEMDELCYRDGEEYEWKETARWLKFEEDVEDGGDRWSKPYVATLSLHSLFELRSCILNGTVMLDMRASTLDEIADMVLDNMIASGQLDESIRENVREALLKRHHHQNEKRFTSRIPLVRSFADIGKKHSDPHLLERNGEGLSASRHSLRTGLSASNLSLRGESPLSLLLGHLLPSSRAGTPAGSRCTTPVPTPQNSPPSSPSISRLTSRSSQESQRQAPELLVSPASDDIPTVVIHPPEEDLEAALKGEEQKNEENVDLTPGILASPQSAPGNLDNSKSGEIKGNGSGGSRENSTVDFSKVDMNFMRKIPTGAEASNVLVGEVDFLERPIIAFVRLAPAVLLTGLTEVPVPTRFLFLLLGPAGKAPQYHEIGRSIATLMTDEIFHDVAYKAKDRNDLLSGIDEFLDQVTVLPPGEWDPSIRIEPPKSVPSQEKRKIPVFHNGSTPTLGETPKEAAHHAGPELQRTGRLFGGLILDIKRKAPFFLSDFKDALSLQCLASILFLYCACMSPVITFGGLLGEATEGRISAIESLFGASLTGIAYSLFAGQPLTILGSTGPVLVFEKILYKFCRDYQLSYLSLRTSIGLWTSFLCIVLVATDASSLVCYITRFTEEAFAALICIIFIYEALEKLFDLGETYAFNMHNNLDKLTSYSCVCTEPPNPSNETLAQWKKDNITAHNISWRNLTVSECKKLRGVFLGSACGHHGPYIPDVLFWCVILFFTTFFLSSFLKQFKTKRYFPTKVRSTISDFAVFLTIVIMVTIDYLVGVPSPKLHVPEKFEPTHPERGWIISPLGDNPWWTLLIAAIPALLCTILIFMDQQITAVIINRKEHKLKKGAGYHLDLLMVGVMLGVCSVMGLPWFVAATVLSISHVNSLKVESECSAPGEQPKFLGIREQRVTGLMIFILMGLSVFMTSVLKFIPMPVLYGVFLYMGVSSLKGIQLFDRIKLFGMPAKHQPDLIYLRYVPLWKVHIFTVIQLTCLVLLWVIKVSAAAVVFPMMVLALVFVRKLMDLCFTKRELSWLDDLMPESKKKKEDDKKKKEKEEAERMLQDDDDTVHLPFEGGSLLQIPVKALKYSPDKPVSVKISFEDEPRKKYVDAETSL

SEQ ID NO: 64621 - protein, 800 aa, Homo sapiens
MEVVEAEKIVLLTSARFLFLLLGPAGKAPQYHEIGRSIATLMTDEIFHDVAYKAKDRNDLLSGIDEFLDQVTVLPPGEWDPSIRIEPPKSVPSQEKRKIPVFHNGSTPTLGETPKEAAHHAGPELQRTGRLFGGLILDIKRKAPFFLSDFKDALSLQCLASILFLYCACMSPVITFGGLLGEATEGRISAIESLFGASLTGIAYSLFAGQPLTILGSTGPVLVFEKILYKFCRDYQLSYLSLRTSIGLWTSFLCIVLVATDASSLVCYITRFTEEAFAALICIIFIYEALEKLFDLGETYAFNMHNNLDKLTSYSCVCTEPPNPSNETLAQWKKDNITAHNISWRNLTVSECKKLRGVFLGSACGHHGPYIPDVLFWCVILFFTTFFLSSFLKQFKTKRYFPTKVRSTISDFAVFLTIVIMVTIDYLVGVPSPKLHVPEKFEPTHPERGWIISPLGDNPWWTLLIAAIPALLCTILIFMDQQITAVIINRKEHKLKKGAGYHLDLLMVGVMLGVCSVMGLPWFVAATVLSISHVNSLKVESECSAPGEQPKFLGIREQRVTGLMIFILMGLSVFMTSVLKFIPMPVLYGVFLYMGVSSLKGIQLFDRIKLFGMPAKHQPDLIYLRYVPLWKVHIFTVIQLTCLVLLWVIKVSAAAVVFPMMVLALVFVRKLMDLCFTKRELSWLDDLMPESKKKKEDDKKKKEKEEAERMLQDDDDTVHLPFEGGSLLQIPVKALKYSVDPSIVNISDEMAKTAQWKALSMNTENAKVTRSNMSPDKPVSVKISFEDEPRKKYVDAETSL

SEQ ID NO: 64622 - protein, 574 aa, Homo sapiens
MEADGAGEQMRPLLTRGPDEEAVVDLGKTSSTVNTKFEKEELESHRAVYIGVHVPFSKESRRRHRHRGHKHHHRRRKDKESDKEDGRESPSYDTPSQRVQFILGTEDDDEEHIPHDLFTEMDELCYRDGEEYEWKETARWLKFEEDVEDGGDRWSKPYVATLSLHSLFELRSCILNGTVMLDMRASTLDEIADMVLDNMIASGQLDESIRENVREALLKRHHHQNEKRFTSRIPLVRSFADIGEGLSASRHSLRTGLSASNLSLRGESPLSLLLGHLLPSSRAGTPAGSRCTTPVPTPQNSPPSSPSISRLTSRSSQESQRQAPELLVSPASDDIPTVVIHPPEEDLEAALKGEEQKNEENVDLTPGILASPQSAPGNLDNSKSGEIKGNGSGGSRENSTVDFSKVDMNFMRKIPTGAEASNVLVGEVDFLERPIIAFVRLAPAVLLTGLTEVPVPTRFLFLLLGPAGKAPQYHEIGRSIATLMTDEIFHDVAYKAKDRNDLLSGIDEFLDQVTVLPPGEWDPSIRIEPPKSVPSQEKRKIPVFHNGSTPTLGETPKEAAHHAGPELQRTGRVQ

SEQ ID NO: 64623 - protein, 1090 aa, Homo sapiens
MERFRLEKKLPGPDEEAVVDLGKTSSTVNTKFEKEELESHRAVYIGVHVPFSKESRRRHRHRGHKHHHRRRKDKESDKEDGRESPSYDTPSQRVQFILGTEDDDEEHIPHDLFTEMDELCYRDGEEYEWKETARWLKFEEDVEDGGDRWSKPYVATLSLHSLFELRSCILNGTVMLDMRASTLDEIADMVLDNMIASGQLDESIRENVREALLKRHHHQNEKRFTSRIPLVRSFADIGKKHSDPHLLERNGILASPQSAPGNLDNSKSGEIKGNGSGGSRENSTVDFSKVDMNFMRKIPTGAEASNVLVGEVDFLERPIIAFVRLAPAVLLTGLTEVPVPTRFLFLLLGPAGKAPQYHEIGRSIATLMTDEIFHDVAYKAKDRNDLLSGIDEFLDQVTVLPPGEWDPSIRIEPPKSVPSQEKRKIPVFHNGSTPTLGETPKEAAHHAGPELQRTGRLFGGLILDIKRKAPFFLSDFKDALSLQCLASILFLYCACMSPVITFGGLLGEATEGRISAIESLFGASLTGIAYSLFAGQPLTILGSTGPVLVFEKILYKFCRDYQLSYLSLRTSIGLWTSFLCIVLVATDASSLVCYITRFTEEAFAALICIIFIYEALEKLFDLGETYAFNMHNNLDKLTSYSCVCTEPPNPSNETLAQWKKDNITAHNISWRNLTVSECKKLRGVFLGSACGHHGPYIPDVLFWCVILFFTTFFLSSFLKQFKTKRYFPTKVRSTISDFAVFLTIVIMVTIDYLVGVPSPKLHVPEKFEPTHPERGWIISPLGDNPWWTLLIAAIPALLCTILIFMDQQITAVIINRKEHKLKKGAGYHLDLLMVGVMLGVCSVMGLPWFVAATVLSISHVNSLKVESECSAPGEQPKFLGIREQRVTGLMIFILMGLSVFMTSVLKFIPMPVLYGVFLYMGVSSLKGIQLFDRIKLFGMPAKHQPDLIYLRYVPLWKVHIFTVIQLTCLVLLWVIKVSAAAVVFPMMVLALVFVRKLMDLCFTKRELSWLDDLMPESKKKKEDDKKKKEKEEAERMLQDDDDTVHLPFEGGSLLQIPVKALKYSPDKPVSVKISFEDEPRKKYVDAETSL

SEQ ID NO: 64624 - protein, 1135 aa, Homo sapiens
MEADGAGEQMRPLLTRVTSRGPDEEAVVDLGKTSSTVNTKFEKEELESHRAVYIGVHVPFSKESRRRHRHRGHKHHHRRRKDKESDKEDGRESPSYDTPSQRVQFILGTEDDDEEHIPHDLFTEMDELCYRDGEEYEWKETARWLKFEEDVEDGGDRWSKPYVATLSLHSLFELRSCILNGTVMLDMRASTLDEIADMVLDNMIASGQLDESIRENVREALLKRHHHQNEKRFTSRIPLVRSFADIGKKHSDPHLLERNGILASPQSAPGNLDNSKSGEIKGNGSGGSRENSTVDFSKVDMNFMRKIPTGAEASNVLVGEVDFLERPIIAFVRLAPAVLLTGLTEVPVPTRFLFLLLGPAGKAPQYHEIGRSIATLMTDEIFHDVAYKAKDRNDLLSGIDEFLDQVTVLPPGEWDPSIRIEPPKSVPSQEKRKIPVFHNGSTPTLGETPKEAAHHAGPELQRTGRLFGGLILDIKRKAPFFLSDFKDALSLQCLASILFLYCACMSPVITFGGLLGEATEGRISAIESLFGASLTGIAYSLFAGQPLTILGSTGPVLVFEKILYKFCRDYQLSYLSLRTSIGLWTSFLCIVLVATDASSLVCYITRFTEEAFAALICIIFIYEALEKLFDLGETYAFNMHNNLDKLTSYSCVCTEPPNPSNETLAQWKKDNITAHNISWRNLTVSECKKLRGVFLGSACGHHGPYIPDVLFWCVILFFTTFFLSSFLKQFKTKRYFPTKVRSTISDFAVFLTIVIMVTIDYLVGVPSPKLHVPEKFEPTHPERGWIISPLGDNPWWTLLIAAIPALLCTILIFMDQQITAVIINRKEHKLKKGAGYHLDLLMVGVMLGVCSVMGLPWFVAATVLSISHVNSLKVESECSAPGEQPKFLGIREQRVTGLMIFILMGLSVFMTSVLKFIPMPVLYGVFLYMGVSSLKGIQLFDRIKLFGMPAKHQPDLIYLRYVPLWKVHIFTVIQLTCLVLLWVIKVSAAAVVFPMMVLALVFVRKLMDLCFTKRELSWLDDLMPESKKKKEDDKKKKEKEEAERMLQDDDDTVHLPFEGGSLLQIPVKALKYSVDPSIVNISDEMAKTAQWKALSMNTENAKVTRSNMSPDKPVSVKISFEDEPRKKYVDAETSL

SEQ ID NO: 64625 - protein, 1095 aa, Homo sapiens
MEADGAGEQMRPLLTRGPDEEAVVDLGKTSSTVNTKFEKEELESHRAVYIGVHVPFSKESRRRHRHRGHKHHHRRRKDKESDKEDGRESPSYDTPSQRVQFILGTEDDDEEHIPHDLFTEMDELCYRDGEEYEWKETARWLKFEEDVEDGGDRWSKPYVATLSLHSLFELRSCILNGTVMLDMRASTLDEIADMVLDNMIASGQLDESIRENVREALLKRHHHQNEKRFTSRIPLVRSFADIGKKHSDPHLLERNGILASPQSAPGNLDNSKSGEIKGNGSGGSRENSTVDFSKVDMNFMRKIPTGAEASNVLVGEVDFLERPIIAFVRLAPAVLLTGLTEVPVPTRFLFLLLGPAGKAPQYHEIGRSIATLMTDEIFHDVAYKAKDRNDLLSGIDEFLDQVTVLPPGEWDPSIRIEPPKSVPSQEKRKIPVFHNGSTPTLGETPKEAAHHAGPELQRTGRLFGGLILDIKRKAPFFLSDFKDALSLQCLASILFLYCACMSPVITFGGLLGEATEGRISAIESLFGASLTGIAYSLFAGQPLTILGSTGPVLVFEKILYKFCRDYQLSYLSLRTSIGLWTSFLCIVLVATDASSLVCYITRFTEEAFAALICIIFIYEALEKLFDLGETYAFNMHNNLDKLTSYSCVCTEPPNPSNETLAQWKKDNITAHNISWRNLTVSECKKLRGVFLGSACGHHGPYIPDVLFWCVILFFTTFFLSSFLKQFKTKRYFPTKVRSTISDFAVFLTIVIMVTIDYLVGVPSPKLHVPEKFEPTHPERGWIISPLGDNPWWTLLIAAIPALLCTILIFMDQQITAVIINRKEHKLKKGAGYHLDLLMVGVMLGVCSVMGLPWFVAATVLSISHVNSLKVESECSAPGEQPKFLGIREQRVTGLMIFILMGLSVFMTSVLKFIPMPVLYGVFLYMGVSSLKGIQLFDRIKLFGMPAKHQPDLIYLRYVPLWKVHIFTVIQLTCLVLLWVIKVSAAAVVFPMMVLALVFVRKLMDLCFTKRELSWLDDLMPESKKKKEDDKKKKEKEEAERMLQDDDDTVHLPFEGGSLLQIPVKALKYSPDKPVSVKISFEDEPRKKYVDAETSL

SEQ ID NO: 64626 - protein, 463 aa, Homo sapiens
MEADGAGEQMRPLLTRGPDEEAVVDLGKTSSTVNTKFEKEELESHRAVYIGVHVPFSKESRRRHRHRGHKHHHRRRKDKESDKEDGRESPSYDTPSQRVQFILGTEDDDEEHIPHDLFTEMDELCYRDGEEYEWKETARWLKFEEDVEDGGDRWSKPYVATLSLHSLFELRSCILNGTVMLDMRASTLDEIADMVLDNMIASGQLDESIRENVREALLKRHHHQNEKRFTSRIPLVRSFADIGKKHSDPHLLERNGILASPQSAPGNLDNSKSGEIKGNGSGGSRENSTVDFSKVDMNFMRKIPTGAEASNVLVGEVDFLERPIIAFVRLAPAVLLTGLTEVPVPTRFLFLLLGPAGKAPQYHEIGRSIATLMTDEIFHDVAYKAKDRNDLLSGIDEFLDQVTVLPPGEWDPSIRIEPPKSVPSQEKRKIPVFHNGSTPTLGETPKEAAHHAGPELQRTGRVQ

SEQ ID NO: 64627 - protein, 574 aa, Homo sapiens; identical to SEQ ID NO: 64622

SEQ ID NO: 64628 - protein, 1246 aa, Homo sapiens
MEADGAGEQMRPLLTRVTSRGPDEEAVVDLGKTSSTVNTKFEKEELESHRAVYIGVHVPFSKESRRRHRHRGHKHHHRRRKDKESDKEDGRESPSYDTPSQRVQFILGTEDDDEEHIPHDLFTEMDELCYRDGEEYEWKETARWLKFEEDVEDGGDRWSKPYVATLSLHSLFELRSCILNGTVMLDMRASTLDEIADMVLDNMIASGQLDESIRENVREALLKRHHHQNEKRFTSRIPLVRSFADIGEGLSASRHSLRTGLSASNLSLRGESPLSLLLGHLLPSSRAGTPAGSRCTTPVPTPQNSPPSSPSISRLTSRSSQESQRQAPELLVSPASDDIPTVVIHPPEEDLEAALKGEEQKNEENVDLTPGILASPQSAPGNLDNSKSGEIKGNGSGGSRENSTVDFSKVDMNFMRKIPTGAEASNVLVGEVDFLERPIIAFVRLAPAVLLTGLTEVPVPTRFLFLLLGPAGKAPQYHEIGRSIATLMTDEIFHDVAYKAKDRNDLLSGIDEFLDQVTVLPPGEWDPSIRIEPPKSVPSQEKRKIPVFHNGSTPTLGETPKEAAHHAGPELQRTGRLFGGLILDIKRKAPFFLSDFKDALSLQCLASILFLYCACMSPVITFGGLLGEATEGRISAIESLFGASLTGIAYSLFAGQPLTILGSTGPVLVFEKILYKFCRDYQLSYLSLRTSIGLWTSFLCIVLVATDASSLVCYITRFTEEAFAALICIIFIYEALEKLFDLGETYAFNMHNNLDKLTSYSCVCTEPPNPSNETLAQWKKDNITAHNISWRNLTVSECKKLRGVFLGSACGHHGPYIPDVLFWCVILFFTTFFLSSFLKQFKTKRYFPTKVRSTISDFAVFLTIVIMVTIDYLVGVPSPKLHVPEKFEPTHPERGWIISPLGDNPWWTLLIAAIPALLCTILIFMDQQITAVIINRKEHKLKKGAGYHLDLLMVGVMLGVCSVMGLPWFVAATVLSISHVNSLKVESECSAPGEQPKFLGIREQRVTGLMIFILMGLSVFMTSVLKFIPMPVLYGVFLYMGVSSLKGIQLFDRIKLFGMPAKHQPDLIYLRYVPLWKVHIFTVIQLTCLVLLWVIKVSAAAVVFPMMVLALVFVRKLMDLCFTKRELSWLDDLMPESKKKKEDDKKKKEKEEAERMLQDDDDTVHLPFEGGSLLQIPVKALKYSVDPSIVNISDEMAKTAQWKALSMNTENAKVTRSNMSPDKPVSVKISFEDEPRKKYVDAETSL

SEQ ID NO: 64629 - protein, 1259 aa, Homo sapiens
MEADGAGEQMRPLLTRVTSRGPDEEAVVDLGKTSSTVNTKFEKEELESHRAVYIGVHVPFSKESRRRHRHRGHKHHHRRRKDKESDKEDGRESPSYDTPSQRVQFILGTEDDDEEHIPHDLFTEMDELCYRDGEEYEWKETARWLKFEEDVEDGGDRWSKPYVATLSLHSLFELRSCILNGTVMLDMRASTLDEIADMVLDNMIASGQLDESIRENVREALLKRHHHQNEKRFTSRIPLVRSFADIGKKHSDPHLLERNGEGLSASRHSLRTGLSASNLSLRGESPLSLLLGHLLPSSRAGTPAGSRCTTPVPTPQNSPPSSPSISRLTSRSSQESQRQAPELLVSPASDDIPTVVIHPPEEDLEAALKGEEQKNEENVDLTPGILASPQSAPGNLDNSKSGEIKGNGSGGSRENSTVDFSKVDMNFMRKIPTGAEASNVLVGEVDFLERPIIAFVRLAPAVLLTGLTEVPVPTRFLFLLLGPAGKAPQYHEIGRSIATLMTDEIFHDVAYKAKDRNDLLSGIDEFLDQVTVLPPGEWDPSIRIEPPKSVPSQEKRKIPVFHNGSTPTLGETPKEAAHHAGPELQRTGRLFGGLILDIKRKAPFFLSDFKDALSLQCLASILFLYCACMSPVITFGGLLGEATEGRISAIESLFGASLTGIAYSLFAGQPLTILGSTGPVLVFEKILYKFCRDYQLSYLSLRTSIGLWTSFLCIVLVATDASSLVCYITRFTEEAFAALICIIFIYEALEKLFDLGETYAFNMHNNLDKLTSYSCVCTEPPNPSNETLAQWKKDNITAHNISWRNLTVSECKKLRGVFLGSACGHHGPYIPDVLFWCVILFFTTFFLSSFLKQFKTKRYFPTKVRSTISDFAVFLTIVIMVTIDYLVGVPSPKLHVPEKFEPTHPERGWIISPLGDNPWWTLLIAAIPALLCTILIFMDQQITAVIINRKEHKLKKGAGYHLDLLMVGVMLGVCSVMGLPWFVAATVLSISHVNSLKVESECSAPGEQPKFLGIREQRVTGLMIFILMGLSVFMTSVLKFIPMPVLYGVFLYMGVSSLKGIQLFDRIKLFGMPAKHQPDLIYLRYVPLWKVHIFTVIQLTCLVLLWVIKVSAAAVVFPMMVLALVFVRKLMDLCFTKRELSWLDDLMPESKKKKEDDKKKKEKEEAERMLQDDDDTVHLPFEGGSLLQIPVKALKYSVDPSIVNISDEMAKTAQWKALSMNTENAKVTRSNMSPDKPVSVKISFEDEPRKKYVDAETSL

SEQ ID NO: 64630 - protein, 1131 aa, Homo sapiens
MEADGAGEQMRPLLTRGPDEEAVVDLGKTSSTVNTKFEKEELESHRAVYIGVHVPFSKESRRRHRHRGHKHHHRRRKDKESDKEDGRESPSYDTPSQRVQFILGTEDDDEEHIPHDLFTEMDELCYRDGEEYEWKETARWLKFEEDVEDGGDRWSKPYVATLSLHSLFELRSCILNGTVMLDMRASTLDEIADMVLDNMIASGQLDESIRENVREALLKRHHHQNEKRFTSRIPLVRSFADIGKKHSDPHLLERNGILASPQSAPGNLDNSKSGEIKGNGSGGSRENSTVDFSKVDMNFMRKIPTGAEASNVLVGEVDFLERPIIAFVRLAPAVLLTGLTEVPVPTRFLFLLLGPAGKAPQYHEIGRSIATLMTDEIFHDVAYKAKDRNDLLSGIDEFLDQVTVLPPGEWDPSIRIEPPKSVPSQEKRKIPVFHNGSTPTLGETPKEAAHHAGPELQRTGRLFGGLILDIKRKAPFFLSDFKDALSLQCLASILFLYCACMSPVITFGGLLGEATEGRISAIESLFGASLTGIAYSLFAGQPLTILGSTGPVLVFEKILYKFCRDYQLSYLSLRTSIGLWTSFLCIVLVATDASSLVCYITRFTEEAFAALICIIFIYEALEKLFDLGETYAFNMHNNLDKLTSYSCVCTEPPNPSNETLAQWKKDNITAHNISWRNLTVSECKKLRGVFLGSACGHHGPYIPDVLFWCVILFFTTFFLSSFLKQFKTKRYFPTKVRSTISDFAVFLTIVIMVTIDYLVGVPSPKLHVPEKFEPTHPERGWIISPLGDNPWWTLLIAAIPALLCTILIFMDQQITAVIINRKEHKLKKGAGYHLDLLMVGVMLGVCSVMGLPWFVAATVLSISHVNSLKVESECSAPGEQPKFLGIREQRVTGLMIFILMGLSVFMTSVLKFIPMPVLYGVFLYMGVSSLKGIQLFDRIKLFGMPAKHQPDLIYLRYVPLWKVHIFTVIQLTCLVLLWVIKVSAAAVVFPMMVLALVFVRKLMDLCFTKRELSWLDDLMPESKKKKEDDKKKKEKEEAERMLQDDDDTVHLPFEGGSLLQIPVKALKYSVDPSIVNISDEMAKTAQWKALSMNTENAKVTRSNMSPDKPVSVKISFEDEPRKKYVDAETSL

SEQ ID NO: 64631 - protein, 463 aa, Homo sapiens; identical to SEQ ID NO: 64626

SEQ ID NO: 64632 - protein, 1044 aa, Homo sapiens; identical to SEQ ID NO: 64594

SEQ ID NO: 64633 - protein, 1071 aa, Homo sapiens
MFNKNNSNKLRSTPRYRRGDPGYLNFTELGPLKPEQKDQWSQHRPDEEAVVDQGGTSTILNIHYEKEELEGHRTLYVGVRMPLGRQSHRHHRTHGQKHRRRGRGKGASQGEEGLEALAHDTPSQRVQFILGTEEDEEHVPHELFTELDEICMKEGEDAEWKETARWLKFEEDVEDGGERWSKPYVATLSLHSLFELRSCLINGTVLLDMHANSIEEISDLILDQQELSSDLNDSMRVKVREALLKKHHHQNEKKRNNLIPIVRSFAEVGKKQSDPHLMDKHGQTVSPQSVPTTNLEVKNGVNCEHSPVDLSKVDLHFMKKIPTGAEASNVLVGEVDILDRPIVAFVRLSPAVLLSGLTEVPIPTRFLFILLGPVGKGQQYHEIGRSMATIMTDEIFHDVAYKAKERDDLLAGIDEFLDQVTVLPPGEWDPSIRIEPPKNVPSQEKRKMPGVPNGNVCHIEQEPHGGHSGPELQRTGRLFGGLVLDIKRKAPWYWSDYRDALSLQCLASFLFLYCACMSPVITFGGLLGEATEGRISAIESLFGASMTGIAYSLFAGQALTILGSTGPVLVFEKILFKFCKDYALSYLSLRACIGLWTAFLCIVLVATDASSLVCYITRFTEEAFASLICIIFIYEAIEKLIHLAETYPIHMHSQLDHLSLYYCRCTLPENPNNHTLQYWKDHNIVTAEVHWANLTVSECQEMHGEFMGSACGHHGPYTPDVLFWSCILFFTTFILSSTLKTFKTSRYFPTRVRSMVSDFAVFLTIFTMVIIDFLIGVPSPKLQVPSVFKPTRDDRGWIINPIGPNPWWTVIAAIIPALLCTILIFMDQQITAVIINRKEHKLKKGCGYHLDLLMVAIMLGVCSIMGLPWFVAATVLSITHVNSLKLESECSAPGEQPKFLGIREQRVTGLMIFVLMGCSVFMTAILKFIPMPVLYGVFLYMGVSSLQGIQFFDRLKLFGMPAKHQPDFIYLRHVPLRKVHLFTLIQLTCLVLLWVIKASPAAIVFPMMVLALVFVRKVMDLCFSKRELSWLDDLMPESKKKKLDDAKKKAKEEEVIVLAPTVYLGASNYRT

SEQ ID NO: 64634 - protein, 747 aa, Homo sapiens; identical to SEQ ID NO: 64593

SEQ ID NO: 64635 - protein, 1093 aa, Homo sapiens
MPAAGSNEPDGVLSYQRPDEEAVVDQGGTSTILNIHYEKEELEGHRTLYVGVRMPLGRQSHRHHRTHGQKHRRRGRGKGASQGEEGLEALAHDTPSQRVQFILGTEEDEEHVPHELFTELDEICMKEGEDAEWKETARWLKFEEDVEDGGERWSKPYVATLSLHSLFELRSCLINGTVLLDMHANSIEEISDLILDQQELSSDLNDSMRVKVREALLKKHHHQNEKKRNNLIPIVRSFAEVGKKQSDPHLMDKHGQTVSPQSVPTTNLEVKNGVNCEHSPVDLSKVDLHFMKKIPTGAEASNVLVGEVDILDRPIVAFVRLSPAVLLSGLTEVPIPTRFLFILLGPVGKGQQYHEIGRSMATIMTDEIFHDVAYKAKERDDLLAGIDEFLDQVTVLPPGEWDPSIRIEPPKNVPSQEKRKMPGVPNGNVCHIEQEPHGGHSGPELQRTGRLFGGLVLDIKRKAPWYWSDYRDALSLQCLASFLFLYCACMSPVITFGGLLGEATEGRISAIESLFGASMTGIAYSLFAGQALTILGSTGPVLVFEKILFKFCKDYALSYLSLRACIGLWTAFLCIVLVATDASSLVCYITRFTEEAFASLICIIFIYEAIEKLIHLAETYPIHMHSQLDHLSLYYCRCTLPENPNNHTLQYWKDHNIVTAEVHWANLTVSECQEMHGEFMGSACGHHGPYTPDVLFWSCILFFTTFILSSTLKTFKTSRYFPTRVRSMVSDFAVFLTIFTMVIIDFLIGVPSPKLQVPSVFKPTRDDRGWIINPIGPNPWWTVIAAIIPALLCTILIFMDQQITAVIINRKEHKLKKGCGYHLDLLMVAIMLGVCSIMGLPWFVAATVLSITHVNSLKLESECSAPGEQPKFLGIREQRVTGLMIFVLMGCSVFMTAILKFIPMPVLYGVFLYMGVSSLQGIQFFDRLKLFGMPAKHQPDFIYLRHVPLRKVHLFTLIQLTCLVLLWVIKASPAAIVFPMMVLALVFVRKVMDLCFSKRELSWLDDLMPESKKKKLDDAKKKAKEEEEAEKMLEIGGDKFPLESRKLLSSPGKNISCRCDPSEINISDEMPKTTVWKALSMNSGNAKEKSLFN

SEQ ID NO: 64636 - protein, 638 aa, Homo sapiens
MPLGRQSHRHHRTHGQKHRRRGRGKGASQGEEGLEALAHDTPSQRVQFILGTEEDEEHVPHELFTELDEICMKEGEDAEWKETARWLKFEEDVEDGGERWSKPYVATLSLHSLFELRSCLINGTVLLDMHANSIEEISDLILDQQELSSDLNDSMRVKVREALLKKHHHQNEKKRNNLIPIVRSFAEVGKKQSDPHLMDKHGQTVSPQSVPTTNLEVKNGVNCEHSPVDLSKVDLHFMKKIPTGAEASNVLVGEVDILDRPIVAFVRLSPAVLLSGLTEVPIPTRFLFILLGPVGKGQQYHEIGRSMATIMTDEIFHDVAYKAKERDDLLAGIDEFLDQVTVLPPGEWDPSIRIEPPKNVPSQEKRKMPGVPNGNVCHIEQEPHGGHSGPELQRTGRLFGGLVLDIKRKAPWYWSDYRDALSLQCLASFLFLYCACMSPVITFGGLLGEATEGRISAIESLFGASMTGIAYSLFAGQALTILGSTGPVLVFEKILFKFCKDYALSYLSLRACIGLWTAFLCIVLVATDASSLVCYITRFTEEAFASLICIIFIYEAIEKLIHLAETYPIHMHSQLDHLSLYYCRCTLPENPNNHTLQYWKDHNIVTAEVHWANLTVSVSLGAARCPSIVTTGLGGTSK

SEQ ID NO: 64637 - protein, 991 aa, Homo sapiens
MPLGRQSHRHHRTHGQKHRRRGRGKGASQGEEGLEALAHDTPSQRVQFILGTEEDEEHVPHELFTELDEICMKEGEDAEWKETARWLKFEEDVEDGGERWSKPYVATLSLHSLFELRSCLINGTVLLDMHANSIEEISDLILDQQELSSDLNDSMRVKVREALLKKHHHQNEKKRNNLIPIVRSFAEVGKKQSDPHLMDKHGQTVSPQSVPTTNLEVKNGVNCEHSPVDLSKVDLHFMKKIPTGAEASNVLVGEVDILDRPIVAFVRLSPAVLLSGLTEVPIPTRFLFILLGPVGKGQQYHEIGRSMATIMTDEIFHDVAYKAKERDDLLAGIDEFLDQVTVLPPGEWDPSIRIEPPKNVPSQEKRKMPGVPNGNVCHIEQEPHGGHSGPELQRTGRLFGGLVLDIKRKAPWYWSDYRDALSLQCLASFLFLYCACMSPVITFGGLLGEATEGRISAIESLFGASMTGIAYSLFAGQALTILGSTGPVLVFEKILFKFCKDYALSYLSLRACIGLWTAFLCIVLVATDASSLVCYITRFTEEAFASLICIIFIYEAIEKLIHLAETYPIHMHSQLDHLSLYYCRCTLPENPNNHTLQYWKDHNIVTAEVHWANLTVSECQEMHGEFMGSACGHHGPYTPDVLFWSCILFFTTFILSSTLKTFKTSRYFPTRVRSMVSDFAVFLTIFTMVIIDFLIGVPSPKLQVPSVFKPTRDDRGWIINPIGPNPWWTVIAAIIPALLCTILIFMDQQITAVIINRKEHKLKKGCGYHLDLLMVAIMLGVCSIMGLPWFVAATVLSITHVNSLKLESECSAPGEQPKFLGIREQRVTGLMIFVLMGCSVFMTAILKFIPMPVLYGVFLYMGVSSLQGIQFFDRLKLFGMPAKHQPDFIYLRHVPLRKVHLFTLIQLTCLVLLWVIKASPAAIVFPMMVLALVFVRKVMDLCFSKRELSWLDDLMPESKKKKLDDAKKKAKEEEVIVLAPTVYLGASNYRT

SEQ ID NO: 64638 - protein, 1106 aa, Homo sapiens
MEIKDQGAQMEPLLPTRNDEEAVVDRGGTRSILKTHFEKEDLEGHRTLFIGVHVPLGGRKSHRRHRHRGHKHRKRDRERDSGLEDGRESPSFDTPSQRVQFILGTEDDDEEHIPHDLFTELDEICWREGEDAEWRETARWLKFEEDVEDGGERWSKPYVATLSLHSLFELRSCILNGTVLLDMHANTLEEIADMVLDQQVSSGQLNEDVRHRVHEALMKQHHHQNQKKLTNRIPIVRSFADIGKKQSEPNSMDKNAGQVVSPQSAPACVENKNDVSRENSTVDFSKVDLHFMKKIPPGAEASNILVGELEFLDRTVVAFVRLSPAVLLQGLAEVPIPTRFLFILLGPLGKGQQYHEIGRSIATLMTDEVFHDVAYKAKDRNDLVSGIDEFLDQVTVLPPGEWDPSIRIEPPKNVPSQEKRKIPAVPNGTAAHGEAEPHGGHSGPELQRTGRIFGGLILDIKRKAPYFWSDFRDAFSLQCLASFLFLYCACMSPVITFGGLLGEATEGRISAIESLFGASMTGIAYSLFGGQPLTILGSTGPVLVFEKILFKFCKEYGLSYLSLRASIGLWTATLCIILVATDASSLVCYITRFTEEAFASLICIIFIYEALEKLFELSEAYPINMHNDLELLTQYSCNCVEPHNPSNGTLKEWRESNISASDIIWENLTVSECKSLHGEYVGRACGHDHPYVPDVLFWSVILFFSTVTLSATLKQFKTSRYFPTKVRSIVSDFAVFLTILCMVLIDYAIGIPSPKLQVPSVFKPTRDDRGWFVTPLGPNPWWTVIAAIIPALLCTILIFMDQQITAVIINRKEHKLKKGCGYHLDLLMVAVMLGVCSIMGLPWFVAATVLSITHVNSLKLESECSAPGEQPKFLGIREQRVTGLMIFILMGSSVFMTSILKFIPMPVLYGVFLYMGASSLKGIQFFDRIKLFWMPAKHQPDFIYLRHVPLRKVHLFTIIQMSCLGLLWIIKVSRAAIVFPMMVLALVFVRKLMDLLFTKRELSWLDDLMPESKKKKLEDAEKEEEQSMLAMEDEGTVQLPLEGHYRDDPSVINISDEMSKTALWRNLLITADNSKDKESSFPSKSIESRKEKKADSGKGVDRETCL

SEQ ID NO: 64639 - protein, 1099 aa, Homo sapiens
MQSLGVSGNRKVMQSGTCEPFQSLSHQRNDEEAVVDRGGTRSILKTHFEKEDLEGHRTLFIGVHVPLGGRKSHRRHRHRGHKHRKRDRERDSGLEDGRESPSFDTPSQRVQFILGTEDDDEEHIPHDLFTELDEICWREGEDAEWRETARWLKFEEDVEDGGERWSKPYVATLSLHSLFELRSCILNGTVLLDMHANTLEEIADMVLDQQVSSGQLNEDVRHRVHEALMKQHHHQNQKKLTNRIPIVRSFADIGKKQSEPNSMDKNAGQVVSPQSAPACVENKNDVSRENSTVDFSKVDLHFMKKIPPGAEASNILVGELEFLDRTVVAFVRLSPAVLLQGLAEVPIPTRFLFILLGPLGKGQQYHEIGRSIATLMTDEVFHDVAYKAKDRNDLVSGIDEFLDQVTVLPPGEWDPSIRIEPPKNVPSQEKRKIPAVPNGTAAHGEAEPHGGHSGPELQRTGRIFGGLILDIKRKAPYFWSDFRDAFSLQCLASFLFLYCACMSPVITFGGLLGEATEGRISAIESLFGASMTGIAYSLFGGQPLTILGSTGPVLVFEKILFKFCKEYGLSYLSLRASIGLWTATLCIILVATDASSLVCYITRFTEEAFASLICIIFIYEALEKLFELSEAYPINMHNDLELLTQYSCNCVEPHNPSNGTLKEWRESNISASDIIWENLTVSECKSLHGEYVGRACGHDHPYVPDVLFWSVILFFSTVTLSATLKQFKTSRYFPTKVRSIVSDFAVFLTILCMVLIDYAIGIPSPKLQVPSVFKPTRDDRGWFVTPLGPNPWWTVIAAIIPALLCTILIFMDQQITAVIINRKEHKLKKGCGYHLDLLMVAVMLGVCSIMGLPWFVAATVLSITHVNSLKLESECSAPGEQPKFLGIREQRVTGLMIFILMGSSVFMTSILKFIPMPVLYGVFLYMGASSLKGIQFFDRIKLFWMPAKHQPDFIYLRHVPLRKVHLFTIIQMSCLGLLWIIKVSRAAIVFPMMVLALVFVRKLMDLLFTKRELSWLDDLMPESKKKKLEDAEKEEEQSMLAMEDEGTVQLPLEGHYRDDPSVINISDEMSKTALWRNLLITADNSKDKESSFPSKSSPS

SEQ ID NO: 64640 - protein, 1117 aa, Homo sapiens
MEIKDQGAQMEPLLPTRNDEEAVVDRGGTRSILKTHFEKEDLEGHRTLFIGVHVPLGGRKSHRRHRHRGHKHRKRDRERDSGLEDGRESPSFDTPSQRVQFILGTEDDDEEHIPHDLFTELDEICWREGEDAEWRETARWLKFEEDVEDGGERWSKPYVATLSLHSLFELRSCILNGTVLLDMHANTLEEIADMVLDQQVSSGQLNEDVRHRVHEALMKQHHHQNQKKLTNRIPIVRSFADIGKKQSEPNSMDKNGQVVSPQSAPACVENKNDVSRENSTVDFSKGLGGQQKGHTSPCGMKQRHEKGPPHQQEREVDLHFMKKIPPGAEASNILVGELEFLDRTVVAFVRLSPAVLLQGLAEVPIPTRFLFILLGPLGKGQQYHEIGRSIATLMTDEVFHDVAYKAKDRNDLVSGIDEFLDQVTVLPPGEWDPSIRIEPPKNVPSQEKRKIPAVPNGTAAHGEAEPHGGHSGPELQRTGRIFGGLILDIKRKAPYFWSDFRDAFSLQCLASFLFLYCACMSPVITFGGLLGEATEGRISAIESLFGASMTGIAYSLFGGQPLTILGSTGPVLVFEKILFKFCKEYGLSYLSLRASIGLWTATLCIILVATDASSLVCYITRFTEEAFASLICIIFIYEALEKLFELSEAYPINMHNDLELLTQYSCNCVEPHNPSNGTLKEWRESNISASDIIWENLTVSECKSLHGEYVGRACGHDHPYVPDVLFWSVILFFSTVTLSATLKQFKTSRYFPTKVRSIVSDFAVFLTILCMVLIDYAIGIPSPKLQVPSVFKPTRDDRGWFVTPLGPNPWWTVIAAIIPALLCTILIFMDQQITAVIINRKEHKLKKGCGYHLDLLMVAVMLGVCSIMGLPWFVAATVLSITHVNSLKLESECSAPGEQPKFLGIREQRVTGLMIFILMGSSVFMTSILKFIPMPVLYGVFLYMGASSLKGIQFFDRIKLFWMPAKHQPDFIYLRHVPLRKVHLFTIIQMSCLGLLWIIKVSRAAIVFPMMVLALVFVRKLMDLLFTKRELSWLDDLMPESKKKKLEDAEKEEEQSMLAMEDEGTVQLPLEGHYRDDPSVINISDEMSKTALWRNLLITADNSKDKESSFPSKSSPS

SEQ ID NO: 64641 - protein, 1088 aa, Homo sapiens
MEIKDQGAQMEPLLPTRNDEEAVVDRGGTRSILKTHFEKEDLEGHRTLFIGVHVPLGGRKSHRRHRHRGHKHRKRDRERDSGLEDGRESPSFDTPSQRVQFILGTEDDDEEHIPHDLFTELDEICWREGEDAEWRETARWLKFEEDVEDGGERWSKPYVATLSLHSLFELRSCILNGTVLLDMHANTLEEIADMVLDQQVSSGQLNEDVRHRVHEALMKQHHHQNQKKLTNRIPIVRSFADIGKKQSEPNSMDKNAGQVVSPQSAPACVENKNDVSRENSTVDFSKVDLHFMKKIPPGAEASNILVGELEFLDRTVVAFVRLSPAVLLQGLAEVPIPTRFLFILLGPLGKGQQYHEIGRSIATLMTDEVFHDVAYKAKDRNDLVSGIDEFLDQVTVLPPGEWDPSIRIEPPKNVPSQEKRKIPAVPNGTAAHGEAEPHGGHSGPELQRTGRIFGGLILDIKRKAPYFWSDFRDAFSLQCLASFLFLYCACMSPVITFGGLLGEATEGRISAIESLFGASMTGIAYSLFGGQPLTILGSTGPVLVFEKILFKFCKEYGLSYLSLRASIGLWTATLCIILVATDASSLVCYITRFTEEAFASLICIIFIYEALEKLFELSEAYPINMHNDLELLTQYSCNCVEPHNPSNGTLKEWRESNISASDIIWENLTVSECKSLHGEYVGRACGHDHPYVPDVLFWSVILFFSTVTLSATLKQFKTSRYFPTKVRSIVSDFAVFLTILCMVLIDYAIGIPSPKLQVPSVFKPTRDDRGWFVTPLGPNPWWTVIAAIIPALLCTILIFMDQQITAVIINRKEHKLKKGCGYHLDLLMVAVMLGVCSIMGLPWFVAATVLSITHVNSLKLESECSAPGEQPKFLGIREQRVTGLMIFILMGSSVFMTSILKFIPMPVLYGVFLYMGASSLKGIQFFDRIKLFWMPAKHQPDFIYLRHVPLRKVHLFTIIQMSCLGLLWIIKVSRAAIVFPMMVLALVFVRKLMDLLFTKRELSWLDDLMPESKKKKLEDAEKEEEQSMLAMEDEGTVQLPLEGHYRDDPSVINISDEMSKTALWRNLLITADNSKDKESSFPSKSSPS

SEQ ID NO: 64642 - protein, 1054 aa, Homo sapiens
MEIKDQGAQMEPLLPTRNDEEAVVDRGGTRSILKTHFEKEDLEGHRTLFIGVHVPLGGRKSHRRHRHRGHKHRKRDRERDSGLEDGRESPSFDTPSQRVQFILGTEDDDEEHIPHDLFTELDEICWREGEDAEWRETARWLKFEEDVEDGGERWSKPYVATLSLHSLFELRSCILNGTVLLDMHANTLEEIADMVLDQQVSSGQLNEDVRHRVHEALMKQHHHQNQKKLTNRIPIVRSFADIGKKQSEPNSMDKNAGQVVSPQSAPACVENKNDVSRENSTVDFSKGLGGQQKGHTSPCGMKQRHEKGPPHQQEREVDLHFMKKIPPGAEASNILVGELEFLDRTVVAFVRLSPAVLLQGLAEVPIPTRFLFILLGPLGKGQQYHEIGRSIATLMTDEVFHDVAYKAKDRNDLVSGIDEFLDQVTVLPPGEWDPSIRIEPPKNVPSQEKRKIPAVPNGTAAHGEAEPHGGHSGPELQRTGRIFGGLILDIKRKAPYFWSDFRDAFSLQCLASFLFLYCACMSPVITFGGLLGEATEGRISAIESLFGASMTGIAYSLFGGQPLTILGSTGPVLVFEKILFKFCKEYGLSYLSLRASIGLWTATLCIILVATDASSLVCYITRFTEEAFASLICIIFIYEALEKLFELSEAYPINMHNDLELLTQYSCNCVEPHNPSNGTLKEWRESNISASDIIWENLTVSECKSLHGEYVGRACGHDHPYVPDVLFWSVILFFSTVTLSATLKQFKTSRYFPTKVRSIVSDFAVFLTILCMVLIDYAIGIPSPKLQVPSVFKPTRDDRGWFVTPLGPNPWWTVIAAIIPALLCTILIFMDQQITAVIINRKEHKLKKGCGYHLDLLMVAVMLGVCSIMGLPWFVAATVLSITHVNSLKLESECSAPGEQPKFLGIREQRVTGLMIFILMGSSVFMTSILKFIPMPVLYGVFLYMGASSLKGIQFFDRIKLFWMPAKHQPDFIYLRHVPLRKVHLFTIIQMSCLGLLWIIKVSRAAIVFPMMVLALVFVRKLMDLLFTKRELSWLDDLMPESKKKKLEDAEKEH

SEQ ID NO: 64643 - protein, 1118 aa, Homo sapiens
MEIKDQGAQMEPLLPTRNDEEAVVDRGGTRSILKTHFEKEDLEGHRTLFIGVHVPLGGRKSHRRHRHRGHKHRKRDRERDSGLEDGRESPSFDTPSQRVQFILGTEDDDEEHIPHDLFTELDEICWREGEDAEWRETARWLKFEEDVEDGGERWSKPYVATLSLHSLFELRSCILNGTVLLDMHANTLEEIADMVLDQQVSSGQLNEDVRHRVHEALMKQHHHQNQKKLTNRIPIVRSFADIGKKQSEPNSMDKNAGQVVSPQSAPACVENKNDVSRENSTVDFSKGLGGQQKGHTSPCGMKQRHEKGPPHQQEREVDLHFMKKIPPGAEASNILVGELEFLDRTVVAFVRLSPAVLLQGLAEVPIPTRFLFILLGPLGKGQQYHEIGRSIATLMTDEVFHDVAYKAKDRNDLVSGIDEFLDQVTVLPPGEWDPSIRIEPPKNVPSQEKRKIPAVPNGTAAHGEAEPHGGHSGPELQRTGRIFGGLILDIKRKAPYFWSDFRDAFSLQCLASFLFLYCACMSPVITFGGLLGEATEGRISAIESLFGASMTGIAYSLFGGQPLTILGSTGPVLVFEKILFKFCKEYGLSYLSLRASIGLWTATLCIILVATDASSLVCYITRFTEEAFASLICIIFIYEALEKLFELSEAYPINMHNDLELLTQYSCNCVEPHNPSNGTLKEWRESNISASDIIWENLTVSECKSLHGEYVGRACGHDHPYVPDVLFWSVILFFSTVTLSATLKQFKTSRYFPTKVRSIVSDFAVFLTILCMVLIDYAIGIPSPKLQVPSVFKPTRDDRGWFVTPLGPNPWWTVIAAIIPALLCTILIFMDQQITAVIINRKEHKLKKGCGYHLDLLMVAVMLGVCSIMGLPWFVAATVLSITHVNSLKLESECSAPGEQPKFLGIREQRVTGLMIFILMGSSVFMTSILKFIPMPVLYGVFLYMGASSLKGIQFFDRIKLFWMPAKHQPDFIYLRHVPLRKVHLFTIIQMSCLGLLWIIKVSRAAIVFPMMVLALVFVRKLMDLLFTKRELSWLDDLMPESKKKKLEDAEKEEEQSMLAMEDEGTVQLPLEGHYRDDPSVINISDEMSKTALWRNLLITADNSKDKESSFPSKSSPS

SEQ ID NO: 64644 - protein, 1105 aa, Homo sapiens
MEIKDQGAQMEPLLPTRNDEEAVVDRGGTRSILKTHFEKEDLEGHRTLFIGVHVPLGGRKSHRRHRHRGHKHRKRDRERDSGLEDGRESPSFDTPSQRVQFILGTEDDDEEHIPHDLFTELDEICWREGEDAEWRETARWLKFEEDVEDGGERWSKPYVATLSLHSLFELRSCILNGTVLLDMHANTLEEIADMVLDQQVSSGQLNEDVRHRVHEALMKQHHHQNQKKLTNRIPIVRSFADIGKKQSEPNSMDKNGQVVSPQSAPACVENKNDVSRENSTVDFSKVDLHFMKKIPPGAEASNILVGELEFLDRTVVAFVRLSPAVLLQGLAEVPIPTRFLFILLGPLGKGQQYHEIGRSIATLMTDEVFHDVAYKAKDRNDLVSGIDEFLDQVTVLPPGEWDPSIRIEPPKNVPSQEKRKIPAVPNGTAAHGEAEPHGGHSGPELQRTGRIFGGLILDIKRKAPYFWSDFRDAFSLQCLASFLFLYCACMSPVITFGGLLGEATEGRISAIESLFGASMTGIAYSLFGGQPLTILGSTGPVLVFEKILFKFCKEYGLSYLSLRASIGLWTATLCIILVATDASSLVCYITRFTEEAFASLICIIFIYEALEKLFELSEAYPINMHNDLELLTQYSCNCVEPHNPSNGTLKEWRESNISASDIIWENLTVSECKSLHGEYVGRACGHDHPYVPDVLFWSVILFFSTVTLSATLKQFKTSRYFPTKVRSIVSDFAVFLTILCMVLIDYAIGIPSPKLQVPSVFKPTRDDRGWFVTPLGPNPWWTVIAAIIPALLCTILIFMDQQITAVIINRKEHKLKKGCGYHLDLLMVAVMLGVCSIMGLPWFVAATVLSITHVNSLKLESECSAPGEQPKFLGIREQRVTGLMIFILMGSSVFMTSILKFIPMPVLYGVFLYMGASSLKGIQFFDRIKLFWMPAKHQPDFIYLRHVPLRKVHLFTIIQMSCLGLLWIIKVSRAAIVFPMMVLALVFVRKLMDLLFTKRELSWLDDLMPESKKKKLEDAEKEEEQSMLAMEDEGTVQLPLEGHYRDDPSVINISDEMSKTALWRNLLITADNSKDKESSFPSKSIESRKEKKADSGKGVDRETCL

SEQ ID NO: 64645 - protein, 408 aa, Homo sapiens
MEIKDQGAQMEPLLPTRNDEEAVVDRGGTRSILKTHFEKEDLEGHRTLFIGVHVPLGGRKSHRRHRHRGHKHRKRDRERDSGLEDGRESPSFDTPSQRVQFILGTEDDDEEHIPHDLFTELDEICWREGEDAEWRETARWLKFEEDVEDGGERWSKPYVATLSLHSLFELRSCILNGTVLLDMHANTLEEIADMVLDQQVSSGQLNEDVRHRVHEALMKQHHHQNQKKLTNRIPIVRSFADIGKKQSEPNSMDKNAGQVVSPQSAPACVENKNDVSRENSTVDFSKGLGGQQKGHTSPCGMKQRHEKGPPHQQEREVDLHFMKKIPPGAEASNILVGELEFLDRTVVAFVRLSPAVLLQGLAEVPIPTRYFMMLPIKLKIVMTWYQELMSFWIRLLFSLLENGIQAFE

SEQ ID NO: 64646 - protein, 891 aa, Homo sapiens
MSQVGGRGDRCTQEVQGLVHGAGDLSASLAENSPTMSQNGYFEDSSYYKCDTDDTFEAREEILGDEAFDTANSSIVSGESIRFFVNVNLEMQATNTENEATSGGCVLLHTSRKYLKLKNFKEEIRAHRDLDGFLAQASIVLNETATSLDNVLRTMLRRFARDPDNNEPNCNLDLLMAMLFTDAGAPMRGKVHLLSDTIQGVTATVTGVRYQQSWLCIICTMKALQKRHVCISRLVRPQNWGENSCEVRFVILVLAPPKMKSTKTAMEVARTFATMFSDIAFRQKLLETRTEEEFKEALVHQRQLLTMVSHGPVAPRTKERSTVSLPAHRHPEPPKCKDFVPFGKGIREDIARRFPLYPLDFTDGIIGKNKAVGKYITTTLFLYFACLLPTIAFGSLNDENTDGAIDVQKTIAGQSIGGLLYALFSGQPLVILLTTAPLALYIQVIRVICDDYDLDFNSFYAWTGLWNSFFLALYAFFNLSLVMSLFKRSTEEIIALFISITFVLDAVKGTVKIFWKYYYGHYLDDYHTKRTSSLVSLSGLGASLNASLHTALNASFLASPTELPSATHSGQATAVLSLLIMLGTLWLGYTLYQFKKSPYLHPCVREILSDCALPIAVLAFSLISSHGFREIEMSKFRYNPSESPFAMAQIQSLSLRAVSGAMGLGFLLSMLFFIEQNLVAALVNAPENRLVKGTAYHWDLLLLAIINTGLSLFGLPWIHAAYPHSPLHVRALALVEERVENGHIYDTIVNVKETRLTSLGASVLVGLSLLLLPVPLQWIPKPVLYGLFLYIALTSLDGNQLVQRVALLLKEQTAYPPTHYIRRVPQRKIHYFTGLQVLQLLLLCAFGMSSLPYMKMIFPLIMIAMIPIRYILLPRIIEAKYLDVMDAEHRP

SEQ ID NO: 64647 - protein, 918 aa, Homo sapiens
MGVYGPQDRSESEKRDVQRDPPPWHPRREGERPARARSLPLAAAGQGFLRKTWISEHENSPTMSQNGYFEDSSYYKCDTDDTFEAREEILGDEAFDTANSSIVSGESIRFFVNVNLEMQATNTENEATSGGCVLLHTSRKYLKLKNFKEEIRAHRDLDGFLAQASIVLNETATSLDNVLRTMLRRFARDPDNNEPNCNLDLLMAMLFTDAGAPMRGKVHLLSDTIQGVTATVTGVRYQQSWLCIICTMKALQKRHVCISRLVRPQNWGENSCEVRFVILVLAPPKMKSTKTAMEVARTFATMFSDIAFRQKLLETRTEEEFKEALVHQRQLLTMVSHGPVAPRTKERSTVSLPAHRHPEPPKCKDFVPFGKGIREDIARRFPLYPLDFTDGIIGKNKAVGKYITTTLFLYFACLLPTIAFGSLNDENTDGAIDVQKTIAGQSIGGLLYALFSGQPLVILLTTAPLALYIQVIRVICDDYDLDFNSFYAWTGLWNSFFLALYAFFNLSLVMSLFKRSTEEIIALFISITFVLDAVKGTVKIFWKYYYGHYLDDYHTKRTSSLVSLSGLGASLNASLHTALNASFLASPTELPSATHSGQATAVLSLLIMLGTLWLGYTLYQFKKSPYLHPCVREILSDCALPIAVLAFSLISSHGFREIEMSKFRYNPSESPFAMAQIQSLSLRAVSGAMGLGFLLSMLFFIEQNLVAALVNAPENRLVKGTAYHWDLLLLAIINTGLSLFGLPWIHAAYPHSPLHVRALALVEERVENGHIYDTIVNVKETRLTSLGASVLVGLSLLLLPVPLQWIPKPVLYGLFLYIALTSLDGNQLVQRVALLLKEQTAYPPTHYIRRVPQRKIHYFTGLQVLQLLLLCAFGMSSLPYMKMIFPLIMIAMIPIRYILLPRIIEAKYLDVMDAEHRP

SEQ ID NO: 64648 - protein, 316 aa, Homo sapiens
MAAATRRVFHLQPCENSPTMSQNGYFEDSSYYKCDTDDTFEAREEILGDEAFDTANSSIVSGESIRFFVNVNLEMQATNTENEATSGGCVLLHTSRKYLKLKNFKEEIRAHRDLDGFLAQASIVLNETATSLDNVLRTMLRRFARDPDNNEPNCNLDLLMAMLFTDAGAPMRGKVHLLSDTIQGVTATVTGVRYQQSWLCIICTMKALQKRHVCISRLVRPQNWGENSCEVRFVILVLAPPKMKSTKTAMEVARTFATMFSDIAFRQKLLETRTEEEFKEALVHQRQLLTMVSHGPVAPRTKERSTVSLPAHRHPE

SEQ ID NO: 64649 - protein, 875 aa, Homo sapiens
MAAATRRVFHLQPCENSPTMSQNGYFEDSSYYKCDTDDTFEAREEILGDEAFDTANSSIVSGESIRFFVNVNLEMQATNTENEATSGGCVLLHTSRKYLKLKNFKEEIRAHRDLDGFLAQASIVLNETATSLDNVLRTMLRRFARDPDNNEPNCNLDLLMAMLFTDAGAPMRGKVHLLSDTIQGVTATVTGVRYQQSWLCIICTMKALQKRHVCISRLVRPQNWGENSCEVRFVILVLAPPKMKSTKTAMEVARTFATMFSDIAFRQKLLETRTEEEFKEALVHQRQLLTMVSHGPVAPRTKERSTVSLPAHRHPEPPKCKDFVPFGKGIREDIARRFPLYPLDFTDGIIGKNKAVGKYITTTLFLYFACLLPTIAFGSLNDENTDGAIDVQKTIAGQSIGGLLYALFSGQPLVILLTTAPLALYIQVIRVICDDYDLDFNSFYAWTGLWNSFFLALYAFFNLSLVMSLFKRSTEEIIALFISITFVLDAVKGTVKIFWKYYYGHYLDDYHTKRTSSLVSLSGLGASLNASLHTALNASFLASPTELPSATHSGQATAVLSLLIMLGTLWLGYTLYQFKKSPYLHPCVREILSDCALPIAVLAFSLISSHGFREIEMSKFRYNPSESPFAMAQIQSLSLRAVSGAMGLGFLLSMLFFIEQNLVAALVNAPENRLVKGTAYHWDLLLLAIINTGLSLFGLPWIHAAYPHSPLHVRALALVEERVENGHIYDTIVNVKETRLTSLGASVLVGLSLLLLPVPLQWIPKPVLYGLFLYIALTSLDGNQLVQRVALLLKEQTAYPPTHYIRRVPQRKIHYFTGLQVLQLLLLCAFGMSSLPYMKMIFPLIMIAMIPIRYILLPRIIEAKYLDVMDAEHRP

SEQ ID NO: 64650 - protein, 370 aa, Homo sapiens
MTLASRLSTAANTGQIDDPQEQHRVISSNLALIQVQATVVGLLAAVAALLLGVVSREEVDVAKVELLCASSVLTAFLAAFALGVLMVCIVIGARKLGVNPDNIATPIAASLGDLITLSILALVSSFFYRHKDSRYLTPLVCLSFAALTPVWVLIAKQSPPIVKILKFGWFPIILAMVISSFGGLILSKTVSKQQYKGMAIFTPVICGVGGNLVAIQTSRISTYLHMWSAPGVLPLQMKKFWPNPCSTFCTSEINSMSARVLLLLVVPGHLIFFYIIYLVEGQSVINSQTFVVLYLLAGLIQVTILLYLAEVMVRLTWHQALDPDNHCIPYLTGLGDLLGTGLLALCFFTDWLLKSKAELGGISELASGPP

SEQ ID NO: 64651 - protein, 513 aa, Homo sapiens
MSSKPEPKDVHQLNGTGPSASPCSSDGPGREPLAGTSEFLGPDGAGVEVVIESRANAKGVREEDALLENGSQSNESDDVSTDRGPAPPSPLKETSFSIGLQVLFPFLLAGFGTVAAGMVLDIVQHWEVFQKVTEVFILVPALLGLKGNLEMTLASRLSTAANIGHMDTPKELWRMITGNMALIQVQATVVGFLASIAAVVFGWIPDGHFSIPHAFLLCASSVATAFIASLVLGMIMIGVIIGSRKIGINPDNVATPIAASLGDLITLALLSGISWGLYLELNHWRYIYPLVCAFFVALLPVWVVLARRSPATREVLYSGWEPVIIAMAISSVGGLILDKTVSDPNFAGMAVFTPVINGVGGNLVAVQASRISTFLHMNGMPGENSEQAPRRCPSPCTTFFSPDVNSRSARVLFLLVVPGHLVFLYTISCMQGGHTTLTLIFIIFYMTAALLQVLILLYIADWMVHWMWGRGLDPDNFSIPYLTALGDLLGTGLLALSFHVLWLIGDRDTDVGD

SEQ ID NO: 64652 - protein, 573 aa, Homo sapiens
MTNSKGRSITDKTSGGPSSGGGFVDWTLRLNTIQSDKFLNLLLSMVPVIYQKNQEDRHKKANGIWQDGLSTAVQTFSNRSEQHMEYHSFSEQSFHANNGHASSSCSQKYDDYANYNYCDGRETSETTAMLQDEDISSDGDEDAIVEVTPKLPKESSGIMALQILVPFLLAGFGTVSAGMVLDIVQHWEVFRKVTEVFILVPALLGLKGNLEMTLASRLSTAVNIGKMDSPIEKWNLIIGNLALKQVQATVVGFLAAVAAIILGWIPEGKYYLDHSILLCSSSVATAFIASLLQGIIMVGVIVGSKKTGINPDNVATPIAASFGDLITLAILAWISQGLYSCLETYYYISPLVGVFFLALTPIWIIIAAKHPATRTVLHSGWEPVITAMVISSIGGLILDTTVSDPNLVGIVVYTPVINGIGGNLVAIQASRISTYLHLHSIPGELPDEPKGCYYPFRTFFGPGVNNKSAQVLLLLVIPGHLIFLYTIHLMKSGHTSLTIIFIVVYLFGAVLQVFTLLWIADWMVHHFWRKGKDPDSFSIPYLTALGDLLGTALLALSFHFLWLIGDRDGDVGD

SEQ ID NO: 64653 - protein, 122 aa, Homo sapiens
MTNSKGRSITDKTSGGPSSGGGFVDWTLRLNTIQSDKFLNLLLSMVPVIYQKNQEDRHKKANGIWQDGLSTAVQTFSNRSEQHMEYHSFSEQSFHANNGHASSSCSQKYDDYANYNYCDGRE

SEQ ID NO: 64654 - protein, 143 aa, Homo sapiens
MTNSKGRSITDKTSGGPSSGGGFVDWTLRLNTIQSDKFLNLLLSMVPVIYQKNQEDRHKKANGIWQDGLSTAVQTFSNRSEQHMEYHSFSEQSFHANNGHASSSCSQKYDDYANYNYCDGRETSETTAMLQDEDISSDGDEDA

SEQ ID NO: 64655 - protein, 46 aa, Homo sapiens
MTNSKGRSITDKTSGGPSSGGGFVDWTLRLNTIQSDKFLNLLLSMV

SEQ ID NO: 64656 - protein, 72 aa, Homo sapiens
MTNSKGRSITDKTSGGPSSGGGFVDWTLRLNTIQSDKFLNLLLSMVPVIYQKNQEDRHKKANGIWQDGLSTA

SEQ ID NO: 64657 - protein, 12 aa, Homo sapiens
MTNSKGRSITDK

SEQ ID NO: 64658 - protein, 76 aa, Homo sapiens
MTNSKGRSITDKTSGGPSSGGGFVDWTLRLNTIQSDKFLNLLLSMVPVIYQKNQEDRHKKANGIWQDGLSTAVQTF

SEQ ID NO: 64659 - protein, 94 aa, Homo sapiens
MTNSKGRSITDKTSGGPSSGGGFVDWTLRLNTIQSDKFLNLLLSMVPVIYQKNQEDRHKKANGIWQDGLSTAVQTFSNRSEQHMEYHSFSEQSF

SEQ ID NO: 64660 - protein, 507 aa, Homo sapiens
MDGTETRQRRLDSCGKPGELGLPHPLSTGGLPVASEDGALRAPESQSVTPKPLETEPSRETTWSIGLQVTVPFMFAGLGLSWAGMLLDYFQHWPVFVEVKDLLTLVPPLVGLKGNLEMTLASRLSTAANTGQIDDPQEQHRVISSNLALIQVQATVVGLLAAVAALLLGVVSREEVDVAKVELLCASSVLTAFLAAFALGVLMVCIVIGARKLGVNPDNIATPIAASLGDLITLSILALVSSFFYRHKDSRYLTPLVCLSFAALTPVWVLIAKQSPPIVKILKFGWFPIILAMVISSFGGLILSKTVSKQQYKGMAIFTPVICGVGGNLVAIQTSRISTYLHMWSAPGVLPLQMKKFWPNPCSTFCTSEINSMSARVLLLLVVPGHLIFFYIIYLVEGQSVINSQTFVVLYLLAGLIQVTILLYLAEVMVRLTWHQALDPDNHCIPYLTGLGDLLGSSSVGHTAAVPRRCTASPGWGLIQPFICTQHLIVSLLSFYFPFCLLAKTSI

SEQ ID NO: 64661 - protein, 471 aa, Homo sapiens
MDGTETRQRRLDSCGKPGELGLPHPLSTGGLPVASEDGALRAPESQSVTPKPLETEPSRETTWSIGLQVTVPFMFAGLGLSWAGMLLDYFQANTGQIDDPQEQHRVISSNLALIQVQATVVGLLAAVAALLLGVVSREEVDVAKVELLCASSVLTAFLAAFALGVLMVCIVIGARKLGVNPDNIATPIAASLGDLITLSILALVSSFFYRHKDSRYLTPLVCLSFAALTPVWVLIAKQSPPIVKILKFGWFPIILAMVISSFGGLILSKTVSKQQYKGMAIFTPVICGVGGNLVAIQTSRISTYLHMWSAPGVLPLQMKKFWPNPCSTFCTSEINSMSARVLLLLVVPGHLIFFYIIYLVEGQSVINSQTFVVLYLLAGLIQVTILLYLAEVMVRLTWHQALDPDNHCIPYLTGLGDLLGSSSVGHTAAVPRRCTASPGWGLIQPFICTQHLIVSLLSFYFPFCLLAKTSI

SEQ ID NO: 64662 - protein, 487 aa, Homo sapiens
MDGTETRQRRLDSCGKPGELGLPHPLSTGGLPVASEDGALRAPESQSVTPKPLETEPSRETTWSIGLQVTVPFMFAGLGLSWAGMLLDYFQHWPVFVEVKDLLTLVPPLVGLKGNLEMTLASRLSTAANTGQIDDPQEQHRVISSNLALIQVQATVVGLLAAVAALLLGVVSREEVDVAKVELLCASSVLTAFLAAFALGVLMVCIVIGARKLGVNPDNIATPIAASLGDLITLSILALVSSFFYRHKDSRYLTPLVCLSFAALTPVWVLIAKQSPPIVKILKFGWFPIILAMVISSFGGLILSKTVSKQQYKGMAIFTPVICGVGGNLVAIQTSRISTYLHMWSAPGVLPLQMKKFWPNPCSTFCTSEINSMSARVLLLLVVPGHLIFFYIIYLVEGQSVINSQTFVVLYLLAGLIQVTILLYLAEVMVRLTWHQALDPDNHCIPYLTGLGDLLGTGLLALCFFTDWLLKSKAELGGISELASGPP

SEQ ID NO: 64663 - protein, 461 aa, Homo sapiens
MVVTQLNLEFCFQGKKLRGFSCELTRSPHGVLPESFFTIMCQVVVPILLSGLCMMTAGLVMNTIQHWPVFVEVKDLLTLVPPLVGLKGNLEMTLASRLSTAANTGQIDDPQEQHRVISSNLALIQVQATVVGLLAAVAALLLGVVSREEVDVAKVELLCASSVLTAFLAAFALGVLMVCIVIGARKLGVNPDNIATPIAASLGDLITLSILALVSSFFYRHKDSRYLTPLVCLSFAALTPVWVLIAKQSPPIVKILKFGWFPIILAMVISSFGGLILSKTVSKQQYKGMAIFTPVICGVGGNLVAIQTSRISTYLHMWSAPGVLPLQMKKFWPNPCSTFCTSEINSMSARVLLLLVVPGHLIFFYIIYLVEGQSVINSQTFVVLYLLAGLIQVTILLYLAEVMVRLTWHQALDPDNHCIPYLTGLGDLLGTGLLALCFFTDWLLKSKAELGGISELASGPP

SEQ ID NO: 64664 - protein, 478 aa, Homo sapiens
MDGTETRQRRLDSCGKPGELGLPHPLSTGGLPVASEDGALRAPESQSVTPKPLETEPSRVTVPFMFAGLGLSWAGMLLDYFQHWPVFVEVKDLLTLVPPLVGLKGNLEMTLASRLSTAANTGQIDDPQEQHRVISSNLALIQVQATVVGLLAAVAALLLGVVSREEVDVAKVELLCASSVLTAFLAAFALGVLMVCIVIGARKLGVNPDNIATPIAASLGDLITLSILALVSSFFYRHKDSRYLTPLVCLSFAALTPVWVLIAKQSPPIVKILKFGWFPIILAMVISSFGGLILSKTVSKQQYKGMAIFTPVICGVGGNLVAIQTSRISTYLHMWSAPGVLPLQMKKFWPNPCSTFCTSEINSMSARVLLLLVVPGHLIFFYIIYLVEGQSVINSQTFVVLYLLAGLIQVTILLYLAEVMVRLTWHQALDPDNHCIPYLTGLGDLLGTGLLALCFFTDWLLKSKAELGGISELASGPP

SEQ ID NO: 64665 - protein, 152 aa, Homo sapiens
MDGTETRQRRLDSCGKPGELGLPHPLSTGGLPVASEDGALRAPESQSVTPKPLETEPSRETTWSIGLQVTVPFMFAGLGLSWAGMLLDYFQHWPVFVEVKDLLTLVPPLVGLKGNLEMTLASRLSTAANTGQIDDPQEQHRVISSNLALIQV

SEQ ID NO: 64666 - protein, 152 aa, Homo sapiens; identical to SEQ ID NO: 64665

SEQ ID NO: 64667 - protein, 86 aa, Homo sapiens
MDGTETRQRRLDSCGKPGELGLPHPLSTGGLPVASEDGALRAPESQSVTPKPLETEPSRETTWSIGLQVTVPFMFAGLGLSWAGML

SEQ ID NO: 64668 - protein, 201 aa, Homo sapiens
MDGTETRQRRLDSCGKPGELGLPHPLSTGGLPVASEDGALRAPESQSVTPKPLETEPSRETTWSIGLQVTVPFMFAGLGLSWAGMLLDYFQHWPVFVEVKDLLTLVPPLVGLKGNLEMTLASRLSTAANTGQIDDPQEQHRVISSNLALIQVQATVVGLLAAVAALLLGVVSREEVDVAKVELLCASSVLTAFLAAFALGE

SEQ ID NO: 64669 - protein, 137 aa, Homo sapiens
MDGTETRQRRLDSCGKPGELGLPHPLSTGGLPVASEDGALRAPESQSVTPKPLETEPSRETTWSIGLQVTVPFMFAGLGLSWAGMLLDYFQANTGQIDDPQEQHRVISSNLALIQVQATVVGLLAAVAALLLGVVSR

SEQ ID NO: 64670 - protein, 152 aa, Homo sapiens; identical to SEQ ID NO: 64665

SEQ ID NO: 64671 - protein, 559 aa, Homo sapiens
MAPTLQQAYRRRWWMACTAVLENLFFSAVLLGWGSLLIILKNEGFYSSTCPAESSTNTTQDEQRRWPGCDQQDEMLNLGFTIGSFVLSATTLPLGILMDRFGPRPVRLVGSACFTASCTLMALASRDVEALSPLIFLALSLNGFGGICLTFTSLTLPNMFGNLRSTLMALMIGSYASSAITFPGIKLIYDAGVAFVVIMFTWSGLACLIFLNCTLNWPIEAFPAPEEVNYTKKIKLSGLALDHKVTGDLFYTHVTTMGQRLSQKAPSLEDGSDAFMSPQDVRGTSENLPERSVPLRKSLCSPTFLWSLLTMGMTQLRIIFYMAAVNKMLEYLVTGGQEHETNEQQQKVAETVGFYSSVFGAMQLLCLLTCPLIGYIMDWRIKDCVDAPTQGTVLGDARDGVATKSIRPRYCKIQKLTNAISAFTLTNLLLVGFGITCLINNLHLQFVTFVLHTIVRGFFHSACGSLYAAVFPSNHFGTLTGLQSLISAVFALLQQPLFMAMVGPLKGEPFWVNLGLLLFSLLGFLLPSYLFYYRARLQQEYAANGMGPLKVLSGSEVTA

SEQ ID NO: 64672 - protein, 559 aa, Homo sapiens; identical to SEQ ID NO: 64671

SEQ ID NO: 64673 - protein, 110 aa, Homo sapiens
MAPTLQQAYRRRWWMACTAVLENLFFSAVLLGWGSLLIILKNEGFYSSTCPAESSTNTTQDEQRRWPGCDQQDEMLNLGFTIGSFVLSATTLPLGILMDRFGPRPVRLVG

SEQ ID NO: 64674 - protein, 569 aa, Homo sapiens
MAPTLATAHRRRWWMACTAVLENLLFSAVLLGWGSLLIMLKSEGFYSYLCTEPENVTNGTVGGTAEPGHEEVSWMNGWLSCQAQDEMLNLAFTVGSFLLSAITLPLGIVMDKYGPRKLRLLGSACFAVSCLLIAYGASKPNALSVLIFIALALNGFGGMCMTFTSLTLPNMFGDLRSTFIALMIGSYASSAVTFPGIKLIYDAGVSFIVVLVVWAGCSGLVFLNCFFNWPLEPFPGPEDMDYSVKIKFSWLGFDHKITGKQFYKQVTTVGRRLSVGSSMRSAKEQVALQEGHKLCLSTVDLEVKCQPDAAVAPSFMHSVFSPILLLSLVTMCVTQLRLIFYMGAMNNILKFLVSGDQKTVGLYTSIFGVLQLLCLLTAPVIGYIMDWRLKECEDASEEPEEKDANQGEKKKKKRDRQIQKITNAMRAFAFTNLLLVGFGVTCLIPNLPLQILSFILHTIVRGFIHSAVGGLYAAVYPSTQFGSLTGLQSLISALFALLQQPLFLAMMGPLQGDPLWVNVGLLLLSLLGFCLPLYLICYRRQLERQLQQRQEDDKLFLKINGSSNQEAFV

SEQ ID NO: 64675 - protein, 573 aa, Homo sapiens
MAPTLATAHRRRWWMACTAVLENLLFSAVLLGWGSLLIMLKSEGFYSYLCTEPENVTNGTVGGTAEPGHEEVSWMNGWLSCQAQDEMLNLAFTVGSFLLSAITLPLGIVMDKYGPRKLRLLGSACFAVSCLLIAYGASKPNALSVLIFIALALNGFGGMCMTFTSLTLPNMFGDLRSTFIALMIGSYASSAVTFPGIKLIYDAGVSFIVVLVVWAGCSGLVFLNCFFNWPLEPFPGPEDMDYSVKIKFSWLGFDHKITGKQFYKQVTTVGRRLSVGSSMRSAKEQVALQEGHKLCLSTVDLEVKCQPDAAVAPSFMHSVFSPILLLSLVTMCVTQLRLIFYMGAMNNILKFLVSGDQKTASSTVGLYTSIFGVLQLLCLLTAPVIGYIMDWRLKECEDASEEPEEKDANQGEKKKKKRDRQIQKITNAMRAFAFTNLLLVGFGVTCLIPNLPLQILSFILHTIVRGFIHSAVGGLYAAVYPSTQFGSLTGLQSLISALFALLQQPLFLAMMGPLQGDPLWVNVGLLLLSLLGFCLPLYLICYRRQLERQLQQRQEDDKLFLKINGSSNQEAFV

SEQ ID NO: 64676 - protein, 432 aa, Homo sapiens
MTYGSPQANASPSDAVALDHGEVSRRQQQELPNMFGDLRSTFIALMIGSYASSAVTFPGIKLIYDAGVSFIVVLVVWAGCSGLVFLNCFFNWPLEPFPGPEDMDYSVKIKFSWLGFDHKITGKQFYKQVTTVGRRLSVGSSMRSAKEQVALQEGHKLCLSTVDLEVKCQPDAAVAPSFMHSVFSPILLLSLVTMCVTQLRLIFYMGAMNNILKFLVSGDQKTVGLYTSIFGVLQLLCLLTAPVIGYIMDWRLKECEDASEEPEEKDANQGEKKKKKRDRQIQKITNAMRAFAFTNLLLVGFGVTCLIPNLPLQILSFILHTIVRGFIHSAVGGLYAAVYPSTQFGSLTGLQSLISALFALLQQPLFLAMMGPLQGDPLWVNVGLLLLSLLGFCLPLYLICYRRQLERQLQQRQEDDKLFLKINGSSNQEAFV

SEQ ID NO: 64677 - protein, 446 aa, Homo sapiens
MTSKEIILGLCLLSLVLSMILMVIIRYISRVLVWILTILVILGSLGGTGVLWWLYAKQRRSPKETVTPEQLQIAEDNLRALLIYAISATVFTVILFLIMLVMRKRVALTIALFHVAGKVFIHLPLLVFQPFWTFFALVLFWVYWIMTLLFLGTTGSPVQNEQGFVEFKISGPLQYMWWYHVVGLIWISEFILACQQMTVAGAVVTYYFTRDKRNLPFTPILASVNRLIRYHLGTVAKGSFIITLVKIPRMILMYIHSQLKGKENACARCVLKSCICCLWCLEKCLNYLNQNAYTATAINSTNFCTSAKDAFVILVENALRVATINTVGDFMLFLGKVLIVCSTGLAGIMLLNYQQDYTVWVLPLIIVCLFAFLVAHCFLSIYEMVVDVLFLCFAIDTKYNDGSPGREFYMDKVLMEFVENSRKAMKEAGKGGVADSRELKPMLKKR

SEQ ID NO: 64678 - protein, 657 aa, Homo sapiens
MGCCSSASSAAQSSKREWKPLEDRSCTDIPWLLLFILFCIGMGFICGFSIATGAAARLVSGYDSYGNICGQKNTKLEAIPNSGMDHTQRKYVFFLDPCNLDLINRKIKSVALCVAACPRQELKTLSDVQKFAEINGSALCSYNLKPSEYTTSPKSSVLCPKLPVPASAPIPFFHRCAPVNISCYAKFAEALITFVSDNSVLHRLISGVMTSKEIILGLCLLSLVLSMILMVIIRYISRVLVWILTILVILGSLGGTGVLWWLYAKQRRSPKETVTPEQLQIAEDNLRALLIYAISATVFTVILFLIMLVMRKRVALTIALFHVAGKVFIHLPLLVFQPFWTFFALVLFWVYWIMTLLFLGTTGSPVQNEQGFVEFKISGPLQYMWWYHVVGLIWISEFILACQQMTVAGAVVTYYFTRDKRNLPFTPILASVNRLIRYHLGTVAKGSFIITLVKIPRMILMYIHSQLKGKENACARCVLKSCICCLWCLEKCLNYLNQNAYTATAINSTNFCTSAKDAFVILVENALRVATINTVGDFMLFLGKVLIVCSTGLAGIMLLNYQQDYTVWVLPLIIVCLFAFLVAHCFLSIYEMVVDVLFLCFAIDTKYNDGSPGREFYMDKVLMEFVENSRKAMKEAGKGGVADSRELKPMASGASSA

SEQ ID NO: 64679 - protein, 652 aa, Homo sapiens
MGCCSSASSAAQSSKREWKPLEDRSCTDIPWLLLFILFCIGMGFICGFSIATGAAARLVSGYDSYGNICGQKNTKLEAIPNSGMDHTQRKYVFFLDPCNLDLINRKIKSVALCVAACPRQELKTLSDVQKFAEINGSALCSYNLKPSEYTTSPKSSVLCPKLPVPASAPIPFFHRCAPVNISCYAKFAEALITFVSDNSVLHRLISGVMTSKEIILGLCLLSLVLSMILMVIIRYISRVLVWILTILVILGSLGGTGVLWWLYAKQRRSPKETVTPEQLQIAEDNLRALLIYAISATVFTVILFLIMLVMRKRVALTIALFHVAGKVFIHLPLLVFQPFWTFFALVLFWVYWIMTLLFLGTTGSPVQNEQGFVEFKISGPLQYMWWYHVVGLIWISEFILACQQMTVAGAVVTYYFTRDKRNLPFTPILASVNRLIRYHLGTVAKGSFIITLVKIPRMILMYIHSQLKGKENACARCVLKSCICCLWCLEKCLNYLNQNAYTATAINSTNFCTSAKDAFVILVENALRVATINTVGDFMLFLGKVLIVCSTGLAGIMLLNYQQDYTVWVLPLIIVCLFAFLVAHCFLSIYEMVVDVLFLCFAIDTKYNDGSPGREFYMDKVLMEFVENSRKAMKEAGKGGVADSRELKPMIK

SEQ ID NO: 64680 - protein, 654 aa, Homo sapiens
MGCCSSASSAAQSSKREWKPLEDRSCTDIPWLLLFILFCIGMGFICGFSIATGAAARLVSGYDSYGNICGQKNTKLEAIPNSGMDHTQRKYVFFLDPCNLDLINRKIKSVALCVAACPRQELKTLSDVQKFAEINGSALCSYNLKPSEYTTSPKSSVLCPKLPVPASAPIPFFHRCAPVNISCYAKFAEALITFVSDNSVLHRLISGVMTSKEIILGLCLLSLVLSMILMVIIRYISRVLVWILTILVILGSLGGTGVLWWLYAKQRRSPKETVTPEQLQIAEDNLRALLIYAISATVFTVILFLIMLVMRKRVALTIALFHVAGKVFIHLPLLVFQPFWTFFALVLFWVYWIMTLLFLGTTGSPVQNEQGFVEFKISGPLQYMWWYHVVGLIWISEFILACQQMTVAGAVVTYYFTRDKRNLPFTPILASVNRLIRYHLGTVAKGSFIITLVKIPRMILMYIHSQLKGKENACARCVLKSCICCLWCLEKCLNYLNQNAYTATAINSTNFCTSAKDAFVILVENALRVATINTVGDFMLFLGKVLIVCSTGLAGIMLLNYQQDYTVWVLPLIIVCLFAFLVAHCFLSIYEMVVDVLFLCFAIDTKYNDGSPGREFYMDKVLMEFVENSRKAMKEAGKGGVADSRELKPMLKKR

SEQ ID NO: 64681 - protein, 657 aa, Homo sapiens; identical to SEQ ID NO: 64678

SEQ ID NO: 64682 - protein, 706 aa, Homo sapiens
MGDERPHYYGKHGTPQKYDPTFKGPIYNRGCTDIICCVFLLLAIVGYVAVGIIAWTHGDPRKVIYPTDSRGEFCGQKGTKNENKPYLFYFNIVKCASPLVLLEFQCPTPQICVEKCPDRYLTYLNARSSRDFEYYKQFCVPGFKNNKGVAEVLQDGDCPAVLIPSKPLARRCFPAIHAYKGVLMVGNETTYEDGHGSRKNITDLVEGAKKANGVLEARQLAMRIFEDYTVSWYWIIIGLVIAMAMSLLFIILLRFLAGIMVWVMIIMVILVLGYGIFHCYMEYSRLRGEAGSDVSLVDLGFQTDFRVYLHLRQTWLAFMIILSILEVIIILLLIFLRKRILIAIALIKEASRAVGYVMCSLLYPLVTFFLLCLCIAYWASTAVFLSTSNEAVYKIFDDSPCPFTAKTCNPETFPSSNESRQCPNARCQFAFYGGESGYHRALLGLQIFNAFMFFWLANFVLALGQVTLAGAFASYYWALRKPDDLPAFPLFSAFGRALRYHTGSLAFGALILAIVQIIRVILEYLDQRLKAAENKFAKCLMTCLKCCFWCLEKFIKFLNRNAYIMIAIYGTNFCTSARNAFFLLMRNIIRVAVLDKVTDFLFLLGKLLIVGSVGILAFFFFTHRIRIVQDTAPPLNYYWVPILTVIVGSYLIAHGFFSVYGMCVDTLFLCFLEDLERNDGSAERPYFMSSTLKKLLNKTNKKAAES

SEQ ID NO: 64683 - protein, 706 aa, Homo sapiens
MGDERPHYYGKHGTPQKYDPTFKGPIYNRGCTDIICCVFLLLAIVGYVAVGIIAWTHGDPRKVIYPTDSRGEFCGQKGTKNENKPYLFYFNIVKCASPLVLLEFQCPTPQICVEKCPDRYLTYLNARSSRDFEYYKQFCVPGFKNNKGVAEVLQDGDCPAVLIPSKPLARRCFPAIHAYKGVLMVGNETTYEDGHGSRKNITDLVEGAKKANGVLEARQLAMRIFEDYTVSWYWIIIGLVIAMAMSLLFIILLRFLAGIMVWVMIIMVILVLGYGIFHCYMEYSRLRGEAGSDVSLVDLGFQTDFRVYLHLRQTWLAFMIILSILEVIIILLLIFLRKRILIAIALIKEASRAVGYVMCSLLYPLVTFFLLCLCIAYWASTAVFLSTSNEAVYKIFDDSPCPFTAKTCNPETFPSSNESRQCPNARCQFAFYGGESGYHRALLGLQIFNAFMFFWLANFVLALGQVTLAGAFASYYWALRKPDDLPAFPLFSAFGRALRYHTGSLAFGALILAIVQIIRVILEYLDQRLKAAENKFAKCLMTCLKCCFWCLEKFIKFLNRNAYIMIAIYGTNFCTSARNAFFLLMRNIIRVAVLDKVTDFLFLLGKLLIVGSVGILAFFFFTHRIRIVQDTAPPLNYYWVPILTVIVGSYLIAHGFFSVYGMCVDTLFLCFCEDLERNDGSQERPYFMSPELRDILLKGSAEEGKR

SEQ ID NO: 64684 - protein, 704 aa, Homo sapiens
MEDERKNGAYGTPQKYDPTFKGPIYNRGCTDIICCVFLLLAIVGYVAVGIIAWTHGDPRKVIYPTDSRGEFCGQKGTKNENKPYLFYFNIVKCASPLVLLEFQCPTPQICVEKCPDRYLTYLNARSSRDFEYYKQFCVPGFKNNKGVAEVLQDGDCPAVLIPSKPLARRCFPAIHAYKGVLMVGNETTYEDGHGSRKNITDLVEGAKKANGVLEARQLAMRIFEDYTVSWYWIIIGLVIAMAMSLLFIILLRFLAGIMVWVMIIMVILVLGYGIFHCYMEYSRLRGEAGSDVSLVDLGFQTDFRVYLHLRQTWLAFMIILSILEVIIILLLIFLRKRILIAIALIKEASRAVGYVMCSLLYPLVTFFLLCLCIAYWASTAVFLSTSNEAVYKIFDDSPCPFTAKTCNPETFPSSNESRQCPNARCQFAFYGGESGYHRALLGLQIFNAFMFFWLANFVLALGQVTLAGAFASYYWALRKPDDLPAFPLFSAFGRALRYHTGSLAFGALILAIVQIIRVILEYLDQRLKAAENKFAKCLMTCLKCCFWCLEKFIKFLNRNAYIMIAIYGTNFCTSARNAFFLLMRNIIRVAVLDKVTDFLFLLGKLLIVGSVGILAFFFFTHRIRIVQDTAPPLNYYWVPILTVIVGSYLIAHGFFSVYGMCVDTLFLCFLEDLERNDGSAERPYFMSSTLKKLLNKTNKKAAES

SEQ ID NO: 64685 - protein, 710 aa, Homo sapiens
MGGKQRDEDDEAYGKPVKYDPSFRGPIKNRSCTDVICCVLFLLFILGYIVVGIVAWLYGDPRQVLYPRNSTGAYCGMGENKDKPYLLYFNIFSCILSSNIISVAENGLQCPTPQVCVSSCPEDPWTVGKNEFSQTVGEVFYTKNRNFCLPGVPWNMTVITSLQQELCPSFLLPSAPALGRCFPWTNVTPPALPGITNDTTIQQGISGLIDSLNARDISVKIFEDFAQSWYWILVALGVALVLSLLFILLLRLVAGPLVLVLILGVLGVLAYGIYYCWEEYRVLRDKGASISQLGFTTNLSAYQSVQETWLAALIVLAVLEAILLLMLIFLRQRIRIAIALLKEASKAVGQMMSTMFYPLVTFVLLLICIAYWAMTALYLATSGQPQYVLWASNISSPGCEKVPINTSCNPTAHLVNSSCPGLMCVFQGYSSKGLIQRSVFNLQIYGVLGLFWTLNWVLALGQCVLAGAFASFYWAFHKPQDIPTFPLISAFIRTLRYHTGSLAFGALILTLVQIARVILEYIDHKLRGVQNPVARCIMCCFKCCLWCLEKFIKFLNRNAYIMIAIYGKNFCVSAKNAFMLLMRNIVRVVVLDKVTDLLLFFGKLLVVGGVGVLSFFFFSGRIPGLGKDFKSPHLNYYWLPIMTSILGAYVIASGFFSVFGMCVDTLFLCFLEDLERNNGSLDRPYYMSKSLLKILGKKNEAPPDNKKRKK

SEQ ID NO: 64686 - protein, 668 aa, Homo sapiens
MGGKQRDEDDEAYGKPVKYDPSFRGPIKNRSCTDVICCVLFLLFILGYIVVGIVAWLYGDPRQVLYPRNSTGAYCGMGENKDKPYLLYFNIFSCILSSNIISVAENGLQCPTPQTVITSLQQELCPSFLLPSAPALGRCFPWTNVTPPALPGITNDTTIQQGISGLIDSLNARDISVKIFEDFAQSWYWILVALGVALVLSLLFILLLRLVAGPLVLVLILGVLGVLAYGIYYCWEEYRVLRDKGASISQLGFTTNLSAYQSVQETWLAALIVLAVLEAILLLMLIFLRQRIRIAIALLKEASKAVGQMMSTMFYPLVTFVLLLICIAYWAMTALYLATSGQPQYVLWASNISSPGCEKVPINTSCNPTAHLVNSSCPGLMCVFQGYSSKGLIQRSVFNLQIYGVLGLFWTLNWVLALGQCVLAGAFASFYWAFHKPQDIPTFPLISAFIRTLRYHTGSLAFGALILTLVQIARVILEYIDHKLRGVQNPVARCIMCCFKCCLWCLEKFIKFLNRNAYIMIAIYGKNFCVSAKNAFMLLMRNIVRVVVLDKVTDLLLFFGKLLVVGGVGVLSFFFFSGRIPGLGKDFKSPHLNYYWLPIMTSILGAYVIASGFFSVFGMCVDTLFLCFLEDLERNNGSLDRPYYMSKSLLKILGKKNEAPPDNKKRKK

SEQ ID NO: 64687 - protein, 710 aa, Homo sapiens; identical to SEQ ID NO: 64685

SEQ ID NO: 64688 - protein, 411 aa, Homo sapiens
  VARIANT 1: note = MOD_RES - Any amino acid
XRDEDDEAYGKPVKYDPSFRGPIKNRSCTDVICCVLFLLFILGYIVVGIVAWLYGDPRQVLYPRNSTGAYCGMGENKDKPYLLYFNIFSCILSSNIISVAENGLQCPTPQVCVSSCPEDPWTVGKNEFSQTVGEVFYTKNRNFCLPGVPWNMTVITSLQQELCPSFLLPSAPALGRCFPWTNVTPPALPGITNDTTIQQGISGLIDSLNARDISVKIFEDFAQSWYWILVAVGQMMSTMFYPLVTFVLLLICIAYWAMTALYLATSGQPQYVLWASNISSPGCEKVPINTSCNPTAHLVNSSCPGLMCVFQGYSSKGLIQRSVFNLQIYGVLGLFWTLNWVLALGQCVLAGAFASFYWAFHKPQDIPTFPLISAFIRTLRYHTGSLAFGALILTLVQIARVILEYIDHKLR

SEQ ID NO: 64689 - protein, 411 aa, Homo sapiens
  VARIANT 1: note = MOD_RES - Any amino acid
XRDEDDEAYGKPVKYDPSFRGPIKNRSCTDVICCVLFLLFILGYIVVGIVAWLYGDPRQVLYPRNSTGAYCGMGENKDKPYLLYFNIFSCILSSNIISVAENGLQCPTPQVCVSSCPEDPWTVGKNEFSQTVGEVFYTKNRNFCLPGVPWNMTVITSLQQELCPSFLLPSAPALGRCFPWTNITPPALPGITNDTTIQQGISGLIDSLNARDISVKIFEDFAQSWYWILVAVGQMMSTMFYPLVTFVLLLICIAYWAMTALYLATSGQPQYVLWASNISSPGCEKVPINTSCNPTAHLVNSSCPGLMCVFQGYSSKGLIQRSVFNLQIYGVLGLFWTLNWVLALGQCVLAGAFASFYWAFHKPQDIPTFPLISAFIRTLRYHTGSLAFGALILTLVQIARVILEYIDHKLR

SEQ ID NO: 64690 - protein, 710 aa, Homo sapiens [sequence omitted]

SEQ ID NO: 64691 - protein, 710 aa, Homo sapiens [sequence omitted]

SEQ ID NO: 64692 - protein, 710 aa, Homo sapiens; identical to SEQ ID NO: 64685

SEQ ID NO: 64693 - protein, 411 aa, Homo sapiens; identical to SEQ ID NO: 64688
  VARIANT 1: note = MOD_RES - Any amino acid

SEQ ID NO: 64694 - protein, 411 aa, Homo sapiens; identical to SEQ ID NO: 64688
  VARIANT 1: note = MOD_RES - Any amino acid

SEQ ID NO: 64695 - protein, 411 aa, Homo sapiens; identical to SEQ ID NO: 64689
  VARIANT 1: note = MOD_RES - Any amino acid

SEQ ID NO: 64696 - protein, 710 aa, Homo sapiens [sequence omitted]

SEQ ID NO: 64697 - protein, 411 aa, Homo sapiens; identical to SEQ ID NO: 64689
  VARIANT 1: note = MOD_RES - Any amino acid

SEQ ID NO: 64698 - protein, 710 aa, Homo sapiens; identical to SEQ ID NO: 64685

SEQ ID NO: 64699 - protein, 411 aa, Homo sapiens; identical to SEQ ID NO: 64688
  VARIANT 1: note = MOD_RES - Any amino acid

SEQ ID NO: 64700 - protein, 634 aa, Homo sapiens
MGENKDKPYLLYFNIFSCILSSNIISVAENGLQCPTPQVCVSSCPEDPWTVGKNEFSQTVGEVFYTKNRNFCLPGVPWNMTVITSLQQELCPSFLLPSAPALGRCFPWTNVTPPALPGITNDTTIQQGISGLIDSLNARDISVKIFEDFAQSWYWILVALGVALVLSLLFILLLRLVAGPLVLVLILGVLGVLAYGIYYCWEEYRVLRDKGASISQLGFTTNLSAYQSVQETWLAALIVLAVLEAILLLMLIFLRQRIRIAIALLKEASKAVGQMMSTMFYPLVTFVLLLICIAYWAMTALYLATSGQPQYVLWASNISSPGCEKVPINTSCNPTAHLVNSSCPGLMCVFQGYSSKGLIQRSVFNLQIYGVLGLFWTLNWVLALGQCVLAGAFASFYWAFHKPQDIPTFPLISAFIRTLRYHTGSLAFGALILTLVQIARVILEYIDHKLRGVQNPVARCIMCCFKCCLWCLEKFIKFLNRNAYIMIAIYGKNFCVSAKNAFMLLMRNIVRVVVLDKVTDLLLFFGKLLVVGGVGVLSFFFFSGRIPGLGKDFKSPHLNYYWLPIMTSILGAYVIASGFFSVFGMCVDTLFLCFLEDLERNNGSLDRPYYMSKSLLKILGKKNEAPPDNKKRKK

SEQ ID NO: 64701 - protein, 634 aa, Homo sapiens; identical to SEQ ID NO: 64700

SEQ ID NO: 64702 - protein, 634 aa, Homo sapiens
MGENKDKPYLLYFNIFSCILSSNIISVAENGLQCPTPQVCVSSCPEDPWTVGKNEFSQTVGEVFYTKNRNFCLPGVPWNMTVITSLQQELCPSFLLPSAPALGRCFPWTNITPPALPGITNDTTIQQGISGLIDSLNARDISVKIFEDFAQSWYWILVALGVALVLSLLFILLLRLVAGPLVLVLILGVLGVLAYGIYYCWEEYRVLRDKGASISQLGFTTNLSAYQSVQETWLAALIVLAVLEAILLLVLIFLRQRIRIAIALLKEASKAVGQMMSTMFYPLVTFVLLLICIAYWAMTALYLATSGQPQYVLWASNISSPGCEKVPINTSCNPTAHLVNSSCPGLMCVFQGYSSKGLIQRSVFNLQIYGVLGLFWTLNWVLALGQCVLAGAFASFYWAFHKPQDIPTFPLISAFIRTLRYHTGSLAFGALILTLVQIARVILEYIDHKLRGVQNPVARCIMCCFKCCLWCLEKFIKFLNRNAYIMIAIYGKNFCVSAKNAFMLLMRNIVRVVVLDKVTDLLLFFGKLLVVGGVGVLSFFFFSGRIPGLGKDFKSPHLNYYWLPIMTSILGAYVIASGFFSVFGMCVDTLFLCFLEDLERNNGSLDRPYYMSKSLLKILGKKNEAPPDNKKRKK

SEQ ID NO: 64703 - protein, 668 aa, Homo sapiens [sequence omitted]

SEQ ID NO: 64704 - protein, 634 aa, Homo sapiens; identical to SEQ ID NO: 64700

SEQ ID NO: 64705 - protein, 634 aa, Homo sapiens; identical to SEQ ID NO: 64700

SEQ ID NO: 64706 - protein, 668 aa, Homo sapiens; identical to SEQ ID NO: 64686

SEQ ID NO: 64707 - protein, 668 aa, Homo sapiens; identical to SEQ ID NO: 64686

SEQ ID NO: 64708 - protein, 668 aa, Homo sapiens [sequence omitted]

SEQ ID NO: 64709 - protein, 634 aa, Homo sapiens; identical to SEQ ID NO: 64702

SEQ ID NO: 64710 - protein, 668 aa, Homo sapiens; identical to SEQ ID NO: 64686

SEQ ID NO: 64711 - protein, 668 aa, Homo sapiens [sequence omitted]

SEQ ID NO: 64712 - protein, 634 aa, Homo sapiens; identical to SEQ ID NO: 64702

SEQ ID NO: 64713 - protein, 748 aa, Homo sapiens
MIPAASSTPPGDALFPSVAPQDFWRSQVTGYSGSVTRHLSHRANNFKRHPKRRKCIRPSPPPPPNTPCPLELVDFGDLHPQRSFRELLFNGCILFGIEFSYAMETAYVTPVLLQMGLPDQLYSLVWFISPILGFLLQPLLGAWSDRCTSRFGRRRPFILVLAIGALLGLSLLLNGRDIGIALADVTGNHKWGLLLTVCGVVLMDFSADSADNPSHAYMMDVCSPADQDRGLNIHALLAGLGGGFGYVVGGIHWDKTGFGRALGGQLRVIYLFTAVTLSVTTVLTLVSIPERPLRPPSEKRAAMKSPSLPLPPSPPVLPEEGPGDSLPSHTATNFSSPISPPSPLTPKYGSFISRDSSLTGISEFASSFGTANIDSVLIDCFTGGHDSYLAIPGSVPRPPISVSFPRAPDGFYRQDRGLLEGREGALTSGCDGDILRVGSLDTSKPRSSGILKRPQTLAIPDAAGGGGPETSRRRNVTFSQQVANILLNGVKYESELTGSSERAEQPLSVGRLCSTICNMPKALRTLCVNHFLGWLSFEGMLLFYTDFMGEVVFQGDPKAPHTSEAYQKYNSGVTMGCWGMCIYAFSAAFYSAILEKLEEFLSVRTLYFIAYLAFGLGTGLATLSRNLYVVLSLCITYGILFSTLCTLPYSLLCDYYQSKKFAGSSADGTRRGMGVDISLLSCQYFLAQILVSLVLGPLTSAVGSANGVMYFSSLVSFLGCLYSSLFVIYEIPPSDAADEEHRPLLLNV

SEQ ID NO: 64714 - protein, 782 aa, Homo sapiens
MLQQPGPRPGRQQPSGDRDACRLHPQGRPPALPTMIPAASSTPPGDALFPSVAPQDFWRSQVTGYSGSVTRHLSHRANNFKRHPKRRKCIRPSPPPPPNTPCPLELVDFGDLHPQRSFRELLFNGCILFGIEFSYAMETAYVTPVLLQMGLPDQLYSLVWFISPILGFLLQPLLGAWSDRCTSRFGRRRPFILVLAIGALLGLSLLLNGRDIGIALADVTGNHKWGLLLTVCGVVLMDFSADSADNPSHAYMMDVCSPADQDRGLNIHALLAGLGGGFGYVVGGIHWDKTGFGRALGGQLRVIYLFTAVTLSVTTVLTLVSIPERPLRPPSEKRAAMKSPSLPLPPSPPVLPEEGPGDSLPSHTATNFSSPISPPSPLTPKYGSFISRDSSLTGISEFASSFGTANIDSVLIDCFTGGHDSYLAIPGSVPRPPISVSFPRAPDGFYRQDRGLLEGREGALTSGCDGDILRVGSLDTSKPRSSGILKRPQTLAIPDAAGGGGPETSRRRNVTFSQQVANILLNGVKYESELTGSSERAEQPLSVGRLCSTICNMPKALRTLCVNHFLGWLSFEGMLLFYTDFMGEVVFQGDPKAPHTSEAYQKYNSGVTMGCWGMCIYAFSAAFYSAILEKLEEFLSVRTLYFIAYLAFGLGTGLATLSRNLYVVLSLCITYGILFSTLCTLPYSLLCDYYQSKKFAGSSADGTRRGMGVDISLLSCQYFLAQILVSLVLGPLTSAVGSANGVMYFSSLVSFLGCLYSSLFVIYEIPPSDAADEEHRPLLLNV

SEQ ID NO: 64715 - protein, 748 aa, Homo sapiens; identical to SEQ ID NO: 64713

SEQ ID NO: 64716 - protein, 530 aa, Homo sapiens
MGSNSGQAGRHIYKSLADDGPFDSVEPPKRPTSRLIMHSMAMFGREFCYAVEAAYVTPVLLSVGLPSSLYSIVWFLSPILGFLLQPVVGSASDHCRSRWGRRRPYILTLGVMMLVGMALYLNGATVVAALIANPRRKLVWAISVTMIGVVLFDFAADFIDGPIKAYLFDVCSHQDKEKGLHYHALFTGFGGALGYLLGAIDWAHLELGRLLGTEFQVMFFFSALVLTLCFTVHLCSISEAPLTEVAKGIPPQQTPQDPPLSSDGMYEYGSIEKVKNGYVNPELAMQGAKNKNHAEQTRRAMTLKSLLRALVNMPPHYRYLCISHLIGWTAFLSNMLFFTDFMGQIVYRGDPYSAHNSTEFLIYERGVEVGCWGLCINSVFSSLYSYFQKVLVSYIGLKGLYFTGYLLFGLGTGFIGLFPNVYSTLVLCSLFGVMSSTLYTVPFNLITEYHREEEKERQQAPGGDPDNSVRGKGMDCATLTCMVQLAQILVGGGLGFLVNTAGTVVVVVITASAVALIGCCFVALFVRYVD

SEQ ID NO: 64717 - protein, 471 aa, Homo sapiens
MGSNSGQAGRHIYKSLADDGPFDSVEPPKRPTSRLIMHSMAMFGREFCYAVEAAYVTPVLLSVGLPSSLYSIVWFLSPILGFLLQPVVGSASDHCRSRWGRRRPYILTLGVMMLVGMALYLNGATVVAGFGGALGYLLGAIDWAHLELGRLLGTEFQVMFFFSALVLTLCFTVHLCSISEAPLTEVAKGIPPQQTPQDPPLSSDGMYEYGSIEKVKNGYVNPELAMQGAKNKNHAEQTRRAMTLKSLLRALVNMPPHYRYLCISHLIGWTAFLSNMLFFTDFMGQIVYRGDPYSAHNSTEFLIYERGVEVGCWGLCINSVFSSLYSYFQKVLVSYIGLKGLYFTGYLLFGLGTGFIGLFPNVYSTLVLCSLFGVMSSTLYTVPFNLITEYHREEEKERQQAPGGDPDNSVRGKGMDCATLTCMVQLAQILVGGGLGFLVNTAGTVVVVVITASAVALIGCCFVALFVRYVD

SEQ ID NO: 64718 - protein, 298 aa, Homo sapiens
MGSNSGQAGRHIYKSLADDGPFDSVEPPKRPTSRLIMHSMAMFGREFCYAVEAAYVTPVLLSVGLPSSLYSIVWFLSPILGFLLQPVVGSASDHCRSRWGRRRPYILTLGVMMLVGMALYLNGATVVAALIANPRRKLVWAISVTMIGVVLFDFAADFIDGPIKAYLFDVCSHQDKEKGLHYHALFTGTRRAMTLKSLLRALVNMPPHYRYLCISHLIGWTAFLSNMLFFTDFMGQIVYRGDPYSAHNSTEFLIYERGVEVGCWGLCINSVFSSLYSCKSFSLLRMSSKSFWSSTTWI

SEQ ID NO: 64719 - protein, 460 aa, Homo sapiens
MGSNSGQAGRHIYKSLADDGPFDSVEPPKRPTSRLIMHSMAMFGREFCYAVEAAYVTPVLLSVGLPSSLYSIVWFLSPILGFLLQPVVGSASDHCRSRWGRRRPYILTLGVMMLVGMALYLNGATVVAALIANPRRKLVWAISVTMIGVVLFDFAADFIDGPIKAYLFDVCSHQDKEKGLHYHALFTGFGGALGYLLGAIDWAHLELGRLLGTEFQVMFFFSALVLTLCFTVHLCSISEAPLTEVAKGIPPQQTPQDPPLSSDGMYEYGSIEKVKNGYVNPELAMQGAKNKNHAEQTRRAMTLKSLLRALVNMPPHYRYLCISHLIGWTAFLSNMLFFTDFMGQIVYRGDPYSAHNSTEFLIYERGVEVGCWGLCINSVFSSLYSYFQKVLVSYIGLKGLYFTGYLLFGLGTGFIGLFPNVYSTLVLCSLFGVMSSTLYTVPFNLITEYHREEEKEVCCH

SEQ ID NO: 64720 - protein, 243 aa, Homo sapiens
MGSNSGQAGRHIYKSLADDGPFDSVEPPKRPTSRLIMHSMAMFGREFCYAVEAAYVTPVLLSVGLPSSLYSIVWFLSPILGFLLQPVVGSASDHCRSRWGRRRPYILTLGVMMLVGMALYLNGATVVAALIANPRRKLVWAISVTMIGVVLFDFAADFIDGPIKAYLFDVCSHQDKEKGLHYHALFTDSQGNDIKVTAESTGEHASSLPLPLHQPPHWMDSLPVQHAVLHRFHGPDCVPRGSL

SEQ ID NO: 64721 - protein, 246 aa, Homo sapiens
MALYLNGATVVAGFGGALGYLLGAIDWAHLELGRLLGTEFQVMFFFSALVLTLCFTVHLCSISEAPLTEVAKGIPPQQTPQDPPLSSDGMYEYGSIEKVKNGYVNPELAMQGAKNKNHAEQTRRAMTLKSLLRALVNMPPHYRYLCISHLIGWTAFLSNMLFFTDFMGQIVYRGDPYSAHNSTEFLIYERGVEVGCWGLCINSVFSSLYSYFQKVLVSYIGLKGLYFTGYLLFGLGTGFIGLFPNV

SEQ ID NO: 64722 - protein, 553 aa, Homo sapiens
MVQRLWVSRLLRHRKAQLLLVNLLTFGLEVCLAAGITYVPPLLLEVGVEEKFMTMVLGIGPVLGLVCVPLLGSASDHWRGRYGRRRPFIWALSLGILLSLFLIPRAGWLAGLLCPDPRPLELALLILGVGLLDFCGQVCFTPLEALLSDLFRDPDHCRQAYSVYAFMISLGGCLGYLLPAIDWDTSALAPYLGTQEECLFGLLTLIFLTCVAATLLVAEEAALGPTEPAEGLSAPSLSPHCCPCRARLAFRNLGALLPRLHQLCCRMPRTLRRLFVAELCSWMALMTFTLFYTDFVGEGLYQGVPRAEPGTEARRHYDEGVRMGSLGLFLQCAISLVFSLVMDRLVQRFGTRAVYLASVAAFPVAAGATCLSHSVAVVTASAALTGFTFSALQILPYTLASLYHREKQVFLPKYRGDTGGASSEDSLMTSFLPGPKPGAPFPNGHVGAGGSGLLPPPPALCGASACDVSVRVVVGEPTEARVVPGRGICLDLAILDSAFLLSQVAPSLFMGSIVQLSQSVTAYMVSAAGLGLVAIYFATQVVFDKSDLAKYSA

SEQ ID NO: 64723 - protein, 430 aa, Homo sapiens
MEGSASPPEKPRARPAAAVLCRGPVEPLVFLANFALVLQGPLTTQYLWHRFSADLGYNGTRQRGGCSNRSADPTMQEVETLTSHWTLYMNVGGFLVGLFSSTLLGAWSDSVGRRPLLVLASLGLLLQALVSVFVVQLQLHVGYFVLGRILCALLGDFGGLLAASFASVADVSSSRSRTFRMALLEASIGVAGMLASLLGGHWLRAQGYANPFWLALALLIAMTLYAAFCFGETLKEPKSTRLFTFRHHRSIVQLYVAPAPEKSRKHLALYSLAIFVVITVHFGAQDILTLYELSTPLCWDSKLIGYGSAAQHLPYLTSLLALKLLQYCLADAWVAEIGLAFNILGMVVFAFATITPLMFTGALFSAVACVNSLAMLTASGFNSLYPATLNFMKGFPFLLGAGLLLIPAVLIGMLEKADPHLEFQQFPQSP

SEQ ID NO: 64724 - protein, 459 aa, Homo sapiens
MEGSASPPEKPRARPAAAVLCRGPVEPLVFLANFALVLQGPLTTQYLWHRFSADLGYNGTRQRGGCSNRSADPTMQEVETLTSHWTLYMNVGGFLVGLFSSTLLGAWSDSVGRRPLLVLASLGLLLQALVSVFVVQLQLHVGYFVLGRILCALLGDFGGLLAASFASVADVSSSRSRTFRMALLEASIGVAGMLASLLGGHWLRAQGYANPFWLALALLIAMTLYAAFCFGETLKEPKSTRLFTFRHHRSIVQLYVAPAPEKSRKHLALYSLAIFVVITVHFGAQDILTLYELSTPLCWDSKLIGYGSAAQHLPYLTSLLALKLLQYCLADAWVAEIGLAFNILGMVVFAFATITPLMFTGYGLLFLSLVITPVIRAKLSKLVRETEQGALFSAVACVNSLAMLTASGIFNSLYPATLNFMKGFPFLLGAGLLLIPAVLIGMLEKADPHLEFQQFPQSP

SEQ ID NO: 64725 - protein, 475 aa, Homo sapiens
MSPEVTCPRRGHLPRFHPRTWVEPVVASSQVAASLYDAGLLLVVKASYGTGGSSNHSASPSPRGALEDQQQRAISNFYIIYNLVVGLSPLLSAYGLGWLSDRYHRKISICMSLLGFLLSRLGLLLKVLLDWPVEVLYGAAALNGLFGGFSAFWSGVMALGSLGSSEGRRSVRLILIDLMLGLAGFCGSMASGHLFKQMAGHSGQGLILTACSVSCASFALLYSLLVLKVPESVAKPSQELPAVDTVSGTVGTYRTLDPDQLDQQYAVGHPPSPGKAKPHKTTIALLFVGAIIYDLAVVGTVDVIPLFVLREPLGWNQVQVGYGMAAGYTIFITSFLGVLVFSRCFRDTTMIMIGMVSFGSGALLLAFVKETYMFYIARAVMLFALIPVTTIRSAMSKLIKGSSYGKVFVILQLSLALTGVVTSTLYNKIYQLTMDMFVGSCFALSSFLSFLAIIPISIVAYKQVPLSPYGDIIEK

SEQ ID NO: 64726 - protein, 570 aa, Homo sapiens
MEAPEEPAPVRGGPEATLEVRGSRCLRLSAFREELRALLVLAGPAFLVQLMVFLISFISSVFCGHLGKLELDAVTLAIAVINVTGVSVGFGLSSACDTLISQTYGSQNLKHVGVILQRSALVLLLCCFPCWALFLNTQHILLLFRQDPDVSRLTQTYVTIFIPALPATFLYMLQVKYLLNQGIVLPQIVTGVAANLVNALANYLFLHQLHLGVIGSALANLISQYTLALLLFLYILGKKLHQATWGGWSLECLQDWASFLRLAIPSMLMLCMEWWAYEVGSFLSGILGMVELGAQSIVYELAIIVYMVPAGFSVAASVRVGNALGAGDMEQARKSSTVSLLITVLFAVAFSVLLLSCKDHVGYIFTTDRDIINLVAQVVPIYAVSHLFEALACTSGGVLRGSGNQKVGAIVNTIGYYVVGLPIGIALMFATTLGVMGLWSGIIICTVFQAVCFLGFIIQLNWKKACQQAQVHANLKVNNVPRSGNSALPQDPLHPGCPENLEGILTNDVGKTGEPQSDQQMRQEEPLPEHPQDGAKLSRKQLVLRRGLLLLGVFLILLVGILVRFYVRIQ

SEQ ID NO: 64727 - protein, 586 aa, Homo sapiens
MEAPEEPAPVRGGPEATLEVRGSRCLRLSAFREELRALLVLAGPAFLVQLMVFLISFISSVFCGHLGKLELDAVTLAIAVINVTGVSVGFGLSSACDTLISQTYGSQNLKHVGVILQRSALVLLLCCFPCWALFLNTQHILLLFRQDPDVSRLTQTYVTIFIPALPATFLYMLQVKYLLNQGIVLPQIVTGVAANLVNALANYLFLHQLHLGVIGSALANLISQYTLALLLFLYILGKKLHQATWGGWSLECLQDWASFLRLAIPSMLMLCMEWWAYEVGSFLSGILGMVELGAQSIVYELAIIVYMVPAGFSVAASVRVGNALGAGDMEQARKSSTVSLLITVLFAVAFSVLLLSCKDHVGYIFTTDRDIINLVAQVVPIYAVSHLFEALACTSGGVLRGSGNQKVGAIVNTIGYYVVGLPIGIALMFATTLGVMGLWSGIIICTVFQAVCFLGFIIQLNWKKACQQAQVHANLKVNNVPRSGNSALPQDPLHPGCPENLEGILTNDVGKTGEPQSDQQMRQEEPLPEHPQDGAKLSRKQLVLRRGLLLLGVFLILLAGVRWCDHSSLQPRTLGLQAILLCQPPE

SEQ ID NO: 64728 - protein, 282 aa, Homo sapiens
MVELGAQSIVYELAIIVYMVPAGFSVAASVRVGNALGAGDMEQARKSSTVSLLITVLFAVAFSVLLLSCKDHVGYIFTTDRDIINLVAQVVPIYAVSHLFEALACTSGGVLRGSGNQKVGAIVNTIGYYVVGLPIGIALMFATTLGVMGLWSGIIICTVFQAVCFLGFIIQLNWKKACQQAQVHANLKVNNVPRSGNSALPQDPLHPGCPENLEGILTNDVGKTGEPQSDQQMRQEEPLPEHPQDGAKLSRKQLVLRRGLLLLGVFLILLVGILVRFYVRIQ

SEQ ID NO: 64729 - protein, 443 aa, Homo sapiens
MEAPEEPAPVRGGPEATLEVRGSRCLRLSAFREELRALLVLAGPAFLVQLMVFLISFISSVFCGHLGKLELDAVTLAIATYGSQNLKHVGVILQRSALVLLLCCFPCWALFLNTQHILLLFRQDPDVSRLTQTYVTIFIPALPATFLYMLQVKYLLNQGIVLPQIVTGVAANLVNALANYLFLHQLHLGVIGSALANLISQYTLALLLFLYILGKKLHQATWGGWSLECLQDWASFLRLAIPSMLMLCMEWWAYEVGSFLSGILGMVELGAQSIVYELAIIVYMVPAGFSVAASVRVGNALGAGDMEQARKSSTVSLLITVLFAVAFSVLLLSCKDHVGYIFTTDRDIINLVAQVVPIYAVSHLFEALACTSGGVLRGSGNQKVGAIVNTIGYYVVGLPIGIALMFATTLGVMGSGTRQFESKQRASEWEFCSPSGSASPRVP

SEQ ID NO: 64730 - protein, 245 aa, Homo sapiens
MLMLCMEWWAYEVGSFLSGILGMVELGAQSIVYELAIIVYMVPAGFSVAASVRVGNALGAGDMEQARKSSTVSLLITVLFAVAFSVLLLSCKDHVGYIFTTDRDIINLVAQVVPIYAVSHLFEALACTSGGVLRGSGNQKVGAIVNTIGYYVVGLPIGIALMFATTLGVMGCPENLEGILTNDVGKTGEPQSDQQMRQEEPLPEHPQDGAKLSRKQLVLRRGLLLLGVFLILLVGILVRFYVRIQ

SEQ ID NO: 64731 - protein, 586 aa, Homo sapiens; identical to SEQ ID NO: 64727

SEQ ID NO: 64732 - protein, 244 aa, Homo sapiens
MEAPEEPAPVRGGPEATLEVRGSRCLRLSAFREELRALLVLAGPAFLVQLMVFLISFISSVFCGHLGKLELDAVTLAIAVINVTGVSVGFGLSSACDTLISQTYGSQNLKHVGVILQRSALVLLLCCFPCWALFLNTQHILLLFRQDPDVSRLTQTYVTIFIPALPATFLYMLQVKYLLNQRLCTGKLDFPVHPGSTPLSLHPREKTASSYMGRLVPRVPAGLGLLPPPGHPQHAHAVHGVVGL

SEQ ID NO: 64733 - protein, 602 aa, Homo sapiens
MDSLQDTVALDHGGCCPALSRLVPRGFGTEMWTLFALSGPLFLFQVLTFMIYIVSTVFCGHLGKVELASVTLAVAFVNVCGVSVGVGLSSACDTLMSQSFGSPNKKHVGVILQRGALVLLLCCLPCWALFLNTQHILLLFRQDPDVSRLTQDYVMIFIPGLPVIFLYNLLAKYLQNQGWLKGQEEESPFQTPGLSILHPSHSHLSRASFHLFQKITWPQVLSGVVGNCVNGVANYALVSVLNLGVRGSAYANIISQFAQTVFLLLYIVLKKLHLETWAGWSSQCLQDWGPFFSLAVPSMLMICVEWWAYEIGSFLMGLLSVVDLSAQAVIYEVATVTYMIPLGLSIGVCVRVGMALGAADTVQAKRSAVSGVLSIVGISLVLGTLISILKNQLGHIFTNDEDVIALVSQVLPVYSVFHVFEAICCVYGGVLRGTGKQAFGAAVNAITYYIIGLPLGILLTFVVRMRIMGLWLGMLACVFLATAAFVAYTARLDWKLAAEEAKKHSGRQQQQRAESTATRPGPEKAVLSSVATGSSPGITLTTYSRSECHVDFFRTPEEAHALSAPTSRLSVKQLVIRRGAALGAASATLMVGLTVRILATRH

SEQ ID NO: 64734 - protein, 580 aa, Homo sapiens
MDSLQDTVALDHGGCCPALSRLVPRGFGTEMWTLFALSGPLFLFQVLTFMIYIVSTVFCGHLGKVELASVTLAVAFVNVCGVSVGVGLSSACDTLMSQSFGSPNKKHVGVILQRGALVLLLCCLPCWALFLNTQHILLLFRQDPDVSRLTQDYVMIFIPGLPVIFLYNLLAKYLQNQKITWPQVLSGVVGNCVNGVANYALVSVLNLGVRGSAYANIISQFAQTVFLLLYIVLKKLHLETWAGWSSQCLQDWGPFFSLAVPSMLMICVEWWAYEIGSFLMGLLSVVDLSAQAVIYEVATVTYMRHSHRLAYAAHVTRIPLGLSIGVCVRVGMALGAADTVQAKRSAVSGVLSIVGISLVLGTLISILKNQLGHIFTNDEDVIALVSQVLPVYSVFHVFEAICCVYGGVLRGTGKQAFGAAVNAITYYIIGLPLGILLTFVVRMRIMGLWLGMLACVFLATAAFVAYTARLDWKLAAEEAKKHSGRQQQQRAESTATRPGPEKAVLSSVATGSSPGITLTTYSRSECHVDFFRTPEEAHALSAPTSRLSVKQLVIRRGAALGAASATLMVGLTVRILATRH

SEQ ID NO: 64735 - protein, 363 aa, Homo sapiens
MDSLQDTVALDHGGCCPALSRLVPRGFGTEMWTLFALSGPLFLFQVLTFMIYIVSTVFCGHLGKVELASVTLAVAFVNVCGVSVGVGLSSACDTLMSQSFGSPNKKHVGVILQRGALVLLLCCLPCWALFLNTQHILLLFRQDPDVSRLTQDYVMIFIPGLPVIFLYNLLAKYLQNQKITWPQVLSGVVGNCVNGVANYALVSVLNLGVRGSAYANIISQFAQTVFLLLYIVLKKLHLETWAGWSSQCLQDWGPFFSLAVPSMLMICVEWWAYEIGSFLMGLLSVVDLSAQAVIYEVATVTYMIPLGLSIGVCVRVGMALGAADTVQAKRSAVSGVLSIVGISLVLGTLISILKNQLGHIFTN

SEQ ID NO: 64736 - protein, 296 aa, Homo sapiens
MIYIVSTVFCGHLGKVELASVTLAVAFVNVCGVSVGVGLSSACDTLMSQSFGSPNKKHVGVILQRGALVLLLCCLPCWALFLNTQHILLLFRQDPDVSRLTQDYVMIFIPGLPVIFLYNLLAKYLQNQKITWPQVLSGVVGNCVNGVANYALVSVLNLGVRGSAYANIISQFAQTVFLLLYIVLKKLHLETWAGWSSQCLQDWGPFFSLAVPSMLMICVEWWAYEIGSFLMGLLSVVDLSAQAVIYEVATVTYMIPLGLSIGVCVRVGMALGAADTVQAKRSAVSGVLSIARSDPW

SEQ ID NO: 64737 - protein, 643 aa, Homo sapiens
MEAVETGERPTFGAWDYGVFALMLLVSTGIGLWVGLARGGQRSAEDFFTGGRRLAALPVGLSLSASFMSAVQVLGVPSEAYRYGLKFLWMCLGQLLNSVLTALLFMPVFYRLGLTSTYEYLEMRFSRAVRLCGTLQYIVATMLYTGIVIYAPALILNQVTGLDIWASLLSTGIICTFYTAVGGMKAVVWTDVFQVVVMLSGFWVVLARGVMLVGGPRQVLTLAQNHSRINLMDFNPDPRSRYTFWTFVVGGTLVWLSMYGVNQAQVQRYVACRTEKQAKLALLINQVGLFLIVSSAACCGIVMFVFYTDCDPLLLGRISAPDQYMPLLVLDIFEDLPGVPGLFLACAYSGTLSTASTSINAMAAVTVEDLIKPRLRSLAPRKLVIISKGLSLIYGSACLTVAALSSLLGGGVLQGSFTVMGVISGPLLGAFILGMFLPACNTPGVLAGLGAGLALSLWVALGATLYPPSEQTMRVLPSSAARCVALSVNASGLLDPALLPANDSSRAPSSGMDASRPALADSFYAISYLYYGALGTLTTVLCGALISCLTGPTKRSTLAPGLLWWDLARQTASVAPKEEVAILDDNLVKGPEELPTGNKKPPGFLPTNEDRLFFLGQKELEGAGSWTPCVGHDGGRDQQETNL

SEQ ID NO: 64738 - protein, 664 aa, Homo sapiens
MDSSTWSPKTTAVTRPVETHELIRNAADISIIVIYFVVVMAVGLWAMFSTNRGTVGGFFLAGRSMVWWPIGASLFASNIGSGHFVGLAGTGAASGIAIGGFEWNALVLVVVLGWLFVPIYIKAGVVTMPEYLRKRFGGQRIQVYLSLLSLLLYIFTKISADIFSGAIFINLALGLNLYLAIFLLLAITALYTITGGLAAVIYTDTLQTVIMLVGSLILTGFAFHEVGGYDAFMEKYMKAIPTIVSDGNTTFQEKCYTPRADSFHIFRDPLTGDLPWPGFIFGMSILTLWYWCTDQVIVQRCLSAKNMSHVKGGCILCGYLKLMPMFIMVMPGMISRILYTEKIACVVPSECEKYCGTKVGCTNIAYPTLVVELMPNGLRGLMLSVMLASLMSSLTSIFNSASTLFTMDIYAKVRKRASEKELMIAGRLFILVLIGISIAWVPIVQSAQSGQLFDYIQSITSYLGPPIAAVFLLAIFWKRVNEPGAFWGLILGLLIGISRMITEFAYGTGSCMEPSNCPTIICGVHYLYFAIILFAISFITIVVISLLTKPIPDVHLYRLCWSLRNSKEERIDLDAEEENIQEGPKETIEIETQVPEKKKGIFRRAYDLFCGLEQHGAPKMTEEEEKAMKMKMTDTSEKPLWRTVLNVNGIILVTVAVFCHAYFA

SEQ ID NO: 64739 - protein, 537 aa, Homo sapiens
MPEYLRKRFGGQRIQVYLSLLSLLLYIFTKISADIFSGAIFINLALGLNLYLAIFLLLAITALYTITGGLAAVIYTDTLQTVIMLVGSLILTGFAFHEVGGYDAFMEKYMKAIPTIVSDGNTTFQEKCYTPRADSFHIFRDPLTGDLPWPGFIFGMSILTLWYWCTDQVIVQRCLSAKNMSHVKGGCILCGYLKLMPMFIMVMPGMISRILYTEKIACVVPSECEKYCGTKVGCTNIAYPTLVVELMPNGLRGLMLSVMLASLMSSLTSIFNSASTLFTMDIYAKVRKRASEKELMIAGRLFILVLIGISIAWVPIVQSAQSGQLFDYIQSITSYLGPPIAAVFLLAIFWKRVNEPGAFWGLILGLLIGISRMITEFAYGTGSCMEPSNCPTIICGVHYLYFAIILFAISFITIVVISLLTKPIPDVHLYRLCWSLRNSKEERIDLDAEEENIQEGPKETIEIETQVPEKKKGIFRRAYDLFCGLEQHGAPKMTEEEEKAMKMKMTDTSEKPLWRTVLNVNGIILVTVAVFCHAYFA

SEQ ID NO: 64740 - protein, 396 aa, Homo sapiens
MEVKNFAVWDYVVFAALFFISSGIGVFFAIKERKKATSREFLVGGRQMSFGPVGLSLTASFMSAVTVLGTPSEVYRFGASFLVFFIAYLFVILLTSELFLPVFYRSGITSTYEYLQLRFNKPVRYAATVIYIVQTILYTGVVVYAPALALNQVTGFDLWGSVFATGIVCTFYCTLGGLKAVVWTDAFQMVVMIVGFLTVLIQGSTHAGGFHNVLEQSTNGSRLHIFDFDVDPLRRHTFWTITVGGTFTWLGIYGVNQSTIQRCISCKTEKHAKLALYFNLLGLWIILVCAVFSGLIMYSHFKDCDPWTSGIISAPDQLMPYFVMEIFATMPGLPGLFVACAFSGTLSTVASSINALATVTFEDFVKSCFPHLSDKLSTWISKGLCRYSWWTFYSIS

SEQ ID NO: 64741 - protein, 618 aa, Homo sapiens
MEVKNFAVWDYVVFAALFFISSGIGVFFAIKERKKATSREFLVGGRQMSFGPVGLSLTASFMSAVTVLGTPSEVYRFGASFLVFFIAYLFVILLTSELFLPVFYRSGITSTYEYLQLRFNKPVRYAATVIYIVQTILYTGVVVYAPALALNQVTGFDLWGSVFATGIVCTFYCTLGGLKAVVWTDAFQMVVMIVGFLTVLIQGSTHAGGFHNVLEQSTNGSRLHIFDFDVDPLRRHTFWTITVGGTFTWLGIYGVNQSTIQRCISCKTEKHAKLALYFNLLGLWIILVCAVFSGLIMYSHFKDCDPWTSGIISAPDQLMPYFVMEIFATMPGLPGLFVACAFSGTLSTVASSINALATVTFEDFVKSCFPHLSDKLSTWISKGLCLLFGVMCTSMAVAASVMGGVVQASLSIHGMCGGPMLGLFSLGIVFPFVNWKGALGGLLTGITLSFWVAIGAFIYPAPASKTWPLPLSTDQCIKSNVTATGPPVLSSRPGIADTWYSISYLYYSAVGCLGCIVAGVIISLITGRQRGEDIQPLLIRPVCNLFCFWSKKYKTLCWCGVQHDSGTEQENLENGSARKQGAESVLQNGLRRESLVHVPGYDPKDKSYNNMAFETTHF

SEQ ID NO: 64742 - protein, 277 aa, Homo sapiens
MVVMIVGFLTVLIQGSTHAGGFHNVLEQSTNGSRLHIFDFDVDPLRRHTFWTITVGGTFTWLGIYGVNQSTIQRCISCKTEKHAKLALYFNLLGLWIILVCAVFSGLIMYSHFKDCDPWTSGIISAPDQLMPYFVMEIFATMPGLPGLFVACAFSGTLSTVASSINALATVTFEDFVKSCFPHLSDKLSTWISKGLCRSLIWRDVYLYGCGCICHGRCCAGFPQHSRHVWRTNAGLILPGNRVPFCELEGCTRRSSYWNHLVILGGHWGLHLPCTSL

SEQ ID NO: 64743 - protein, 672 aa, Homo sapiens
MEEHTEAGSAPEMGAQKALIDNPADILVIAAYFLLVIGVGLWSMCRTNRGTVGGYFLAGRSMVWWPVGASLFASNIGSGHFVGLAGTGAASGLAVAGFEWNALFVVLLLGWLFAPVYLTAGVITMPQYLRKRFGGRRIRLYLSVLSLFLYIFTKISVDMFSGAVFIQQALGWNIYASVIALLGITMIYTVTGGLAALMYTDTVQTFVILGGACILMGYAFHEVGGYSGLFDKYLGAATSLTVSEDPAVGNISSFCYRPRPDSYHLLRHPVTGDLPWPALLLGLTIVSGWYWCSDQVIVQRCLAGKSLTHIKAGCILCGYLKLTPMFLMVMPGMISRILYPDEVACVVPEVCRRVCGTEVGCSNIAYPRLVVKLMPNGLRGLMLAVMLAALMSSLASIFNSSSTLFTMDIYTRLRPRAGDRELLLVGRLWVVFIVVVSVAWLPVVQAAQGGQLFDYIQAVSSYLAPPVSAVFVLALFVPRVNEQGAFWGLIGGLLMGLARLIPEFSFGSGSCVQPSACPAFLCGVHYLYFAIVLFFCSGLLTLTVSLCTAPIPRKHLHRLVFSLRHSKEEREDLDADEQQGSSLPVQNGCPESAMEMNEPQAPAPSLFRQCLLWFCGMSRGGVGSPPPLTQEEAAAAARRLEDISEDPSWARVVNLNALLMMAVAVFLWGFYA

SEQ ID NO: 64744 - protein, 458 aa, Homo sapiens
MEEHTEAGSAPEMGAQKALIDNPADILVIAAYFLLVIGVGLWSMCRTNRGTVGGYFLAGRSMVWWPVGASLFASNIGSGHFVGLAGTGAASGLAVAGFEWNALFVVLLLGWLFAPVYLTAGVITMPQYLRKRFGGRRIRLYLSVLSLFLYIFTKISVDMFSGAVFIQQALGWNIYASVIALLGITMIYTVTGGLAALMYTDTVQTFVILGGACILMGYAFHEVGGYSGLFDKYLGAATSLTVSEDPAVGNISSFCYRPRPDSYHLLRHPVTGDLPWPALLLGLTIVSGWYWCSDQVIVQRCLAGKSLTHIKAGCILCGYLKLTPMFLMVMPGMISRILYPDEVACVVPEVCRRVCGTEVGCSNIAYPRLVVKLMPNGRLLGTHRGPADGPGTPDSRVLLRLGQLCAALGVPSFPLRRALPLLRHCAVLLLWPPHPHGLPVHRAHPQKAPPPPGLQSPA

SEQ ID NO: 64745 - protein, 718 aa, Homo sapiens
MRAVLDTADIAIVALYFILVMCIGFFAMWKSNRSTVSGYFLAGRSMTWVTIGASLFVSNIGSEHFIGLAGSGAASGFAVGAWEFNALLLLQLLGWVFIPIYIRSGVYTMPEYLSKRFGGHRIQVYFAALSLILYIFTKLSVDLYSGALFIQESLGWNLYVSVILLIGMTALLTVTGGLVAVIYTDTLQALLMIIGALTLMIISIMEIGGFEEVKRRYMLASPDVTSILLTYNLSNTNSCNVSPKKEALKMLRNPTDEDVPWPGFILGQTPASVWYWCADQVIVQRVLAAKNIAHAKGSTLMAGFLKLLPMFIIVVPGMISRILFTDDIACINPEHCMLVCGSRAGCSNIAYPRLVMKLVPVGLRGLMMAVMIAALMSDLDSIFNSASTIFTLDVYKLIRKSASSRELMIVGRIFVAFMVVISIAWVPIIVEMQGGQMYLYIQEVADYLTPPVAALFLLAIFWKRCNEQGAFYGGMAGFVLGAVRLILAFAYRAPECDQPDNRPGFIKDIHYMYVATGLFWVTGLITVIVSLLTPPPTKEQIRTTTFWSKKNLVVKENCSPKEEPYQMQEKSILRCSENNETINHIIPNGKSEDSIKGLQPEDVNLLVTCREEGNPVASLGHSEAETPVDAYSNGQAALMGEKERKKETDDGGRYWKFIDWFCGFKSKSLSKRSLRDLMEEEAVCLQMLEETRQVKVILNIGLFAVCSLGIFMFVYFSL

SEQ ID NO: 64746 - protein, 167 aa, Homo sapiens
MEAGGFLDSLIYGACVVFTLGMFSAGLSDLRHMRMTRSVDNVQFLPFLTTEVNNLGWLSYGALKGDGILIVVNTVGAALQTLYILAYLHYCPRKAKVIQTKSTQCLSYPLTIATLLTSASWCLYGFRLRDPYIMVSNFPGIVTSFIRFWLFWKYPQEQDRNYWLLQT

SEQ ID NO: 64747 - protein, 166 aa, Homo sapiens
MRGLHPWHVLRRPLGPQAHANDPECGQRPVPALSHHGSQRVVLLQTATLLGVLLLGYGYFWLLVPNPEARLQQLGLFCSVFTISMYLSPLADLAKVIQTKSTQCLSYPLTIATLLTSASWCLYGFRLRDPYIMVSNFPGIVTSFIRFWLFWKYPQEQDRNYWLLQT

SEQ ID NO: 64748 - protein, 221 aa, Homo sapiens
MEAGGFLDSLIYGACVVFTLGMFSAGLSDLRHMRMTRSVDNVQFLPFLTTEVNNLGWLSYGALKGDGILIVVNTVGAALQTLYILAYLHYCPRKRVVLLQTATLLGVLLLGYGYFWLLVPNPEARLQQLGLFCSVFTISMYLSPLADLAKVIQTKSTQCLSYPLTIATLLTSASWCLYGFRLRDPYIMVSNFPGIVTSFIRFWLFWKYPQEQDRNYWLLQT

SEQ ID NO: 64749 - protein, 156 aa, Homo sapiens
MEELGPQAHANDPECGQRPVPALSHHGSQRVVLLQTATLLGVLLLGYGYFWLLVPNPEARLQQLGLFCSVFTISMYLSPLADLAKVIQTKSTQCLSYPLTIATLLTSASWCLYGFRLRDPYIMVSNFPGIVTSFIRFWLFWKYPQEQDRNYWLLQT

SEQ ID NO: 64750 - protein, 642 aa, Homo sapiens
MDKLKCPSFFKCREKEKVSASSENFHVGENDENQDRGNWSKKSDYLLSMIGYAVGLGNVWRFPYLTYSNGGGAFLIPYAIMLALAGLPLFFLECSLGQFASLGPVSVWRILPLFQGVGITMVLISIFVTIYYNVIIAYSLYYMFASFQSELPWKNCSSWSDKNCSRSPIVTHCNVSTVNKGIQEIIQMNKSWVDINNFTCINGSEIYQPGQLPSEQYWNKVALQRSSGMNETGVIVWYLALCLLLAWLIVGAALFKGIKSSGKVVYFTALFPYVVLLILLVRGATLEGASKGISYYIGAQSNFTKLKEAEVWKDAATQIFYSLSVAWGGLVALSSYNKFKNNCFSDAIVVCLTNCLTSVFAGFAIFSILGHMAHISGKEVSQVVKSGFDLAFIAYPEALAQLPGGPFWSILFFFMLLTLGLDSQFASIETITTTIQDLFPKVMKKMRVPITLGCCLVLFLLGLVCVTQAGIYWVHLIDHFCAGWGILIAAILELVGIIWIYGGNRFIEDTEMMIGAKRWIFWLWWRACWFVITPILLIAIFIWSLVQFHRPNYGAIPYPDWGVALGWCMIVFCIIWIPIMAIIKIIQAKGNIFQRLISCCRPASNWGPYLEQHRGERYKDMVDPKKEADHEIPTVSGSRKPE

SEQ ID NO: 64751 - protein, 512 aa, Homo sapiens
MGVQWWSHTQGEVAVGLGLGDSYLTPCPCPGVGYAVILIALYVGFYYNVIIAWSLYYLFSSFTLNLPWTDCGHTWNSPNCTDPKLLNGSVLGNHTKYSKYKFTPAAEFYERGVLHLHESSGIHDIGLPQWQLLLCLMVVVIVLYFSLWKGVKTSGKVVWITATLPYFVLFVLLVHGVTLPGASNGINAYLHIDFYRLKEATVWIDAATQIFFSLGAGFGVLIAFASYNKFDNNCYRDALLTSSINCITSFVSGFAIFSILGYMAHEHKVNIEDVATEGAGLVFILYPEAISTLSGSTFWAVVFFVMLLALGLDSSMGGMEAVITGLADDFQVLKRHRKLFTFGVTFSTFLLALFCITKGGIYVLTLLDTFAAGTSILFAVLMEAIGVSWFYGVDRFSNDIQQMMGFRPGLYWRLCWKFVSPAFLLFVVVVSIINFKPLTYDDYIFPPWANWVGWGIALSSMVLVPIYVIYKFLSTQGSLWERLAYGITPENEHHLVAQRDIRQFQLQHWLAI

SEQ ID NO: 64752 - protein, 614 aa, Homo sapiens
MDGKVAVQECGPPAVSWVPEEGEKLDQEDEDQVKDRGQWTNKMEFVLSVAGEIIGLGNVWRFPYLCYKNGGGAFFIPYFIFFFVCGIPVFFLEVALGQYTSQGSVTAWRKICPLFQGIGLASVVIESYLNVYYIIILAWALFYLFSSFTSELPWTTCNNFWNTEHCTDFLNHSGAGTVTPFENFTSPVMEFWERRVLGITSGIHDLGSLRWELALCLLLAWVICYFCIWKGVKSTGKVVYFTATFPYLMLVILLIRGVTLPGAYQGIIYYLKPDLFRLKDPQVWMDAGTQIFFSFAICQGCLTALGSYNKYHNNCYKDCIALCFLNSATSFVAGFVVFSILGFMSQEQGVPISEVAESGPGLAFIAFPKAVTMMPLSQLWSCLFFIMLIFLGLDSQFVCVECLVTASIDMFPRQLRKSGRRELLILTIAVMCYLIGLFLVTEGGMYIFQLFDYYASSGICLLFLSLFEVVCISWVYGADRFYDNIEDMIGYRPWPLVKISWLFLTPGLCLATFLFSLSKYTPLKYNNVYVYPPWGYSIGWFLALSSMVCVPLFVVITLLKTRGPFRKRLRQLITPDSSLPQPKQHPCLDGSAGRNFGPSPTREGLIAGEKETHL

SEQ ID NO: 64753 - protein, 614 aa, Homo sapiens; identical to SEQ ID NO: 64752

SEQ ID NO: 64754 - protein, 614 aa, Homo sapiens; identical to SEQ ID NO: 64752

SEQ ID NO: 64755 - protein, 614 aa, Homo sapiens; identical to SEQ ID NO: 64752

SEQ ID NO: 64756 - protein, 614 aa, Homo sapiens; identical to SEQ ID NO: 64752

SEQ ID NO: 64757 - protein, 146 aa, Homo sapiens
MDGKVAVQECGPPAVSWVPEEGEKLDQEDEDQVKDRGQWTNKMEFVLSVAGEIIGLGNVWRFPYLCYKNGGGAFFIPYFIFFFVCGIPVFFLEVALGQYTSQGSVTAWRKICPLFQGIGLASVVIESYLNVYYIIILAWALFYLFS

SEQ ID NO: 64758 - protein, 635 aa, Homo sapiens
MAKKSAENGIYSVSGDEKKGPLIAPGPDGAPAKGDGPVGLGTPGGRLAVPPRETWTRQMDFIMSCVGFAVGLGNVWRFPYLCYKNGGGVFLIPYVLIALVGGIPIFFLEISLGQFMKAGSINVWNICPLFKGLGYASMVIVFYCNTYYIMVLAWGFYYLVKSFTTTLPWATCGHTWNTPDCVEIFRHEDCANASLANLTCDQLADRRSPVIEFWENKVLRLSGGLEVPGALNWEVTLCLLACWVLVYFCVWKGVKSTGKIVYFTATFPYVVLVVLLVRGVLLPGALDGIIYYLKPDWSKLGSPQVWIDAGTQIFFSYAIGLGALTALGSYNRFNNNCYKDAIILALINSGTSFFAGFVVFSILGFMAAEQGVHISKVAESGPGLAFIAYPRAVTLMPVAPLWAALFFFMLLLLGLDSQFVGVEGFITGLLDLLPASYYFRFQREISVALCCALCFVIDLSMVTDGGMYVFQLFDYYSASGTTLLWQAFWECVVVAWVYGADRFMDDIACMIGYRPCPWMKWCWSFFTPLVCMGIFIFNVVYYEPLVYNNTYVYPWWGEAMGWAFALSSMLCVPLHLLGCLLRAKGTMAERWQHLTQPIWGLHHLEYRAQDADVRGLTTLTPVSESSKVVVVESVM

SEQ ID NO: 64759 - protein, 729 aa, Homo sapiens
MLPTLQIQGPAAFAPGDRGPGRHCPFPVPITPTGALLPVSDSCDSLVDLVWPSVTYLALGTQSRVWPHPLGAPGQAGESPEQRRQCLELWDMASSLGDKVPRAACGKRGQTVWQLHLACLCLAQFHSPPAQPPPLSRRGGGPDPDPISRSLPGPPTPALPTHSYSSHSPRAPRLLSPLRRAPRGSPAPHRHASLQTNEAPRELPHCTWPGLPGRSLAPSFLWREPWLGGQWGPLNIPARKGDRRRWEWGCEGGGATASAEQPGPQIVYFTATFPYVVLVVLLVRGVLLPGALDGIIYYLKPDWSKLGSPQVWIDAGTQIFFSYAIGLGALTALGSYNRFNNNCYKDAIILALINSGTSFFAGFVVFSILGFMAAEQGVHISKVAESGPGLAFIAYPRAVTLMPVAPLWAALFFFMLLLLGLDSQVCMGLWDREPGGGRREGCRQGKGWRRCGARPELPWPQFVGVEGFITGLLDLLPASYYFRFQREISVALCCALCFVIDLSMVTDVSGVGGLPVTSGGRLPSSLTGLCPQGGMYVFQLFDYYSASGTTLLWQAFWECVVVAWVYGRSWLRAGLGDGGGEGRSPAWPASPRGADRFMDDIACMIGYRPCPWMKWCWSFFTPLVCMGIFIFNVVYYEPLVYNNTYVYPWWGEAMGWAFALSSMLCVPLHLLGCLLRAKGTMAERWQHLTQPIWGLHHLEYRAQDADVRGLTTLTPVSESSKVVVVESVM

SEQ ID NO: 64760 - protein, 156 aa, Homo sapiens
LLHSPTWSWSCCWCVECCCLAPWMASFTISSLTGQSWGPLSPGQLQPLQQQLLQWDQLLCWLRGLLHPGLHGCRAGRAHLQGGRVREISVALCCALCFVIDLSMVTDGGMYVFQLFDYYSASGTTLLWQAFWECVVVAWVYGADRFMDDIACMIGY

SEQ ID NO: 64761 - protein, 112 aa, Homo sapiens
  VARIANT 1: note = MOD_RES - Any amino acid
XFRHEDCANASLANLTCDQLADRRSPVIEFWENKVLRLSGGLEVPGALNWEVTLCLLACWVLVYFCVWKGVKSTGKVPLEACSGEGGSALGAGCLCQAHLWQREVTRQSLAL

SEQ ID NO: 64762 - protein, 520 aa, Homo sapiens
MKAGSINVWNICPLFKGLGYASMVIVFYCNTYYIMVLAWGFYYLVKSFTTTLPWATCGHTWNTPDCVEIFRHEDCANASLANLTCDQLADRRSPVIEFWENKVLRLSGGLEVPGALNWEVTLCLLACWVLVYFCVWKGVKSTGKIVYFTATFPYVVLVVLLVRGVLLPGALDGIIYYLKPDWSKLGSPQVWIDAGTQIFFSYAIGLGALTALGSYNRFNNNCYKDAIILALINSGTSFFAGFVVFSILGFMAAEQGVHISKVAESGPGLAFIAYPRAVTLMPVAPLWAALFFFMLLLLGLDSQFVGVEGFITGLLDLLPASYYFRFQREISVALCCALCFVIDLSMVTDGGMYVFQLFDYYSASGTTLLWQAFWECVVVAWVYGADRFMDDIACMIGYRPCPWMKWCWSFFTPLVCMGIFIFNVVYYEPLVYNNTYVYPWWGEAMGWAFALSSMLCVPLHLLGCLLRAKGTMAERWQHLTQPIWGLHHLEYRAQDADVRGLTTLTPVSESSKVVVVESVM

SEQ ID NO: 64763 - protein, 174 aa, Homo sapiens
  VARIANT 1: note = MOD_RES - Any amino acid
XIDAGTQIFFSYAIGLGALTALGSYNRFNNNCYNGTSFFAGFVVFSILGFMAAEQGVHISKVAESGPGLAFIAYPRAVTLMPVAPLWAALFFFMLLLLGLDSQFVGVEGFITGLLDLLPASYYFRFQREISVALCCALCFVIDLSMVTDGGMYVFQLFDYYSASGTTLLWQAFW

SEQ ID NO: 64764 - protein, 89 aa, Homo sapiens [sequence omitted]

SEQ ID NO: 64765 - protein, 620 aa, Homo sapiens
MSKSKCSVGLMSSVVAPAKEPNAVGPKEVELILVKEQNGVQLTSSTLTNPRQSPVEAQDRETWGKKIDFLLSVIGFAVDLANVWRFPYLCYKNGGGAFLVPYLLFMVIAGMPLFYMELALGQFNREGAAGVWKICPILKGVGFTVILISLYVGFFYNVIIAWALHYLFSSFTTELPWIHCNNSWNSPNCSDAHPGDSSGDSSGLNDTFGTTPAAEYFERGVLHLHQSHGIDDLGPPRWQLTACLVLVIVLLYFSLWKGVKTSGKVVWITATMPYVVLTALLLRGVTLPGAIDGIRAYLSVDFYRLCEASVWIDAATQVCFSLGVGFGVLIAFSSYNKFTNNCYRDAIVTTSINSLTSFSSGFVVFSFLGYMAQKHSVPIGDVAKDGPGLIFIIYPEAIATLPLSSAWAVVFFIMLLTLGIDSAMGGMESVITGLIDEFQLLHRHRELFTLFIVLATFLLSLFCVTNGGIYVFTLLDHFAAGTSILFGVLIEAIGVAWFYGVGQFSDDIQQMTGQRPSLYWRLCWKLVSPCFLLFVVVVSIVTFRPPHYGAYIFPDWANALGWVIATSSMAMVPIYAAYKFCSLPGSFREKLAYAIAPEKDRELVDRGEVRQFTLRHWLKV

SEQ ID NO: 64766 - protein, 620 aa, Homo sapiens; identical to SEQ ID NO: 64765

SEQ ID NO: 64767 - protein, 599 aa, Homo sapiens [sequence omitted]

SEQ ID NO: 64768 - protein, 39 aa, Homo sapiens
MATNGSKVADGQISTEVSEAPVANDKPKTLVVKVQKKAA

SEQ ID NO: 64769 - protein, 421 aa, Homo sapiens
MVNTTNMTSAVVEFWERNMHQMTDGLDKPGQIRWPLAITLAIAWILVYFCIWKGVGWTGKVVYFSATYPYIMLIILFFRGVTLPGAKEGILFYITPNFRKLSDSEVWLDAATQIFFSYGLGLGSLIALGSYNSFHNNVYRDSIIVCCINSCTSMFAGFVIFSIVGFMAHVTKRSIADVAASGPGLAFLAYPEAVTQLPISPLWAILFFSMLLMLGIDSQFCTVEGFITALVDEYPRLLRNRRELFIAAVCIISYLIGLSNITQGGIYVFKLFDYYSASGMSLLFLVFFECVSISWFYGVNRFYDNIQEMVGSRPCIWWKLCWSFFTPIIVAGVFIFSAVQMTPLTMGNYVFPKWGQGVGWLMALSSMVLIPGYMAYMFLTLKGSLKQRIQVMVQPSEDIVRPENGPEQPQAGSSTSKEAYI

SEQ ID NO: 64770 - protein, 632 aa, Homo sapiens
MTAEKALPLGNGKAAEEARESEAPGGGCSSGGAAPARHPRVKRDKAVHERGHWNNKVEFVLSVAGEIIGLGNVWRFPYLCYKNGGGAFLIPYVVFFICCGIPVFFLETALGQFTSEGGITCWRKVCPLFEGIGYATQVIEAHLNVYYIIILAWAIFYLSNCFTTELPWATCGHEWNTENCVEFQKLNVSNYSHVSLQNATSPVMEFWEHRVLAISDGIEHIGNLRWELALCLLAAWTICYFCIWKGTKSTGKVVYVTATFPYIMLLILLIRGVTLPGASEGIKFYLYPDLSRLSDPQVWVDAGTQIFFSYAICLGCLTALGSYNNYNNNCYRDCIMLCCLNSGTSFVAGFAIFSVLGFMAYEQGVPIAEVAESGPGLAFIAYPKAVTMMPLSPLWATLFFMMLIFLGLDSQFVCVESLVTAVVDMYPKVFRRGYRRELLILALSVISYFLGLVMLTEGGMYIFQLFDSYAASGMCLLFVAIFECICIGWVYGSNRFYDNIEDMIGYRPPSLIKWCWMIMTPGICAGIFIFFLIKYKPLKYNNIYTYPAWGYGIGWLMALSSMLCIPLWICITVWKTEGTLPEKLQKLTTPSTDLKMRGKLGVSPRMVTVNDCDAKLKSDGTIAAITEKETHF

SEQ ID NO: 64771 - protein, 208 aa, Homo sapiens
MTAEKALPLGNGKAAEEARESEAPGGGCSSGGAAPARHPRVKRDKAVHERGHWNNKVEFVLSVAGEIIGLGNVWRFPYLCYKNGGGAFLIPYVVFFICCGIPVFFLETALGQFTSEGGITCWRKVCPLFEGIGYATQVIEAHLNVYYIIILAWAIFYLSNCFTTELPWATCGHEWNTENCVEFQKLNVSNYSHVSLQNATSPVMEFWE

SEQ ID NO: 64772 - protein, 797 aa, Homo sapiens
MDCSAPKEMNKLPANSPEAAAAQGHPDGPCAPRTSPEQELPAAAAPPPPRVPRSASTGAQTFQSADARACEAERPGVGSCKLSSPRAQAASAALRDLREAQGAQASPPPGSSGPGNALHCKIPFLRGPEGDANVSVGKGTLERNNTPVVGWVNMSQSTVVLATDGITSVLPGSVATVATQEDEQGDENKARGNWSSKLDFILSMVGYAVGLGNVWRFPYLAFQNGGGAFLIPYLMMLALAGLPIFFLEVSLGQFASQGPVSVWKAIPALQGCGIAMLIISVLIAIYYNVIICYTLFYLFASFVSVLPWGSCNNPWNTPECKDKTKLLLDSCVISDHPKIQIKNSTFCMTAYPNVTMVNFTSQANKTFVSGSEEYFKYFVLKISAGIEYPGEIRWPLALCLFLAWVIVYASLAKGIKTSGKVVYFTATFPYVVLVILLIRGVTLPGAGAGIWYFITPKWEKLTDATVWKDAATQIFFSLSAAWGGLITLSSYNKFHNNCYRDTLIVTCTNSATSIFAGFVIFSVIGFMANERKVNIENVADQGPGIAFVVYPEALTRLPLSPFWAIIFFLMLLTLGLDTMFATIETIVTSISDEFPKYLRTHKPVFTLGCCICFFIMGFPMITQGGIYMFQLVDTYAASYALVIIAIFELVGISYVYGLQRFCEDIEMMIGFQPNIFWKVCWAFVTPTILTFILCFSFYQWEPMTYGSYRYPNWSMVLGWLMLACSVIWIPIMFVIKMHLAPGRFIERLKLVCSPQPDWGPFLAQHRGERYKNMIDPLGTSSLGLKLPVKDLELGTQC

SEQ ID NO: 64773 - protein, 652 aa, Homo sapiens
MSGGDTRAAIARPRMAAAHGPVAPSSPEQNGAVPSEATKRDQNLKRGNWGNQIEFVLTSVGYAVGLGNVWRFPYLCYRNGGGAFMFPYFIMLIFCGIPLFFMELSFGQFASQGCLGVWRISPMFKGVGYGMMVVSTYIGIYYNVVICIAFYYFFSSMTHVLPWAYCNNPWNTHDCAGVLDASNLTNGSRPAALPSNLSHLLNHSLQRTSPSEEYWRLYVLKLSDDIGNFGEVRLPLLGCLGVSWLVVFLCLIRGVKSSGKVVYFTATFPYVVLTILFVRGVTLEGAFDGIMYYLTPQWDKILEAKVWGDAASQIFYSLGCAWGGLITMASYNKFHNNCYRDSVIISITNCATSVYAGFVIFSILGFMANHLGVDVSRVADHGPGLAFVAYPEALTLLPISPLWSLLFFFMLILLGLGTQFCLLETLVTAIVDEVGNEWILQKKTYVTLGVAVAGFLLGIPLTSQAGIYWLLLMDNYAASFSLVVISCIMCVAIMYIYGHRNYFQDIQMMLGFPPPLFFQICWRFVSPAIIFFILVFTVIQYQPITYNHYQYPGWAVAIGFLMALSSVLCIPLYAMFRLCRTDGDTLLQRLKNATKPSRDWGPALLEHRTGRYAPTIAPSPEDGFEVQPLHPDKAQIPIVGSNGSSRLQDSRI

SEQ ID NO: 64774 - protein, 706 aa, Homo sapiens
MSGGDTRAAIARPRMAAAHGPVAPSSPEQVTLLPVQRSFFLPPFSGATPSTSLAESVLKVWHGAYNSGLLPQLMAQHSLAMAQNGAVPSEATKRDQNLKRGNWGNQIEFVLTSVGYAVGLGNVWRFPYLCYRNGGGAFMFPYFIMLIFCGIPLFFMELSFGQFASQGCLGVWRISPMFKGVGYGMMVVSTYIGIYYNVVICIAFYYFFSSMTHVLPWAYCNNPWNTHDCAGVLDASNLTNGSRPAALPSNLSHLLNHSLQRTSPSEEYWRLYVLKLSDDIGNFGEVRLPLLGCLGVSWLVVFLCLIRGVKSSGKVVYFTATFPYVVLTILFVRGVTLEGAFDGIMYYLTPQWDKILEAKVWGDAASQIFYSLGCAWGGLITMASYNKFHNNCYRDSVIISITNCATSVYAGFVIFSILGFMANHLGVDVSRVADHGPGLAFVAYPEALTLLPISPLWSLLFFFMLILLGLGTQFCLLETLVTAIVDEVGNEWILQKKTYVTLGVAVAGFLLGIPLTSQAGIYWLLLMDNYAASFSLVVISCIMCVAIMYIYGHRNYFQDIQMMLGFPPPLFFQICWRFVSPAIIFFILVFTVIQYQPITYNHYQYPGWAVAIGFLMALSSVLCIPLYAMFRLCRTDGDTLLQRLKNATKPSRDWGPALLEHRTGRYAPTIAPSPEDGFEVQPLHPDKAQIPIVGSNGSSRLQDSRI

SEQ ID NO: 64775 - protein, 574 aa, Homo sapiens
MFPYFIMLIFCGIPLFFMELSFGQFASQGCLGVWRISPMFKGVGYGMMVVSTYIGIYYNVVICIAFYYFFSSMTHVLPWAYCNNPWNTHDCAGVLDASNLTNGSRPAALPSNLSHLLNHSLQRTSPSEEYWRLYVLKLSDDIGNFGEVRLPLLGCLGVSWLVVFLCLIRGVKSSGKVVYFTATFPYVVLTILFVRGVTLEGAFDGIMYYLTPQWDKILEAKVWGDAASQIFYSLGCAWGGLITMASYNKFHNNCYRDSVIISITNCATSVYAGFVIFSILGFMANHLGVDVSRVADHGPGLAFVAYPEALTLLPISPLWSLLFFFMLILLGLGTQFCLLETLVTAIVDEVGNEWILQKKTYVTLGVAVAGFLLGIPLTSQAGIYWLLLMDNYAASFSLVVISCIMCVAIMYIYGHRNYFQDIQMMLGFPPPLFFQICWRFVSPAIIFLQAQVHRRLPQNPLHFASLPERNVLLHQLPQRGGVPEHDPPTPPSPARTYGPQVRVREVPRARRQRSPNPAPLWAPPSPKPHPCSAAGPLGWDCPFRNCQSLALSSARLLADSDAGGPETRQWEPGP

SEQ ID NO: 64776 - protein, 633 aa, Homo sapiens
MVGKGAKGMLNGAVPSEATKRDQNLKRGNWGNQIEFVLTSVGYAVGLGNVWRFPYLCYRNGGGAFMFPYFIMLIFCGIPLFFMELSFGQFASQGCLGVWRISPMFKGVGYGMMVVSTYIGIYYNVVICIAFYYFFSSMTHVLPWAYCNNPWNTHDCAGVLDASNLTNGSRPAALPSNLSHLLNHSLQRTSPSEEYWRLYVLKLSDDIGNFGEVRLPLLGCLGVSWLVVFLCLIRGVKSSGKVVYFTATFPYVVLTILFVRGVTLEGAFDGIMYYLTPQWDKILEAKVWGDAASQIFYSLGCAWGGLITMASYNKFHNNCYRDSVIISITNCATSVYAGFVIFSILGFMANHLGVDVSRVADHGPGLAFVAYPEALTLLPISPLWSLLFFFMLILLGLGTQFCLLETLVTAIVDEVGNEWILQKKTYVTLGVAVAGFLLGIPLTSQAGIYWLLLMDNYAASFSLVVISCIMCVAIMYIYGHRNYFQDIQMMLGFPPPLFFQICWRFVSPAIIFFILVFTVIQYQPITYNHYQYPGWAVAIGFLMALSSVLCIPLYAMFRLCRTDGDTLLQRLKNATKPSRDWGPALLEHRTGRYAPTIAPSPEDGFEVQPLHPDKAQIPIVGSNGSSRLQDSRI

SEQ ID NO: 64777 - protein, 522 aa, Homo sapiens
MMVVSTYIGIYYNVVICIAFYYFFSSMTHVLPWAYCNNPWNTHDCAGVLDASNLTNGSRPAALPSNLSHLLNHSLQRTSPSEEYWRLYVLKLSDDIGNFGEVRLPLLGCLGVSWLVVFLCLIRGVKSSGKVVYFTATFPYVVLTILFVRGVTLEGAFDGIMYYLTPQWDKILEAKVWGDAASQIFYSLGCAWGGLITMASYNKFHNNCYRDSVIISITNCATSVYAGFVIFSILGFMANHLGVDVSRVADHGPGLAFVAYPEALTLLPISPLWSLLFFFMLILLGLGTQFCLLETLVTAIVDEVGNEWILQKKTYVTLGVAVAGFLLGIPLTSQAGIYWLLLMDNYAASFSLVVISCIMCVAIMYIYGHRNYFQDIQMMLGFPPPLFFQICWRFVSPAIIFFILVFTVIQYQPITYNHYQYPGWAVAIGFLMALSSVLCIPLYAMFRLCRTDGDTLLQRLKNATKPSRDWGPALLEHRTGRYAPTIAPSPEDGFEVQPLHPDKAQIPIVGSNGSSRLQDSRI

SEQ ID NO: 64778 - protein, 134 aa, Homo sapiens
MSGGDTRAAIARPRMAAAHGPVAPSSPEQNGAVPSEATKRDQNLKRGNWGNQIEFVLTSVGYAVGLGNVWRFPYLCYRNGGGAFMFPYFIMLIFCGIPLFFMELSFGQFASQGCLGVWRISPMFKGVGYGMMVV

SEQ ID NO: 64779 - protein, 386 aa, Homo sapiens
MFPYFIMLIFCGIPLFFMELSFGQFASQGCLGVWRISPMFKGVGYGMMVVSTYIGIYYNVVICIAFYYFFSSMTHVLPWAYCNNPWNTHDCAGVLDASNLTNGSRPAALPSNLSHLLNHSLQRTSPSEEYWRLYVLKLSDDIGNFGEVRLPLLGCLGVSWLVVFLCLIRGVKSSGKVVYFTATFPYVVLTILFVRGVTLEGAFDGIMYYLTPQWDKILEAKVWGDAASQIFYSLGCAWGGLITMASYNKFHNNCYRDSVIISITNCATSVYAGFVIFSILGFMANHLGVDVSRVADHGPGLAFVAYPEALTLLPISPLWSLLFFFMLILLGLGTQFCLLETLVTAIVDEVGNEWILQKKTYVTLGVAVAGFLLGIPLTSQASIGCC

SEQ ID NO: 64780 - protein, 636 aa, Homo sapiens
MKKLQGAHLRKPVTPDLLMTPSDQGDVDLDVDFAAHRGNWTGKLDFLLSCIGYCVGLGNVWRFPYRAYTNGGGAFLVPYFLMLAICGIPLFFLELSLGQFSSLGPLAVWKISPLFKGAGAAMLLIVGLVAIYYNMIIAYVLFYLFASLTSDLPWEHCGNWWNTELCLEHRVSKDGNGALPLNLTCTVSPSEEYWSRYVLHIQGSQGIGSPGEIRWNLCLCLLLAWVIVFLCILKGVKSSGKVVYFTATFPYLILLMLLVRGVTLPGAWKGIQFYLTPQFHHLLSSKVWIEAALQIFYSLGVGFGGLLTFASYNTFHQNIYRDTFIVTLGNAITSILAGFAIFSVLGYMSQELGVPVDQVAKAGPGLAFVVYPQAMTMLPLSPFWSFLFFFMLLTLGLDSQFAFLETIVTAVTDEFPYYLRPKKAVFSGLICVAMYLMGLILTTDGGMYWLVLLDDYSASFGLMVVVITTCLAVTRVYGIQRFCRDIHMMLGFKPGLYFRACWLFLSPATLLALMVYSIVKYQPSEYGSYRFPPWAELLGILMGLLSCLMIPAGMLVAVLREEGSLWERLQQASRPAMDWGPSLEENRTGMYVATLAGSQSPKPLMVHMRKYGGITSFENTAIEVDREIAEEEESMM

SEQ ID NO: 64781 - protein, 628 aa, Homo sapiens
MLLARMNPQVQPENNGADTGPEQPLRARKTAELLVVKERNGVQCLLAPRDGDAQPRETWGKKIDFLLSVVGFAVDLANVWRFPYLCYKNGGGAFLIPYTLFLIIAGMPLFYMELALGQYNREGAATVWKICPFFKGVGYAVILIALYVGFYYNVIIAWSLYYLFSSFTLNLPWTDCGHTWNSPNCTDPKLLNGSVLGNHTKYSKYKFTPAAEFYERGVLHLHESSGIHDIGLPQWQLLLCLMVVVIVLYFSLWKGVKTSGKVVWITATLPYFVLFVLLVHGVTLPGASNGINAYLHIDFYRLKEATVWIDAATQIFFSLGAGFGVLIAFASYNKFDNNCYRDALLTSSINCITSFVSGFAIFSILGYMAHEHKVNIEDVATEGAGLVFILYPEAISTLSGSTFWAVVFFVMLLALGLDSSMGGMEAVITGLADDFQVLKRHRKLFTFGVTFSTFLLALFCITKGGIYVLTLLDTFAAGTSILFAVLMEAIGVSWFYGVDRFSNDIQQMMGFRPGLYWRLCWKFVSPAFLLFVVVVSIINFKPLTYDDYIFPPWANWVGWGIALSSMVLVPIYVIYKFLSTQGSLWERLAYGITPENEHHLVAQRDIRQFQMKTRQGRRRATNSCQISC

SEQ ID NO: 64782 - protein, 617 aa, Homo sapiens [sequence omitted]

SEQ ID NO: 64783 - protein, 617 aa, Homo sapiens [sequence omitted]

SEQ ID NO: 64784 - protein, 331 aa, Homo sapiens
MVVVIVLYFSLWKGVKTSGKVWIDAATQIFFSLGAGFGVLIAFASYNKFDNNCYRDALLTSSINCITSFVSGFAIFSILGYMAHEHKVNIEDVATEGAGLVFILYPEAISTLSGSTFWAVVFFVMLLALGLDSSMGGMEAVITGLADDFQVLKRHRKLFTFGVTFSTFLLALFCITKGGIYVLTLLDTFAAGTSILFAVLMEAIGVSWFYGVDRFSNDIQQMMGFRPGLYWRLCWKFVSPAFLLFVVVVSIINFKPLTYDDYIFPPWANWVGWGIALSSMVLVPIYVIYKFLSTQGSLWERLAYGITPENEHHLVAQRDIRQFQLQHWLAI

SEQ ID NO: 64785 - protein, 630 aa, Homo sapiens
METTPLNSQKQLSACEDGEDCQENGVLQKVVPTPGDKVESGQISNGYSAVPSPGAGDDTRHSIPATTTTLVAELHQGERETWGKKVDFLLSVIGYAVDLGNVWRFPYICYQNGGGAFLLPYTIMAIFGGIPLFYMELALGQYHRNGCISIWRKICPIFKGIGYAICIIAFYIASYYNTIMAWALYYLISSFTDQLPWTSCKNSWNTGNCTNYFSEDNITWTLHSTSPAEEFYTRHVLQIHRSKGLQDLGGISWQLALCIMLIFTVIYFSIWKGVKTSGKVVWVTATFPYIILSVLLVRGATLPGAWRGVLFYLKPNWQKLLETGVWIDAAAQIFFSLGPGFGVLLAFASYNKFNNNCYQDALVTSVVNCMTSFVSGFVIFTVLGYMAEMRNEDVSEVAKDAGPSLLFITYAEAIANMPASTFFAIIFFLMLITLGLDSTFAGLEGVITAVLDEFPHVWAKRRERFVLAVVITCFFGSLVTLTFGGAYVVKLLEEYATGPAVLTVALIEAVAVSWFYGITQFCRDVKEMLGFSPGWFWRICWVAISPLFLLFIICSFLMSPPQLRLFQYNYPYWSIILGYCIGTSSFICIPTYIAYRLIITPGTFKERIIKSITPETPTEIPCGDIRLNAV

SEQ ID NO: 64786 - protein, 672 aa, Homo sapiens
MSQSRRVNPDDRELGGDPQIQAPRDQLGSLADGHQCHLLTSRMETTPLNSQKQLSACEDGEDCQENGVLQKVVPTPGDKVESGQISNGYSAVPSPGAGDDTRHSIPATTTTLVAELHQGERETWGKKVDFLLSVIGYAVDLGNVWRFPYICYQNGGGAFLLPYTIMAIFGGIPLFYMELALGQYHRNGCISIWRKICPIFKGIGYAICIIAFYIASYYNTIMAWALYYLISSFTDQLPWTSCKNSWNTGNCTNYFSEDNITWTLHSTSPAEEFYTRHVLQIHRSKGLQDLGGISWQLALCIMLIFTVIYFSIWKGVKTSGKVVWVTATFPYIILSVLLVRGATLPGAWRGVLFYLKPNWQKLLETGVWIDAAAQIFFSLGPGFGVLLAFASYNKFNNNCYQDALVTSVVNCMTSFVSGFVIFTVLGYMAEMRNEDVSEVAKDAGPSLLFITYAEAIANMPASTFFAIIFFLMLITLGLDSTFAGLEGVITAVLDEFPHVWAKRRERFVLAVVITCFFGSLVTLTFGGAYVVKLLEEYATGPAVLTVALIEAVAVSWFYGITQFCRDVKEMLGFSPGWFWRICWVAISPLFLLFIICSFLMSPPQLRLFQYNYPYWSIILGYCIGTSSFICIPTYIAYRLIITPGTFKERIIKSITPETPTEIPCGDIRLNAV

SEQ ID NO: 64787 - protein, 630 aa, Homo sapiens; identical to SEQ ID NO: 64785

SEQ ID NO: 64788 - protein, 620 aa, Homo sapiens
MATKEKLQCLKDFHKDILKPSPGKSPGTRPEDEAEGKPPQREKWSSKIDFVLSVAGGFVGLGNVWRFPYLCYKNGGGAFLIPYFIFLFGSGLPVFFLEIIIGQYTSEGGITCWEKICPLFSGIGYASVVIVSLLNVYYIVILAWATYYLFQSFQKELPWAHCNHSWNTPHCMEDTMRKNKSVWITISSTNFTSPVIEFWERNVLSLSPGIDHPGSLKWDLALCLLLVWLVCFFCIWKGVRSTGKVVYFTATFPFAMLLVLLVRGLTLPGAGAGIKFYLYPDITRLEDPQVWIDAGTQIFFSYAICLGAMTSLGSYNKYKYNSYRDCMLLGCLNSGTSFVSGFAIFSILGFMAQEQGVDIADVAESGPGLAFIAYPKAVTMMPLPTFWSILFFIMLLLLGLDSQFVEVEGQITSLVDLYPSFLRKGYRREIFIAFVCSISYLLGLTMVTEGGMYVFQLFDYYAASGVCLLWVAFFECFVIAWIYGGDNLYDGIEDMIGYRPGPWMKYSWAVITPVLCVGCFIFSLVKYVPLTYNKTYVYPNWAIGLGWSLALSSMLCVPLVIVIRLCQTEGPFLVRVKYLLTPREPNRWAVEREGATPYNSRTVMNGALVKPTHIIVETMM

SEQ ID NO: 64789 - protein, 200 aa, Homo sapiens
MATKEKLQCLKDFHKDILKPSPGKSPGTRPEDEAEGKPPQREKWSSKIDFVLSVAGGFVGLGNVWRFPYLCYKNGGGAFLIPYFIFLFGSGLPVFFLEIIIGQYTSEGGITCWEKICPLFSGIGYASVVIVSLLNVYYIVILAWATYYLFQSFQKELPWAHCNHSWNTPHCMEDTMRKNKSVWITISSTNFTSPVIEFWE

SEQ ID NO: 64790 - protein, 359 aa, Homo sapiens
MATKEKLQCLKDFHKDILKPSPGKSPGTRPEDEAEGKPPQREKWSSKIDFVLSVAGGFVGLGNVWRFPYLCYKNGGGAFLIPYFIFLFGSGLPVFFLEIIIGQYTSEGGITCWEKICPLFSGIGYASVVIVSLLNVYYIVILAWATYYLFQSFQKELPWAHCNHSWNTPHCMEDTMRKNKSVWITISSTNFTSPVIEFWERNVLSLSPGIDHPGSLKWDLALCLLLVWLVCFFCIWKGVRSTGKVVYFTATFPFAMLLVLLVRGLTLPGAGAGIKFYLYPDITRLEDPQVWIDAGTQIFFSYAICLGAMTSLGSYNKYKYNSYRSWPGLHCLPKSCDNDAAAHILVHSFFYYASLAWTG

SEQ ID NO: 64791 - protein, 109 aa, Homo sapiens
MATKEKLQCLKDFHKDILKPSPGKSPGTRPEDEAEGKPPQREKWSSKIDFVLSVAGGFVGLGNVWRFPYLCYKNGGGAFLIPYFIFLFGSGLPVFFLEIIIGQYTSEGG

SEQ ID NO: 64792 - protein, 620 aa, Homo sapiens; identical to SEQ ID NO: 64788

SEQ ID NO: 64793 - protein, 359 aa, Homo sapiens; identical to SEQ ID NO: 64790

SEQ ID NO: 64794 - protein, 634 aa, Homo sapiens
MVRLVLPNPGLDARIPSLAELETIEQEEASSRPKWDNKAQYMLTCLGFCVGLGNVWRFPYLCQSHGGGAFMIPFLILLVLEGIPLLYLEFAIGQRLRRGSLGVWSSIHPALKGLGLASMLTSFMVGLYYNTIISWIMWYLFNSFQEPLPWSDCPLNENQTGYVDECARSSPVDYFWYRETLNISTSISDSGSIQWWMLLCLACAWSVLYMCTIRGIETTGKAVYITSTLPYVVLTIFLIRGLTLKGATNGIVFLFTPNVTELAQPDTWLDAGAQVFFSFSLAFGGLISFSSYNSVHNNCEKDSVIVSIINGFTSVYVAIVVYSVIGFRATQRYDDCFSTNILTLINGFDLPEGNVTQENFVDMQQRCNASDPAAYAQLVFQTCDINAFLSEAVEGTGLAFIVFTEAITKMPLSPLWSVLFFIMLFCLGLSSMFGNMEGVVVPLQDLRVIPPKWPKEVLTGLICLGTFLIGFIFTLNSGQYWLSLLDSYAGSIPLLIIAFCEMFSVVYVYGVDRFNKDIEFMIGHKPNIFWQVTWRVVSPLLMLIIFLFFFVVEVSQELTYSIWDPGYEEFPKSQKISYPNWVYVVVVIVAGVPSLTIPGYAIYKLIRNHCQKPGDHQGLVSTLSTASMNGDLKY

SEQ ID NO: 64795 - protein, 555 aa, Homo sapiens
MEKARPLWANSLQFVFACISYAVGLGNVWRFPYLCQMYGGGSFLVPYIIMLIVEGMPLLYLELAVGQRMRQGSIGAWRTISPYLSGVGVASVVVSFFLSMYYNVINAWAFWYLFHSFQDPLPWSVCPLNGNHTGYDEECEKASSTQYFWYRKTLNISPSLQENGGVQWEPALCLLLAWLVVYLCILRGTESTGKIEQLANPKAWINAATQIFFSLGLGFGSLIAFASYNEPSNNCQKHAIIVSLINSFTSIFASIVTFSIYGFKATFNYENCLKKVSLLLTNTFDLEDGFLTASNLEQVKGYLASAYPSKYSEMFPQIKNCSLESELDTAVQGTGLAFIVYTEAIKNMEVSQLWSVLYFFMLLMLGIGSMLGNTAAILTPLTDSKIISSHLPKEAISGLVCLVNCAIGMVFTMEAGNYWFDIFNDYAATLSLLLIVLVETIAVCYVYGLRRFESDLKAMTGRAVSWYWKVMWAGVSPLLIVSLFVFYLSDYILTGTLKYQAWDASQGQLVTKDYPAYALAVIGLLVASSTMCIPLAALGTFVQRRLKRGDADPVA

SEQ ID NO: 64796 - protein, 592 aa, Homo sapiens
MEKARPLWANSLQFVFACISYAVGLGNVWRFPYLCQMYGGGSFLVPYIIMLIVEGMPLLYLELAVGQRMRQGSIGAWRTISPYLSGVGVASVVVSFFLSMYYNVINAWAFWYLFHSFQDPLPWSVCPLNGNHTGYDEECEKASSTQYFWYRKTLNISPSLQENGGVQWEPALCLLLAWLVVYLCILRGTESTGKVVYFTASLPYCVLIIYLIRGLTLHGATNGLMYMFTPKIEQLANPKAWINAATQIFFSLGLGFGSLIAFASYNEPSNNCQKHAIIVSLINSFTSIFASIVTFSIYGFKATFNYENCLKKVSLLLTNTFDLEDGFLTASNLEQVKGYLASAYPSKYSEMFPQIKNCSLESELDTAVQGTGLAFIVYTEAIKNMEVSQLWSVLYFFMLLMLGIGSMLGNTAAILTPLTDSKIISSHLPKEAISGLVCLVNCAIGMVFTMEAGNYWFDIFNDYAATLSLLLIVLVETIAVCYVYGLRRFESDLKAMTGRAVSWYWKVMWAGVSPLLIVSLFVFYLSDYILTGTLKYQAWDASQGQLVTKDYPAYALAVIGLLVASSTMCIPLAALGTFVQRRLKRGDADPVA

SEQ ID NO: 64797 - protein, 547 aa, Homo sapiens
MEKARPLWANSLQFVFACISYAVGLGNVWRFPYLCQMYGGGSFLVPYIIMLIVEGMPLLYLELAVGQRMRQGSIGAWRTISPYLSGVGVASVVVSFFLSMYYNVINAWAFWYLFHSFQDPLPWSVCPLNGNHTGYDEECEKASSTQYFWYRKTLNISPSLQENGGVQWEPALCLLLAWLVVYLCILRGTESTGKVVYFTASLPYCVLIIYLIRGLTLHGATNGLMYMFTPKIEQLANPKAWINAATQIFFSLGLGFGSLIAFASYNEPSNNCQKHAIIVSLINSFTSIFASIVTFSIYGFKATFNYENCLKKVSLLLTNTFDLEDGFLTASNLEQVKGYLASAYPSKYSEMFPQIKNCSLESELDTAVQGTGLAFIVYTEAIKNMEVSQLWSVLYFFMLLMLGIGSMLGNTAAILTPLTDSKIISSHLPKEAISGLVCLVNCAIGMVFTMEAGNYWFDIFNDYAATLSLLLIVLVETIAVCYVYGLRRFESDLKAMTGRAVSWYWKVMWAGVSPLLIVSLFVFYLSDYILTGTLKYQAWDASQDDKL

SEQ ID NO: 64798 - protein, 397 aa, Homo sapiens
MAHAPEPDPAACDLGDERPKWDNKAQYLLSCTGFAVGLGNIWRFPYLCQTYGGGAFLIPYVIALVFEGIPIFHVELAIGQRLRKGSVGVWTAISPYLSGVGLGCVTLSFLISLYYNTIVAWVLWYLLNSFQHPLPWSSCPPDLNRTGFVEECQGSSAVSYFWYRQTLNITADINDSGSIQWWLLICLAASWAVVYMCVIRGIETTGKVIYFTALFPYLVLTIFLIRGLTLPGATKGLIYLFTPNNPRVWLDAATQIFFSLSLAFGGHIAFASYNSPRNDCQKDAVVIALVNRMTSLYASIAVFSVLGASGPGLAFVVFTETDLHMPGAPVWAMLFFGMLFTLGLSTMFGTVEAVITPLLDSGNYWLEIFDNFAASPNLLMLAFLEVVGVVYVYGMKR

SEQ ID NO: 64799 - protein, 628 aa, Homo sapiens
MAHAPEPDPAACDLGDERPKWDNKAQYLLSCTGFAVGLGNIWRFPYLCQTYGGGAFLIPYVIALVFEGIPIFHVELAIGQRLRKGSVGVWTAISPYLSGVGLGCVTLSFLISLYYNTIVAWVLWYLLNSFQHPLPWSSCPPDLNRTGFVEECQGSSAVSYFWYRQTLNITADINDSGSIQWWLLICLAASWAVVYMCVIRGIETTGKVIYFTALFPYLVLTIFLIRGLTLPGATKGLIYLFTPNMHILQNPRVWLDAATQIFFSLSLAFGGHIAFASYNSPRNDCQKDAVVIALVNRMTSLYASIAVFSVLGFKATNDYEHCLDRNILSLINDFDFPEQSISRDDYPAVLMHLNATWPKRVAQLPLKACLLEDFLDKSASGPGLAFVVFTETDLHMPGAPVWAMLFFGMLFTLGLSTMFGTVEAVITPLLDVGVLPRWVPKEALTGLVCLVCFLSATCFTLQSGNYWLEIFDNFAASPNLLMLAFLEVVGVVYVYGMKRFCDDIAWMTGRRPSPYWRLTWRVVSPLLLTIFVAYIILLFWKPLRYKAWNPKYELFPSRQEKLYPGWARAACVLLSLLPVLWVPVAALAQLLTRRRRTWRDRDARPDTDMRPDTDTRPDTDMRPDTDMR

SEQ ID NO: 64800 - protein, 515 aa, Homo sapiens
MEAREPGRPTPTYHLVPNTSQSQVEEDVSSPPQRSSETMQLKKEISLLNGVSLVVGNMIGSGIFVSPKGVLVHTASYGMSLIVWAIGGLFSVVGALCYAELGTTITKSGASYAYILEAFGGFIAFIRLWVSLLVVEPTGQAIIAITFANYIIQPSFPSCDPPYLACRLLAAACICLLTFVNCAYVKWGTRVQDTFTYAKVVALIAIIVMGLVKLCQGHSEHFQDAFEGSSWDMGNLSLALYSALFSYSGWDTLNFVTEEIKNPERNLPLAIGISMPIVTLIYILTNVAYYTVLNISDVLSSDAVAVTFADQTFGMFSWTIPIAVALSCFGGLNASIFASSRLFFVGSREGHLPDLLSMIHIERFTPIPALLFNCTMALIYLIVEDVFQLINYFSFSYWFFVGLSVVGQLYLRWKEPKRPRPLKLSVFFPIVFCICSVFLVIVPLFTDTINSLIGIGIALSGVPFYFMGVYLPESRRPLFIRNVLAAITRGTQQLCFCVLTELDVAEEKKDERKTD

SEQ ID NO: 64801 - protein, 507 aa, Homo sapiens
MAGAGPKRRALAAPAAEEKEEAREKMLAAKSADGSAPAGEGEGVTLQRNITLLNGVAIIVGTIIGSGIFVTPTGVLKEAGSPGLALVVWAACGVFSIVGALCYAELGTTISKSGGDYAYMLEVYGSLPAFLKLWIELLIIRPSSQYIVALVFATYLLKPLFPTCPVPEEAAKLVACLCVLLLTAVNCYSVKAATRVQDAFAAAKLLALALIILLGFVQIGKGDVSNLDPNFSFEGTKLDVGNIVLALYSGLFAYGGWNYLNFVTEEMINPYRNLPLAIIISLPIVTLVYVLTNLAYFTTLSTEQMLSSEAVAVDFGNYHLGVMSWIIPVFVGLSCFGSVNGSLFTSSRLFFVGSREGHLPSILSMIHPQLLTPVPSLVFTCVMTLLYAFSKDIFSVINFFSFFNWLCVALAIIGMIWLRHRKPELERPIKVNLALPVFFILACLFLIAVSFWKTPVECGIGFTIILSGLPVYFFGVWWKNKPKWLLQGIFSTTVLCQKLMQVVPQET

SEQ ID NO: 64802 - protein, 303 aa, Homo sapiens
MGIVQICKGEYFWLEPKNAFENFQEPDIGLVALAFLQGSFAYGGWNFLNYVTEELVDPYKNLPRAIFISIPLVTFVYVFANVAYVTAMSPQELLASNAVAVTFGEKLLGVMAWIMPISVALSTFGGVNGSLFTSSRLFFAGAREGHLPSVLAMIHVKRCTPIPALLFTCISTLLMLVTSDMYTLINYVGFINYLFYGVTVAGQIVLRWKKPDIPRPIKINLLFPIIYLLFWAFLLVFSLWSEPVVCGIGLAIMLTGVPVYFLGVYWQHKPKCFSDFIELLTLVSQKMCVVVYPEVEGLRDRGG

SEQ ID NO: 64803 - protein, 535 aa, Homo sapiens
MEEGARHRNNTEKKHPGGGESDASPEAGSGGGGVALKKEIGLVSACGIIVGNIIGSGIFVSPKGVLENAGSVGLALIVWIVTGFITVVGALCYAELGVTIPKSGGDYSYVKDIFGGLAGFLRLWIAVLVIYPTNQAVIALTFSNYVLQPLFPTCFPPESGLRLLAAICLLLLTWVNCSSVRWATRVQDIFTAGKLLALALIIIMGIVQICKGEYFWLEPKNAFENFQEPDIGLVALAFLQGSFAYGGWNFLNYVTEELVDPYKNLPRAIFISIPLVTFVYVFANVAYVTAMSPQELLASNAVAVTFGEKLLGVMAWIMPISVALSTFGGVNGSLFTSSRLFFAGAREGHLPSVLAMIHVKRCTPIPALLFTCISTLLMLVTSDMYTLINYVGFINYLFYGVTVAGQIVLRWKKPDIPRPIKINLLFPIIYLLFWAFLLVFSLWSEPVVCGIGLAIMLTGVPVYFLGVYWQHKPKCFSDFIELLTLVSQKMCVVVYPEVERGSGTEEANEDMEEQQQPMYQPTPTKDKDVAGQPQP

SEQ ID NO: 64804 - protein, 210 aa, Homo sapiens
MGIVQICKGEYFWLEPKNAFENFQEPDIGLVALAFLQGSFAYGGWNFLNYVTEELVDPYKNLPRAIFISIPLVTFVYVFANVAYVTAMSPQELLASNAVAVTFGEKLLGVMAWIMPISVALSTFGGVNGSLHLLSAVLRWSPRGPPSQCVGHDPREALHPNPSPALHMHLHPADAGHQRHVHTHQLCGLHQLPLLWGHGCWTDSPSLEEA

SEQ ID NO: 64805 - protein, 230 aa, Homo sapiens
  VARIANT 1: note = MOD_RES - Any amino acid
XCLQEHSQPSQLLCTLLLCWCVLGRERPFRKAQSTSSPLEGVPRFLKRLLLTWVNCSSVRWATRVQDIFTAGKLLALALIIIMGIVQICKGEYFWLEPKNAFENFQEPDIGLVALAFLQGSFAYGGWNFLNYVTEELVDPYKLFFAGAREGHLPSVLAMIHVKRCTPIPALLFTCISTLLMLVTSDMYTLINYVGFINYLFYGVTVAGQIVLRWKKPDIPRPIKPLPYQG

SEQ ID NO: 64806 - protein, 311 aa, Homo sapiens
MGQLFQCAVGHPGSRHLHSWEAPGLGPDYHHGDCTDMQRNLPRAIFISIPLVTFVYVFANVAYVTAMSPQELLASNAVAVTFGEKLLGVMAWIMPISVALSTFGGVNGSLFTSSRLFFAGAREGHLPSVLAMIHVKRCTPIPALLFTCISTLLMLVTSDMYTLINYVGFINYLFYGVTVAGQIVLRWKKPDIPRPIKINLLFPIIYLLFWAFLLVFSLWSEPVVCGIGLAIMLTGVPVYFLGVYWQHKPKCFSDFIELLTLVSQKMCVVVYPEVERGSGTEEANEDMEEQQQPMYQPTPTKDKDVAGQPQP

SEQ ID NO: 64807 - protein, 332 aa, Homo sapiens
MGIVQICKGEYFWLEPKNAFENFQEPDIGLVALAFLQGSFAYGGWNFLNYVTEELVDPYKNLPRAIFISIPLVTFVYVFANVAYVTAMSPQELLASNAVAVTFGEKLLGVMAWIMPISVALSTFGGVNGSLFTSSRLFFAGAREGHLPSVLAMIHVKRCTPIPALLFTCISTLLMLVTSDMYTLINYVGFINYLFYGVTVAGQIVLRWKKPDIPRPIKINLLFPIIYLLFWAFLLVFSLWSEPVVCGIGLAIMLTGVPVYFLGVYWQHKPKCFSDFIELLTLVSQKMCVVVYPEVERGSGTEEANEDMEEQQQPMYQPTPTKDKDVAGQPQP

SEQ ID NO: 64808 - protein, 94 aa, Homo sapiens
MEEGARHRNNTEKKHPGGGESDASPEAGSGGGGVALKKEIGLVSACGIIVGNIIGSGIFVSPKGVLENAGSVGLALIVWIVTGFITVVGALCYA

SEQ ID NO: 64809 - protein, 78 aa, Homo sapiens
MEEGARHRNNTEKKHPGGGESDASPEAGSGGGGVALKKEIGLVSACGIIVGNIIGSGIFVSPKGVLENAGSVGLALIV

SEQ ID NO: 64810 - protein, 430 aa, Homo sapiens
MGQYGQELSWKCLVKAVCLQEHSQPSQLLCTLLLCWCVLGRERPFRKAQSTSSPLEGVPRFLKRLLLTWVNCSSVRWATRVQDIFTAGKLLALALIIIMGIVQICKGEYFWLEPKNAFENFQEPDIGLVALAFLQGSFAYGGWNFLNYVTEELVDPYKNLPRAIFISIPLVTFVYVFANVAYVTAMSPQELLASNAVAVTFGEKLLGVMAWIMPISVALSTFGGVNGSLFTSSRLFFAGAREGHLPSVLAMIHVKRCTPIPALLFTCISTLLMLVTSDMYTLINYVGFINYLFYGVTVAGQIVLRWKKPDIPRPIKINLLFPIIYLLFWAFLLVFSLWSEPVVCGIGLAIMLTGVPVYFLGVYWQHKPKCFSDFIELLTLVSQKMCVVVYPEVERGSGTEEANEDMEEQQQPMYQPTPTKDKDVAGQPQP

SEQ ID NO: 64811 - protein, 515 aa, Homo sapiens; identical to SEQ ID NO: 64800

SEQ ID NO: 64812 - protein, 229 aa, Homo sapiens
MEAREPGRPTPTYHLVPNTSQSQVEEDVSSPPQRSSETMQLKKEISLLNGVSLVVGNMIGSGIFVSPKGVLVHTASYGMSLIVWAIGGLFSVVGALCYAELGTTITKSGASYAYILEAFGGFIAFIRLWVSLLVVEPTGQAIIAITFANYIIQPSFPSCDPPYLACRLLAAACICLLTFVNCAYVKWGTRVQDTFTYAKVVALIAIIVMGLVKLCQEICPWPLGFLCQL

SEQ ID NO: 64813 - protein, 511 aa, Homo sapiens
MVDSTEYEVASQPEVETSPLGDGASPGPEQVKLKKEISLLNGVCLIVGNMIGSGIFVSPKGVLIYSASFGLSLVIWAVGGLFSVFGALCYAELGTTIKKSGASYAYILEAFGGFLAFIRLWTSLLIIEPTSQAIIAITFANYMVQPLFPSCFAPYAASRLLAAACICLLTFINCAYVKWGTLVQDIFTYAKVLALIAVIVAGIVRLGQGASTHFENSFEGSSFAVGDIALALYSALFSYSGWDTLNYVTEEIKNPERNLPLSIGISMPIVTIIYILTNVAYYTVLDMRDILASDAVAVTFADQIFGIFNWIIPLSVALSCFGGLNASIVAASRLFFVGSREGHLPDAICMIHVERFTPVPSLLFNGIMALIYLCVEDIFQLINYYSFSYWFFVGLSIVGQLYLRWKEPDRPRPLKLSVFFPIVFCLCTIFLVAVPLYSDTINSLIGIAIALSGLPFYFLIIRVPEHKRPLYLRRIVGSATRYLQVLCMSVAAEMDLEDGGEMPKQRDPKSN

SEQ ID NO: 64814 - protein, 511 aa, Homo sapiens; identical to SEQ ID NO: 64813

SEQ ID NO: 64815 - protein, 511 aa, Homo sapiens; identical to SEQ ID NO: 64813

SEQ ID NO: 64816 - protein, 511 aa, Homo sapiens; identical to SEQ ID NO: 64813

SEQ ID NO: 64817 - protein, 484 aa, Homo sapiens
MVDSTEYEVASQPEVETSPLGDGASPGPEQVKLKKEIYSASFGLSLVIWAVGGLFSVFGALCYAELGTTIKKSGASYAYILEAFGGFLAFIRLWTSLLIIEPTSQAIIAITFANYMVQPLFPSCFAPYAASRLLAAACICLLTFINCAYVKWGTLVQDIFTYAKVLALIAVIVAGIVRLGQGASTHFENSFEGSSFAVGDIALALYSALFSYSGWDTLNYVTEEIKNPERNLPLSIGISMPIVTIIYILTNVAYYTVLDMRDILASDAVAVTFADQIFGIFNWIIPLSVALSCFGGLNASIVAASRLFFVGSREGHLPDAICMIHVERFTPVPSLLFNGIMALIYLCVEDIFQLINYYSFSYWFFVGLSIVGQLYLRWKEPDRPRPLKLSVFFPIVFCLCTIFLVAVPLYSDTINSLIGIAIALSGLPFYFLIIRVPEHKRPLYLRRIVGSATRYLQVLCMSVAAEMDLEDGGEMPKQRDPKSN

SEQ ID NO: 64818 - protein, 141 aa, Homo sapiens
MVDSTEYEVASQPEVETSPLGDGASPGPEQVKLKKEISLLNGVCLIVGNMIGSGIFVSPKGVLIYSASFGLSLVIWAVGGLFSVFGALCYAELGTTIKKSGASYAYILEAFGGFLAFIRLWTSLLIIEPTSQAIIAITFAN

SEQ ID NO: 64819 - protein, 44 aa, Homo sapiens
MVDSTEYEVASQPEVETSPLGDGASPGPEQVKLKKEISLLNGVC

SEQ ID NO: 64820 - protein, 164 aa, Homo sapiens
MVDSTEYEVASQPEVETSPLGDGASPGPEQVKLKKEISLLNGVCLIVGNMIGSGIFVSPKGVLIYSASFGLSLVIWAVGGLFSVFGALCYAELGTTIKKSGASYAYILEAFGGFLAFIRLWTSLLIIEPTSQAIIAITFANYMVQPLFPSCFAPYAASRLLAAA

SEQ ID NO: 64821 - protein, 122 aa, Homo sapiens
MVDSTEYEVASQPEVETSPLGDGASPGPEQVKLKKEISLLNGVCLIVGNMIGSGIFVSPKGVLIYSASFGLSLVIWAVGGLFSVFGALCYAELGTTIKKSGASYAYILEAFGGFLAFIRLWT

SEQ ID NO: 64822 - protein, 511 aa, Homo sapiens; identical to SEQ ID NO: 64813

SEQ ID NO: 64823 - protein, 115 aa, Homo sapiens
MVDSTEYEVASQPEVETSPLGDGASPGPEQVKLKKEISLLNGVCLIVGNMIGSGIFVSPKGVLIYSASFGLSLVIWAVGGLFSVFGALCYAELGTTIKKSGASYAYILEAFGGFL

SEQ ID NO: 64824 - protein, 30 aa, Homo sapiens
MVDSTEYEVASQPEVETSPLGDGASPGPEQ

SEQ ID NO: 64825 - protein, 310 aa, Homo sapiens
MVDSTEYEVASQPEVETSPLGDGASPGPEQVKLKKEISLLNGVCLIVGNMIGSGIFVSPKGVLIYSASFGLSLVIWAVGGLFSVFGALCYAELGTTIKKSGASYAYILEAFGGFLAFIRLWTSLLIIEPTSQAIIAITFANYMVQPLFPSCFAPYAASRLLAAACICLLTFINCAYVKWGTLVQDIFTYAKVLALIAVIVAGIVRLGQGASTHFENSFEGSSFAVGDIALALYSALFSYSGWDTLNYVTEEIKNPERNLPLSIGISMPIVTIIYILTNVAYYTVLDMRDILASDAVAVAFLCGLKRRPSP

SEQ ID NO: 64826 - protein, 106 aa, Homo sapiens
MVDSTEYEVASQPEVETSPLGDGASPGPEQVKLKKEISLLNGVCLIVGNMIGSGIFVSPKGVLIYSASFGLSLVIWAVGGLFSVFGALCYAELGTTIKKSGASYAY

SEQ ID NO: 64827 - protein, 116 aa, Homo sapiens
MVDSTEYEVASQPEVETSPLGDGASPGPEQVKLKKEISLLNGVCLIVGNMIGSGIFVSPKGVLIYSASFGLSLVIWAVGGLFSVFGALCYAELGTTIKKSGASYAYILEAFGGFLA

SEQ ID NO: 64828 - protein, 629 aa, Homo sapiens
MGCKVLLNIGQQMLRRKVVDCSREETRLSRCLNTFDLVALGVGSTLGAGVYVLAGAVARENAGPAIVISFLIAALASVLAGLCYGEFGARVPKTGSAYLYSYVTVGELWAFITGWNLILSYIIGTSSVARAWSATFDELIGRPIGEFSRTHMTLNAPGVLAENPDIFAVIIILILTGLLTLGVKESAMVNKIFTCINVLVLGFIMVSGFVKGSVKNWQLTEEDFGNTSGRLCLNNDTKEGKPGVGGFMPFGFSGVLSGAATCFYAFVGFDCIATTGEEVKNPQKAIPVGIVASLLICFIAYFGVSAALTLMMPYFCLDNNSPLPDAFKHVGWEGAKYAVAVGSLCALSASLLGSMFPMPRVIYAMAEDGLLFKFLANVNDRTKTPIIATLASGAVAAVMAFLFDLKDLVDLMSIGTLLAYSLVAACVLVLRYQPEQPNLVYQMASTSDELDPADQNELASTNDSQLGFLPEAEMFSLKTILSPKNMEPSKISGLIVNISTSLIAVLIITFCIVTVLGREALTKGALWAVFLLAGSALLCAVVTGVIWRQPESKTKLSFKVPFLPVLPILSIFVNVYLMMQLDQGTWVRFAVWMLIGFIIYFGYGLWHSEEASLDADQARTPDGNLDQCK

SEQ ID NO: 64829 - protein, 121 aa, Homo sapiens
MGCKVLLNIGQQMLRRKVVDCSREETRLSRCLNTFDLVALGVGSTLGAGVYVLAGAVARENAGPAIVISFLIAALASVLAGLCYGEFGARVPKTGSAYLYSYVTVGELWAFITGWNLILSY

SEQ ID NO: 64830 - protein, 698 aa, Homo sapiens
MKIETSGYNSDKLICRGFIGTPAPPVCDSKFLLSPSSDVRMIPCRAALTFARCLIRRKIVTLDSLEDTKLCRCLSTMDLIALGVGSTLGAGVYVLAGEVAKADSGPSIVVSFLIAALASVMAGLCYAEFGARVPKTGSAYLYTYVTVGELWAFITGWNLILSYVIGTSSVARAWSGTFDELLSKQIGQFLRTYFRMNYTGLAEYPDFFAVCLILLLAGLLSFGVKESAWVNKVFTAVNILVLLFVMVAGFVKGNVANWKISEEFLKNISASAREPPSENGTSIYGAGGFMPYGFTGTLAGAATCFYAFVGFDCIATTGEEVRNPQKAIPIGIVTSLLVCFMAYFGVSAALTLMMPYYLLDEKSPLPVAFEYVGWGPAKYVVAAGSLCALSTSLLGSIFPMPRVIYAMAEDGLLFKCLAQINSKTKTPIIATLSSGAVAALMAFLFDLKALVDMMSIGTLMAYSLVAACVLILRYQPGLSYDQPKCSPEKDGLGSSPRVTSKSESQVTMLQRQGFSMRTLFCPSLLPTQQSASLVSFLVGFLAFLVLGLSVLTTYGVHAITRLEAWSLALLALFLVLFVAIVLTIWRQPQNQQKVAFMVPFLPFLPAFSILVNIYLMVQLSADTWVRFSIWMAIGFLIYFSYGIRHSLEGHLRDENNEEDAYPDNVHAAAEEKSAIQANDHHPRNLSSPFIFHEKTSEF

SEQ ID NO: 64831 - protein, 697 aa, Homo sapiens
MKIETSGYNSDKLICRGFIGTPAPPVCDSKFLLSPSSDVRMIPCRAALTFARCLIRRKIVTLDSLEDTKLCRCLSTMDLIALGVGSTLGAGVYVLAGEVAKADSGPSIVVSFLIAALASVMAGLCYAEFGARVPKTGSAYLYTYVTVGELWAFITGWNLILSYVIGTSSVARAWSGTFDELLSKQIGQFLRTYFRMNYTGLAEYPDFFAVCLILLLAGLLSFGVKESAWVNKVFTAVNILVLLFVMVAGFVKGNVANWKISEEFLKNISASAREPPSENGTSIYGAGGFMPYGFTGTLAGAATCFYAFVGFDCIATTGEEVRNPQKAIPIGIVTSLLVCFMAYFGVSAALTLMMPYYLLDEKSPLPVAFEYVGWGPAKYVVAAGSLCALSTSLLGSMFPLPRILFAMARDGLLFRFLARVSKRQSPVAATLTAGVISALMAFLFDLKALVDMMSIGTLMAYSLVAACVLILRYQPGLSYDQPKCSPEKDGLGSSPRVTSKSESQVTMLQRQGFSMRTLFCPSLLPTQQSASLVSFLVGFLAFLVLGLSVLTTYGVHAITRLEAWSLALLALFLVLFVAIVLTIWRQPQNQQKVAFMVPFLPFLPAFSILVNIYLMVQLSADTWVRFSIWMAIGFLIYFSYGIRHSLEGHLRDENNEEDAYPDNVHAAAEEKSAIQANDHHPRNLSSPFIFHEKTSEF

SEQ ID NO: 64832 - protein, 697 aa, Homo sapiens; identical to SEQ ID NO: 64831

SEQ ID NO: 64833 - protein, 658 aa, Homo sapiens
MIPCRAALTFARCLIRRKIVTLDSLEDTKLCRCLSTMDLIALGVGSTLGAGVYVLAGEVAKADSGPSIVVSFLIAALASVMAGLCYAEFGARVPKTGSAYLYTYVTVGELWAFITGWNLILSYVIGTSSVARAWSGTFDELLSKQIGQFLRTYFRMNYTGLAEYPDFFAVCLILLLAGLLSFGVKESAWVNKVFTAVNILVLLFVMVAGFVKGNVANWKISEEFLKNISASAREPPSENGTSIYGAGGFMPYGFTGTLAGAATCFYAFVGFDCIATTGEEVRNPQKAIPIGIVTSLLVCFMAYFGVSAALTLMMPYYLLDEKSPLPVAFEYVGWGPAKYVVAAGSLCALSTSLLGSIFPMPRVIYAMAEDGLLFKCLAQINSKTKTPIIATLSSGAVAALMAFLFDLKALVDMMSIGTLMAYSLVAACVLILRYQPGLSYDQPKCSPEKDGLGSSPRVTSKSESQVTMLQRQGFSMRTLFCPSLLPTQQSASLVSFLVGFLAFLVLGLSVLTTYGVHAITRLEAWSLALLALFLVLFVAIVLTIWRQPQNQQKVAFMVPFLPFLPAFSILVNIYLMVQLSADTWVRFSIWMAIGFLIYFSYGIRHSLEGHLRDENNEEDAYPDNVHAAAEEKSAIQANDHHPRNLSSPFIFHEKTSEF

SEQ ID NO: 64834 - protein, 658 aa, Homo sapiens; identical to SEQ ID NO: 64833

SEQ ID NO: 64835 - protein, 487 aa, Homo sapiens
MGDTGLRKRREDEKSIQSQEPKTTSLQKELGLISGISIIVGTIIGSGIFVSPKSVLSNTEAVGPCLIIWAACGVLATLGALCFAELGTMITKSGGEYPYLMEAYGPIPAYLFSWASLIVIKPTSFAIICLSFSEYVCAPFYVGCKPPQIVVKCLAAAAILFISTVNSLSVRLGSYVQNIFTAAKLVIVAIIIISGLVLLAQGNTKNFDNSFEGAQLSVGAISLAFYNGLWAYDGWNQLNYITEELRNPYRNLPLAIIIGIPLVTACYILMNVSYFTVMTATELLQSQAVAVTFGDRVLYPASWIVPLFVAFSTIGAANGTCFTAGRLIYVAGREGHMLKVLSYISVRRLTPAPAIIFYGIIATIYIIPGDINSLVNYFSFAAWLFYGLTILGLIVMRFTRKELERPIKVPVVIPVLMTLISVFLVLAPIISKPTWEYLYCVLFILSGLLFYFLFVHYKFGWAQKISKPITMHLQMLMEVVPPEEDPE

SEQ ID NO: 64836 - protein, 487 aa, Homo sapiens; identical to SEQ ID NO: 64835

SEQ ID NO: 64837 - protein, 635 aa, Homo sapiens
MARGLPTIASLARLCQKLNRLKPLEDSTMETSLRRCLSTLDLTLLGVGGMVGSGLYVLTGAVAKEVAGPAVLLSFGVAAVASLLAALCYAEFGARVPRTGSAYLFTYVSMGELWAFLIGWNVLLEYIIGGAAVARAWSGYLDSMFSHSIRNFTETHVGSWQVPLLGHYPDFLAAGIILLASAFVSCGARVSSWLNHTFSAISLLVILFIVILGFILAQPHNWSADEGGFAPFGFSGVMAGTASCFYAFVGFDVIAASSEEAQNPRRSVPLAIAISLAIAAGAYILVSTVLTLMVPWHSLDPDSALADAFYQRGYRWAGFIVAAGSICAMNTVLLSLLFSLPRIVYAMAADGLFFQVFAHVHPRTQVPVAGTLAFGLLTAFLALLLDLESLVQFLSLGTLLAYTFVATSIIVLRFQKSSPPSSPGPASPGPLTKQQSSFSDHLQLVGTVHASVPEPGELKPALRPYLGFLDGYSPGAVVTWALGVMLASAITIGCVLVFGNSTLHLPHWGYILLLLLTSVMFLLSLLVLGAHQQQYREDLFQIPMVPLIPALSIVLNICLMLKLSYLTWVRFSIWLLMGLAVYFGYGIRHSKENQRELPGLNSTHYVVFPRGSLEETVQAMQPPSQAPAQDPGHME

SEQ ID NO: 64838 - protein, 635 aa, Homo sapiens; identical to SEQ ID NO: 64837

SEQ ID NO: 64839 - protein, 82 aa, Homo sapiens
MARGLPTIASLARLCQKLNRLKPLEDSTMETSLRRCLSTLDLTLLGVGGMVGSGLYVLTGAVAKEVAGPAVLLSFGVAAVAS

SEQ ID NO: 64840 - protein, 973 aa, Homo sapiens
MYNMRRLSLSPTFSMGFHLLVTVSLLFSHVDHVIAETEMEGEGNETGECTGSYYCKKGVILPIWEPQDPSFGDKIARATVYFVAMVYMFLGVSIIADRFMSSIEVITSQEKEITIKKPNGETTKTTVRIWNETVSNLTLMALGSSAPEILLSVIEVCGHNFTAGDLGPSTIVGSAAFNMFIIIALCVYVVPDGETRKIKHLRVFFVTAAWSIFAYTWLYIILSVISPGVVEVWEGLLTFFFFPICVVFAWVADRRLLFYKYVYKRYRAGKQRGMIIEHEGDRPSSKTEIEMDGKVVNSHVENFLDGALVLEVDERDQDDEEARREMARILKELKQKHPDKEIEQLIELANYQVLSQQQKSRAFYRIQATRLMTGAGNILKRHAADQARKAVSMHEVNTEVTENDPVSKIFFEQGTYQCLENCGTVALTIIRRGGDLTNTVFVDFRTEDGTANAGSDYEFTEGTVVFKPGDTQKEIRVGIIDDDIFEEDENFLVHLSNVKVSSEASEDGILEANHVSTLACLGSPSTATVTIFDDDHAGIFTFEEPVTHVSESIGIMEVKVLRTSGARGNVIVPYKTIEGTARGGGEDFEDTCGELEFQNDEIVKTISVKVIDDEEYEKNKTFFLEIGEPRLVEMSEKKALLLNELGGFTITGKYLFGQPVFRKVHAREHPILSTVITIADEYDDKQPLTSKEEEERRIAEMGRPILGEHTKLEVIIEESYEFKSTVDKLIKKTNLALVVGTNSWREQFIEAITVSAGEDDDDDECGEEKLPSCFDYVMHFLTVFWKVLFAFVPPTEYWNGWACFIVSILMIGLLTAFIGDLASHFGCTIGLKDSVTAVVFVALGTSVPDTFASKVAATQDQYADASIGNVTGSNAVNVFLGIGVAWSIAAIYHAANGEQFKVSPGTLAFSVTLFTIFAFINVGVLLYRRRPEIGGELGGPRTAKLLTSCLFVLLWLLYIFFSSLEAYCHIKGF

SEQ ID NO: 64841 - protein, 973 aa, Homo sapiens; identical to SEQ ID NO: 64840

SEQ ID NO: 64842 - protein, 937 aa, Homo sapiens
MYNMRRLSLSPTFSMGFHLLVTVSLLFSHVDHVIAETEMEGEGNETGECTGSYYCKKGVILPIWEPQDPSFGDKIARATVYFVAMVYMFLGVSIIADRFMSSIEVITSQEKEITIKKPNGETTKTTVRIWNETVSNLTLMALGSSAPEILLSVIEVCGHNFTAGDLGPSTIVGSAAFNMFIIIALCVYVVPDGETRKIKHLRVFFVTAAWSIFAYTWLYIILSVISPGVVEVWEGLLTFFFFPICVVFAWVADRRLLFYKYVYKRYRAGKQRGMIIEHEGDRPSSKTEIEMDGKVVNSHVENFLDGALVLEVDERDQDDEEARREMARILKELKQKHPDKEIEQLIELANYQVLSQQQKSRAFYRIQATRLMTGAGNILKRHAADQARKAVSMHEVNTEVTENDPVSKIFFEQGTYQCLENCGTVALTIIRRGGDLTNTVFVDFRTEDGTANAGSDYEFTEGTVVFKPGDTQKEIRVGIIDDDIFEEDENFLVHLSNVKVSSEASEDGILEANHVSTLACLGSPSTATVTIFDDDHAGIFTFEEPVTHVSESIGIMEVKVLRTSGARGNVIVPYKTIEGTARGGGEDFEDTCGELEFQNDEIVKIITIRIFDREEYEKECSFSLVLEEPKWIRRGMKGGFTITDEYDDKQPLTSKEEEERRIAEMGRPILGEHTKLEVIIEESYEFKSTVDKLIKKTNLALVVGTNSWREQFIEAITVSAGEDDDDDECGEEKLPSCFDYVMHFLTVFWKVLFAFVPPTEYWNGWACFIVSILMIGLLTAFIGDLASHFGCTIGLKDSVTAVVFVALGTSVPDTFASKVAATQDQYADASIGNVTGSNAVNVFLGIGVAWSIAAIYHAANGEQFKVSPGTLAFSVTLFTIFAFINVGVLLYRRRPEIGGELGGPRTAKLLTSCLFVLLWLLYIFFSSLEAYCHIKGF

SEQ ID NO: 64843 - protein, 973 aa, Homo sapiens; identical to SEQ ID NO: 64840

SEQ ID NO: 64844 - protein, 937 aa, Homo sapiens; identical to SEQ ID NO: 64842

SEQ ID NO: 64845 - protein, 968 aa, Homo sapiens
MYNMRRLSLSPTFSMGFHLLVTVSLLFSHVDHVIAETEMEGEGNETGECTGSYYCKKGVILPIWEPQDPSFGDKIARATVYFVAMVYMFLGVSIIADRFMSSIEVITSQEKEITIKKPNGETTKTTVRIWNETVSNLTLMALGSSAPEILLSVIEVCGHNFTAGDLGPSTIVGSAAFNMFIIIALCVYVVPDGETRKIKHLRVFFVTAAWSIFAYTWLYIILSVISPGVVEVWEGLLTFFFFPICVVFAWVADRRLLFYKYVYKRYRAGKQRGMIIEHEGDRPSSKTEIEMDGKVVNSHVENFLDGALVLEVDERDQDDEEARREMARILKELKQKHPDKEIEQLIELANYQVLSQQQKSRAFYRIQATRLMTGAGNILKRHAADQARKAVSMHEVNTEVTENDPVSKIFFEQGTYQCLENCGTVALTIIRRGGDLTNTVFVDFRTEDGTANAGSDYEFTEGTVVFKPGDTQKEIRVGIIDDDIFEEDENFLVHLSNVKVSSEASEDGILEANHVSTLACLGSPSTATVTIFDDDHAGIFTFEEPVTHVSESIGIMEVKVLRTSGARGNVIVPYKTIEGTARGGGEDFEDTCGELEFQNDEIVKTISVKVIDDEEYEKNKTFFLEIGEPRLVEMSEKKALLLNELGGFTITGQPVFRKVHAREHPILSTVITIADEYDDKQPLTSKEEEERRIAEMGRPILGEHTKLEVIIEESYEFKSTVDKLIKKTNLALVVGTNSWREQFIEAITVSAGEDDDDDECGEEKLPSCFDYVMHFLTVFWKVLFAFVPPTEYWNGWACFIVSILMIGLLTAFIGDLASHFGCTIGLKDSVTAVVFVALGTSVPDTFASKVAATQDQYADASIGNVTGSNAVNVFLGIGVAWSIAAIYHAANGEQFKVSPGTLAFSVTLFTIFAFINVGVLLYRRRPEIGGELGGPRTAKLLTSCLFVLLWLLYIFFSSLEAYCHIKGF

SEQ ID NO: 64846 - protein, 937 aa, Homo sapiens; identical to SEQ ID NO: 64842

SEQ ID NO: 64847 - protein, 937 aa, Homo sapiens; identical to SEQ ID NO: 64842

SEQ ID NO: 64848 - protein, 664 aa, Homo sapiens
MRRLSLSPTFSMGFHLLVTVSLLFSHVDHVIAETEMEGEGNETGECTGSYYCKKGVILPIWEPQDPSFGDKIARATVYFVAMVYMFLGVSIIADRFMSSIEVITSQEKEITIKKPNGETTKTTVRIWNETVSNLTLMALGSSAPEILLSVIEVCGHNFTAGDLGPSTIVGSAAFNMFIIIALCVYVVPDGETRKIKHLRVFFVTAAWSIFAYTWLYIILSVISPGVVEVWEGLLTFFFFPICVVFAWVADRRLLFYKYVYKRYRAGKQRGMIIEHEGDRPSSKTEIEMDGKVVNSHVENFLDGALVLEVDERDQDDEEARREMARILKELKQKHPDKEIEQLIELANYQVLSQQQKSRAFYRIQATRLMTGAGNILKRHAADQARKAVSMHEVNTEVTENDPVSKIFFEQGTYQCLENCGTVALTIIRRGGDLTNTVFVDFRTEDGTANAGSDYEFTEGTVVFKPGDTQKEIRVGIIDDDIFEEDENFLVHLSNVKVSSEASEDGILEANHVSTLACLGSPSTATVTIFDDDHAGIFTFEEPVTHVSESIGIMEVKVLRTSGARGNVIVPYKTIEGTARGGGEDFEDTCGELEFQNDEIVKTISVKVIDDEEYEKNKTFFLEIGEPRLVEMSEKKGRSLPLEYLTVRNMRKSAVSPLCLRNQNG

SEQ ID NO: 64849 - protein, 965 aa, Homo sapiens
MYNMRRLSLSPTFSMGFHLLVTVSLLFSHVDHVIAETEMEGEGNETGECTGSYYCKKGVILPIWEPQDPSFGDKIARATVYFVAMVYMFLGVSIIADRFMSSIEVITSQEKEITIKKPNGETTKTTVRIWNETVSNLTLMALGSSAPEILLSVIEVCGHNFTAGDLGPSTIVGSAAFNMFIIIALCVYVVPDGETRKIKHLRVFFVTAAWSIFAYTWLYIILSVISPGVVEVWEGLLTFFFFPICVVFAWVADRRLLFYKYVYKRYRAGKQRGMIIEHEGDRPSSKTEIEMDGKVVNSHVENFLDGALVLEVDERDQDDEEARREMARILKELKQKHPDKEIEQLIELANYQVLSQQQKSRAFYRIQATRLMTGAGNILKRHAADQARKAVSMHEVNTEVTENDPVSKIFFEQGTYQCLENCGTVALTIIRRGGDLTNTVFVDFRTEDGTANAGSDYEFTEGTVVFKPGDTQKEIRVGIIDDDIFEEDENFLVHLSNVKVSSEASEDGILEANHVSTLACLGSPSTATVTIFDDDHAGIFTFEEPVTHVSESIGIMEVKVLRTSGARGNVIVPYKTIEGTARGGGEDFEDTCGELEFQNDEIVKIITIRIFDREEYEKECSFSLVLEEPKWIRRGMKGGFTITGKYLFGQPVFRKVHAREHPILSTVITIADEYDDKQPLTSKEEEERRIAEMGRPILGEHTKLEVIIEESYEFKSTVDKLIKKTNLALVVGTNSWREQFIEAITVSAGEDDDDDECGEEKLPSCFDYVMHFLTVFWKVLFAFVPPTEYWNGWACFIVSILMIGLLTAFIGDLASHFGCTIGLKDSVTAVVFVALGTSVPDTFASKVAATQDQYADASIGNVTGSNAVNVFLGIGVAWSIAAIYHAANGEQFKVSPGTLAFSVTLFTIFAFINVGVLLYRRRPEIGGELGGPRTAKLLTSCLFVLLWLLYIFFSSLEAYCHIKGF

SEQ ID NO: 64850 - protein, 73 aa, Homo sapiens
MYNMRRLSLSPTFSMGFHLLVTVSLLFSHVDHVIAETEMEGEGNETGECTGSYYCKKGVILPIWEPQDPSFGD

SEQ ID NO: 64851 - protein, 87 aa, Homo sapiens
MYNMRRLSLSPTFSMGFHLLVTVSLLFSHVDHVIAETEMEGEGNETGECTGSYYCKKGVILPIWEPQDPSFGDKIARATVYFVAMVY

SEQ ID NO: 64852 - protein, 87 aa, Homo sapiens; identical to SEQ ID NO: 64851

SEQ ID NO: 64853 - protein, 960 aa, Homo sapiens
MYNMRRLSLSPTFSMGFHLLVTVSLLFSHVDHVIAETEMEGEGNETGECTGSYYCKKGVILPIWEPQDPSFGDKIARATVYFVAMVYMFLGVSIIADRFMSSIEVITSQEKEITIKKPNGETTKTTVRIWNETVSNLTLMALGSSAPEILLSVIEVCGHNFTAGDLGPSTIVGSAAFNMFIIIALCVYVVPDGETRKIKHLRVFFVTAAWSIFAYTWLYIILSVISPGVVEVWEGLLTFFFFPICVVFAWVADRRLLFYKYVYKRYRAGKQRGMIIEHEGDRPSSKTEIEMDGKVVNSHVENFLDGALVLEVDERDQDDEEARREMARILKELKQKHPDKEIEQLIELANYQVLSQQQKSRAFYRIQATRLMTGAGNILKRHAADQARKAVSMHEVNTEVTENDPVSKIFFEQGTYQCLENCGTVALTIIRRGGDLTNTVFVDFRTEDGTANAGSDYEFTEGTVVFKPGDTQKEIRVGIIDDDIFEEDENFLVHLSNVKVSSEASEDGILEANHVSTLACLGSPSTATVTIFDDDHAGIFTFEEPVTHVSESIGIMEVKVLRTSGARGNVIVPYKTIEGTARGGGEDFEDTCGELEFQNDEIVKIITIRIFDREEYEKECSFSLVLEEPKWIRRGMKEGFWLSSQPVFRKVHAREHPILSTVITIADEYDDKQPLTSKEEEERRIAEMGRPILGEHTKLEVIIEESYEFKSTVDKLIKKTNLALVVGTNSWREQFIEAITVSAGEDDDDDECGEEKLPSCFDYVMHFLTVFWKVLFAFVPPTEYWNGWACFIVSILMIGLLTAFIGDLASHFGCTIGLKDSVTAVVFVALGTSVPDTFASKVAATQDQYADASIGNVTGSNAVNVFLGIGVAWSIAAIYHAANGEQFKVSPGTLAFSVTLFTIFAFINVGVLLYRRRPEIGGELGGPRTAKLLTSCLFVLLWLLYIFFSSLEAYCHIKGF

SEQ ID NO: 64854 - protein, 937 aa, Homo sapiens
MYNMRRLSLSPTFSMGFHLLVTVSLLFSHVDHVIAETEMEGEGNETGECTGSYYCKKGVILPIWEPQDPSFGDKIARATVYFVAMVYMFLGVSIIADRFMSSIEVITSQEKEITIKKPNGETTKTTVRIWNETVSNLTLMALGSSAPEILLSVIEVCGHNFTAGDLGPSTIVGSAAFNMFIIIALCVYVVPDGETRKIKHLRVFFVTAAWSIFAYTWLYIILSVISPGVVEVWEGLLTFFFFPICVVFAWVADRRLLFYKYVYKRYRAGKQRGMIIEHEGDRPSSKTEIEMDGKVVNSHVENFLDGALVLEVDERDQDDEEARREMARILKELKQKHPDKEIEQLIELANYQVLSQQQKSRAFYRIQATRLMTGAGNILKRHAADQARKAVSMHEVNTEVTENDPVSKIFFEQGTYQCLENCGTVALTIIRRGGDLTNTVFVDFRTEDGTANAGSDYEFTEGTVVFKPGDTQKEIRVGIIDDDIFEEDENFLVHLSNVKVSSEASEDGILEANHVSTLACLGSPSTATVTIFDDDHAGIFTFEEPVTHVSESIGIMEVKVLRTSGARGNVIVPYKTIEGTARGGGEDFEDTCGELEFQNDEIVKIITIRIFDREEYEKECSFSLVLEEPKWIRRGMKEGFCFTDEYDDKQPLTSKEEEERRIAEMGRPILGEHTKLEVIIEESYEFKSTVDKLIKKTNLALVVGTNSWREQFIEAITVSAGEDDDDDECGEEKLPSCFDYVMHFLTVFWKVLFAFVPPTEYWNGWACFIVSILMIGLLTAFIGDLASHFGCTIGLKDSVTAVVFVALGTSVPDTFASKVAATQDQYADASIGNVTGSNAVNVFLGIGVAWSIAAIYHAANGEQFKVSPGTLAFSVTLFTIFAFINVGVLLYRRRPEIGGELGGPRTAKLLTSCLFVLLWLLYIFFSSLEAYCHIKGF

SEQ ID NO: 64855 - protein, 138 aa, Homo sapiens
MYNMRRLSLSPTFSMGFHLLVTVSLLFSHVDHVIAETEMEGEGNETGECTGSYYCKKGVILPIWEPQDPSFGDKIARATVYFVAMVYMFLGVSIIADRFMSSIEVITSQEKEITIKKPNGETTKTTVRIWNETVSNLT

SEQ ID NO: 64856 - protein, 968 aa, Homo sapiens; identical to SEQ ID NO: 64845

SEQ ID NO: 64857 - protein, 921 aa, Homo sapiens
MAPLALVGVTLLLAAPPCSGAATPTPSLPPPPANDSDTSTGGCQGSYRCQPGVLLPVWEPDDPSLGDKAARAVVYFVAMVYMFLGVSIIADRFMAAIEVITSKEKEITITKANGETSVGTVRIWNETVSNLTLMALGSSAPEILLSVIEVCGHNFQAGELGPGTIVGSAAFNMFVVIAVCIYVIPAGESRKIKHLRVFFVTASWSIFAYVWLYLILAVFSPGVVQVWEALLTLVFFPVCVVFAWMADKRLLFYKYVYKRYRTDPRSGIIIGAEGDPPKSIELDGTFVGAEAPGELGGLGPGPAEARELDASRREVIQILKDLKQKHPDKDLEQLVGIANYYALLHQQKSRAFYRIQATRLMTGAGNVLRRHAADASRRAAPAEGAGEDEDDGASRIFFEPSLYHCLENCGSVLLSVTCQGGEGNSTFYVDYRTEDGSAKAGSDYEYSEGTLVFKPGETQKELRIGIIDDDIFEEDEHFFVRLLNLRVGDAQGMFEPDGGGRPKGRLVAPLLATVTILDDDHAGIFSFQDRLLHVSECMGTVDVRVVRSSGARGTVRLPYRTVDGTARGGGVHYEDACGELEFGDDETMKTLQVKIVDDEEYEKKDNFFIELGQPQWLKRGISALLLNQGDGDRKLTAEEEEARRIAEMGKPVLGENCRLEVIIEESYDFKNTVDKLIKKTNLALVIGTHSWREQFLEAITVSAGDEEEEEDGSREERLPSCFDYVMHFLTVFWKVLFACVPPTEYCHGWACFGVSILVIGLLTALIGDLASHFGCTVGLKDSVNAVVFVALGTSIPDTFASKVAALQDQCADASIGNVTGSNAVNVFLGLGVAWSVAAVYWAVQGRPFEVRTGTLAFSVTLFTVFAFVGIAVLLYRRRPHIGGELGGPRGPKLATTALFLGLWLLYILFASLEAYCHIRGF

SEQ ID NO: 64858 - protein, 825 aa, Homo sapiens
MFVVIAVCIYVIPAGESRKIKHLRVFFVTASWSIFAYVWLYLILAVFSPGVVQVWEALLTLVFFPVCVVFAWMADKRLLFYKYVYKRYRTDPRSGIIIGAEGDPPKSIELDGTFVGAEAPGELGGLGPGPAEARELDASRREVIQILKDLKQKHPDKDLEQLVGIANYYALLHQQKSRAFYRIQATRLMTGAGNVLRRHAADASRRAAPAEGAGEDEDDGASRIFFEPSLYHCLENCGSVLLSVTCQGGEGNSTFYVDYRTEDGSAKAGSDYEYSEGTLVFKPGETQKELRIGIIDDDIFEEDEHFFVRLLNLRVGDAQGMFEPDGGGRPKGRLVAPLLATVTILDDDHAGIFSFQDRLLHVSECMGTVDVRVVRSSGARGTVRLPYRTVDGTARGGGVHYEDACGELEFGDDETMKTLQVKIVDDEEYEKKDNFFIELGQPQWLKRGISALLLNQGDGDRKLTAEEEEARRIAEMGKPVLGENCRLEVIIEESYDFKNTVDKLIKKTNLALVIGTHSWREQFLEAITVSAGDEEEEEDGSREERLPSCFDYVMHFLTVFWKVLFACVPPTEYCHGWACFGVSILVIGLLTALIGDLASHFGCTVGLKDSVNAVVFVALGTSIPGNTLGDFGGVGSQMSQAGATQDPAKMRHVRQQGGGAAGPVRRRVHRQRDRLQRGERVPWPGRRLVCGRRVLGGAGPPLRGAHWHAGLLRHALHRLRLRGHCRAAVPAPAAHRRRAGRPARTQARHHRALPGPLAPVHPLRQPGGVLPHPGLLGPRAETRPHRPPGARDSAAPALGPWSPFPPRLGLLSWDSASLLRPLPWL

SEQ ID NO: 64859 - protein, 384 aa, Homo sapiens
MGTVDVRVVRSSGARGTVRLPYRTVDGTARGGGVHYEDACGELEFGDDETMKTLQVKIVDDEEYEKKDNFFIELGQPQWLKRGISALLLNQGDGDRKLTAEEEEARRIAEMGKPVLGENCRLEVIIEESYDFKNTVDKLIKKTNLALVIGTHSWREQFLEAITVSAGDEEEEEDGSREERLPSCFDYVMHFLTVFWKVLFACVPPTEYCHGWACFGVSILVIGLLTALIGDLASHFGCTVGLKDSVNAVVFVALGTSIPDTFASKVAALQDQCADASIGNVTGSNAVNVFLGLGVAWSVAAVYWAVQGRPFEVRTGTLAFSVTLFTVFAFVGIAVLLYRRRPHIGGELGGPRGPKLATTALFLGLWLLYILFASLEAYCHIRGF

SEQ ID NO: 64860 - protein, 677 aa, Homo sapiens
MADKRLLFYKYVYKRYRTDPRSGIIIGAEGDPPKSIELDGTFVGAEAPGELGGLGPGPAEARELDASRREVIQILKDLKQKHPDKDLEQLVGIANYYALLHQQKSRAFYRIQATRLMTGAGNVLRRHAADASRRAAPAEGAGEDEDDGASRIFFEPSLYHCLENCGSVLLSVTCQGGEGNSTFYVDYRTEDGSAKAGSDYEYSEGTLVFKPGETQKELRIGIIDDDIFEEDEHFFVRLLNLRVGDAQGMFEPDGGGRPKGRLVAPLLATVTILDDDHAGIFSFQDRLLHVSECMGTVDVRVVRSSGARGTVRLPYRTVDGTARGGGVHYEDACGELEFGDDETMKTLQVKIVDDEEYEKKDNFFIELGQPQWLKRGISALLLNQGDGDRKLTAEEEEARRIAEMGKPVLGENCRLEVIIEESYDFKNTVDKLIKKTNLALVIGTHSWREQFLEAITVSAGDEEEEEDGSREERLPSCFDYVMHFLTVFWKVLFACVPPTEYCHGWACFGVSILVIGLLTALIGDLASHFGCTVGLKDSVNAVVFVALGTSIPDTFASKVAALQDQCADASIGNVTGSNAVNVFLGLGVAWSVAAVYWAVQGRPFEVRTGTLAFSVTLFTVFAFVGIAVLLYRRRPHIGGELGGPRGPKLATTALFLGLWLLYILFASLEAYCHIRGF

SEQ ID NO: 64861 - protein, 815 aa, Homo sapiens
MVLRSGICGLSPHRIFPSLLVVVALVGLLPVLRSHGLQLSPTASTIRSSEPPRERSIGDVTTAPPEVTPESRPVNHSVTDHGMKPRKAFPVLGIDYTHVRTPFEISLWILLACLMKIGFHVIPTISSIVPESCLLIVVGLLVGGLIKGVGETPPFLQSDVFFLFLLPPIILDAGYFLPLRQFTENLGTILIFAVVGTLWNAFFLGGLMYAVCLVGGEQINNIGLLDNLLFGSIISAVDPVAVLAVFEEIHINELLHILVFGESLLNDAVTVVLYHLFEEFANYEHVGIVDIFLGFLSFFVVALGGVLVGVVYGVIAAFTSRFTSHIRVIEPLFVFLYSYMAYLSAELFHLSGIMALIASGVVMRPYVEANISHKSHTTIKYFLKMWSSVSETLIFIFLGVSTVAGSHHWNWTFVISTLLFCLIARVLGVLGLTWFINKFRIVKLTPKDQFIIAYGGLRGAIAFSLGYLLDKKHFPMCDLFLTAIITVIFFTVFVQGMTIRPLVDLLAVKKKQETKRSINEEIHTQFLDHLLTGIEDICGHYGHHHWKDKLNRFNKKYVKKCLIAGERSKEPQLIAFYHKMEMKQAIELVESGGMGKIPSAVSTVSMQNIHPKSLPSERILPALSKDKEEEIRKILRNNLQKTRQRLRSYNRHTLVADPYEEAWNQMLLRRQKARQLEQKINNYLTVPAHKLDSPTMSRARIGSDPLAYEPKEDLPVITIDPASPQSPESVDLVNEELKGKVLGLSRDPAKVAEEDEDDDGGIMMRSKETSSPGTDDVFTPAPSDSPSSQRIQRCLSDPGPHPEPGEGEPFFPKGQ

SEQ ID NO: 64862 - protein, 135 aa, Homo sapiens
MVLRSGICGLSPHRIFPSLLVVVALVGLLPVLRSHGLQLSPTASTIRSSEPPRERSIGDVTTAPPEVTPESRPVNHSVTDHGMKPRKAFPVLGIDYTHVRTPFEISLWILLACLMKIGFPCDPHYLKHRPGELPA

SEQ ID NO: 64863 - protein, 555 aa, Homo sapiens
MVLRSGICGLSPHRIFPSLLVVVALVGLLPVLRSHGLQLSPTASTIRSSEPPRERSIGDVTTAPPEVTPESRPVNHSVTDHGMKPRKAFPVLGIDYTHVRTPFEISLWILLACLMKIGFHVIPTISSIVPESCLLIVVGLLVGGLIKGVGETPPFLQSDVFFLFLLPPIILDAGYFLPLRQFTENLGTILIFAVVGTLWNAFFLGGLMYAVCLVGGEQINNIGLLDNLLFGSIISAVDPVAVLAVFEEIHINELLHILVFGESLLNDAVTVVLYHLFEEFANYEHVGIVDIFLGFLSFFVVALGGVLVGVVYGVIAAFTSRFTSHIRVIEPLFVFLYSYMAYLSAELFHLSGIMALIASGVVMRPYVEANISHKSHTTIKYFLKMWSSVSETLIFIFLGVSTVAGSHHWNWTFVISTLLFCLIARVLGVLGLTWFINKFRIVKLTPKDQFIIAYGGLRGAIAFSLGYLLDKKHFPMCDLFLTAIITVIFFTVFVQVLGQGRAGPCLGDPHRLFPWKERKACDLKCDSSPSSTTNLLCDLGRATPPFWASVSSIVK

SEQ ID NO: 64864 - protein, 319 aa, Homo sapiens [sequence omitted]

SEQ ID NO: 64865 - protein, 224 aa, Homo sapiens
MEMKQAIELVESGGMGKIPSAVSTVSMQNIHPKSLPSERILPALSKDKEEEIRKILRNNLQKTRQRLRSYNRHTLVADPYEEAWNQMLLRRQKARQLEQKINNYLTVPAHKLDSPTMSRARIGSDPLAYEPKEDLPVITIDPASPQSPESVDLVNEELKGKVLGLSRDPAKVAEEDEDDDGGIMMRSKETSSPGTDDVFTPAPSDSPSSQRIQRCLSDPGPHPE

SEQ ID NO: 64866 - protein, 476 aa, Homo sapiens
MAYLSAELFHLSGIMALIASGVVMRPYVEANISHKSHTTIKYFLKMWSSVSETLIFIFLGVSTVAGSHHWNWTFVISTLLFCLIARVLGVLGLTWFINKFRIVKLTPKDQFIIAYGGLRGAIAFSLGYLLDKKHFPMCDLFLTAIITVIFFTVFVQGMTIRPLVDLLAVKKKQETKRSINEEIHTQFLDHLLTGIEDICGHYGHHHWKDKLNRFNKKYVKKCLIAGERSKEPQLIAFYHKMEMKQAIELVESGGMGKIPSAVSTVSMQNIHPKSLPSERILPALSKDKEEEIRKILRNNLQKTRQRLRSYNRHTLVADPYEEAWNQMLLRRQKARQLEQKINNYLTVPAHKLDSPTMSRARIGSDPLAYEPKEDLPVITIDPASPQSPESVDLVNEELKGKVLGLSRDPAKVAEEDEDDDGGIMMRSKETSSPGTDDVFTPAPSDSPSSQRIQRCLSDPGPHPEPGEGEPFFPKGQ

SEQ ID NO: 64867 - protein, 812 aa, Homo sapiens
MEPLGNWRSLRAPLPPMLLLLLLQVAGPVGALAETLLNAPRAMGTSSSPPSPASVVAPGTTLFEESRLPVFTLDYPHVQIPFEITLWILLASLAKIGFHLYHKLPTIVPESCLLIMVGLLLGGIIFGVDEKSPPAMKTDVFFLYLLPPIVLDAGYFMPTRPFFENIGTIFWYAVVGTLWNSIGIGVSLFGICQIEAFGLSDITLLQNLLFGSLISAVDPVAVLAVFENIHVNEQLYILVFGESLLNDAVTVVLYNLFKSFCQMKTIETIDVFAGIANFFVVGIGGVLIGIFLGFIAAFTTRFTHNIRVIEPLFVFLYSYLSYITAEMFHLSGIMAITACAMTMNKYVEENVSQKSYTTIKYFMKMLSSVSETLIFIFMGVSTVGKNHEWNWAFVCFTLAFCLMWRALGVFVLTQVINRFRTIPLTFKDQFIIAYGGLRGAICFALVFLLPAAVFPRKKLFITAAIVVIFFTVFILGITIRPLVEFLDVKRSNKKQQAVSEEIYCRLFDHVKTGIEDVCGHWGHNFWRDKFKKFDDKYLRKLLIRENQPKSSIVSLYKKLEIKHAIEMAETGMISTVPTFASLNDCREEKIRKVTSSETDEIRELLSRNLYQIRQRTLSYNRHSLTADTSERQAKEILIRRRHSLRESIRKDSSLNREHRASTSTSRYLSLPKNTKLPEKLQKRRTISIADGNSSDSDADAGTTVLNLQPRARRFLPEQFSKKSPQSYKMEWKNEVDVDSGRDMPSTPPTPHSREKGTQTSGLLQQPLLSKDQSGSEREDSLTEGIPPKPPPRLVWRASEPGSRKARFGSEKP

SEQ ID NO: 64868 - protein, 834 aa, Homo sapiens
MWGLGARGPDRGLLLALALGGLARAGGVEVEPGGAHGESGGFQVVTFEWAHVQDPYVIALWILVASLAKIGFHLSHKVTSVVPESALLIVLGLVLGGIVWAADHIASFTLTPTVFFFYLLPPIVLDAGYFMPNRLFFGNLGTILLYAVVGTVWNAATTGLSLYGVFLSGLMGDLQIGLLDFLLFGSLMAAVDPVAVLAVFEEVHVNEVLFIIVFGESLLNDAVTVVLYNVFESFVALGGDNVTGVDCVKGIVSFFVVSLGGTLVGVVFAFLLSLVTRFTKHVRIIEPGFVFIISYLSYLTSEMLSLSAILAITFCGICCQKYVKANISEQSATTVRYTMKMLASSAETIIFMFLGISAVNPFIWTWNTAFVLLTLVFISVYRAIGVVLQTWLLNRYRMVQLEPIDQVVLSYGGLRGAVAFALVVLLDGDKVKEKNLFVSTTIIVVFFTVIFQGLTIKPLVQWLKVKRSEHREPRLNEKLHGRAFDHILSAIEDISGQIGHNYLRDKWSHFDRKFLSRVLMRRSAQKSRDRILNVFHELNLKDAISYVAEGERRGSLAFIRSPSTDNVVNVDFTPRSSTVEASVSYLLRENVSAVCLDMQSLEQRRRSIRDAEDMVTHHTLQQYLYKPRQEYKHLYSRHELTPTEDEKQDREIFHRTMRKRLESFKSTKLGLNQNKKAAKLYKRERAQKRRNSSIPNGKLPMESPAQNFTIKEKDLELSDTEEPPNYDEEMSGGIEFLASVTKDTASDSPAGIDNPVFSPDEALDRSLLARLPPWLSPGETVVPSQRARTQIPYSPGTFCRLMPFRLSSKSVDSFLQADGPEERPPAALPESTHM

SEQ ID NO: 64869 - protein, 358 aa, Homo sapiens
MSADAAAGAPLPRLCCLEKGPNGYGFHLHGEKGKLGQYIRLVEPGSPAEKAGLLAGDRLVEVNGENVEKETHQQVVSRIRAALNAVRLLVVDPETDEQLQKLGVQVREELLRAQEAPGQAEPPAAAEVQGAGNENEPREADKSHPEQRELRPRLCTMKKGPSGYGFNLHSDKSKPGQFIRSVDPDSPAEASGLRAQDRIVEVNGVCMEGKQHGDVVSAIRAGGDETKLLVVDRETDEFFKKCRVIPSQEHLNGPLPVPFTNGEIQKENSREALAEAALESPRPALVRSASSDTSEELNSQDSPPKQDSTAPSSTSSSDPILDFNISLAMAKERAHQKRSSKRAPQMDWSKKNELFSNL

SEQ ID NO: 64870 - protein, 273 aa, Homo sapiens
MSADAAAGAPLPRLCCLEKETHQQVVSRIRAALNAVRLLVVDPETDEQLQKLGVQVREELLRAQEAPGQAEPPAAAEVQGAGNENEPREADKSHPEQRELRPRLCTMKKGPSGYGFNLHSDKSKPGQFIRSVDPDSPAEASGLRAQDRIVEVNGVCMEGKQHGDVVSAIRAGGDGSGGGNQRGAEFPRQPPKTGLHSALVYLLLRPHPRLQHLPGHGQREGPPETQQQTGPADGLEQEKRTLQQPLSALLPPSDWQGRASIPPHLFPSPQLLP

SEQ ID NO: 64871 - protein, 337 aa, Homo sapiens
MAAPEPLRPRLCRLVRGEQGYGFHLHGEKGRRGQFIRRVEPGSPAEAAALRAGDRLVEVNGVNVEGETHHQVVQRIKAVEGQTRLLVVDQETDEELRRRQLTCTEEMAQRGLPPAHDPWEPKPDWAHTGSHSSEAGKKDVSGPLRELRPRLCHLRKGPQGYGFNLHSDKSRPGQYIRSVDPGSPAARSGLRAQDRLIEVNGQNVEGLRHAEVVASIKAREDEARLLVVDPETDEHFKRLRVTPTEEHVEGPLPSPVTNGTSPAQLNGGSACSSRSDLPGSDKDTEDGSAWKQDPFQESGLHLSPTAAEAKEKARAMRVNKRAPQMDWNRKREIFSNF

SEQ ID NO: 64872 - protein, 326 aa, Homo sapiens
MAAPEPLRPRLCRLVRGEQGYGFHLHGEKGRRGQFIRRVEPGSPAEAAALRAGDRLVEVNGVNVEGETHHQVVQRIKAVEGQTRLLVVDQETDEELRRRQLTCTEEMAQRGLPPAHDPWEPKPDWAHTGSHSSEAGKKDVSGPLRELRPRLCHLRKGPQGYGFNLHSDKSRPGQYIRSVDPGSPAARSGLRAQDRLIEVNGQNVEGLRHAEVVASIKAREDEARLLVVDPETDEHFKRLRVTPTEEHVEGPLPSPVTNGTSPAQLNGGSACSSRSDLPGSDKDTEESGLHLSPTAAEAKEKARAMRVNKRAPQMDWNRKREIFSNF

SEQ ID NO: 64873 - protein, 798 aa, Homo sapiens
MALQMFVTYSPWNCLLLLVALECSEASSDLNESANSTAQYASNAWFAAASSEPEEGISVFELDYDYVQIPYEVTLWILLASLAKIGFHLYHRLPGLMPESCLLILVGALVGGIIFGTDHKSPPVMDSSIYFLYLLPPIVLEGGYFMPTRPFFENIGSILWWAVLGALINALGIGLSLYLICQVKAFGLGDVNLLQNLLFGSLISAVDPVAVLAVFEEARVNEQLYMMIFGEALLNDGITVVLYNMLIAFTKMHKFEDIETVDILAGCARFIVVGLGGVLFGIVFGFISAFITRFTQNISAIEPLIVFMFSYLSYLAAETLYLSGILAITACAVTMKKYVEENVSQTSYTTIKYFMKMLSSVSETLIFIFMGVSTVGKNHEWNWAFICFTLAFCQIWRAISVFALFYISNQFRTFPFSIKDQCIIFYSGVRGAGSFSLAFLLPLSLFPRKKMFVTATLVVIYFTVFIQGITVGPLVRYLDVKKTNKKESINEELHIRLMDHLKAGIEDVCGHWSHYQVRDKFKKFDHRYLRKILIRKNLPKSSIVSLYKKLEMKQAIEMVETGILSSTAFSIPHQAQRIQGIKRLSPEDVESIRDILTSNMYQVRQRTLSYNKYNLKPQTSEKQAKEILIRRQNTLRESMRKGHSLPWGKPAGTKNIRYLSYPYGNPQSAGRDTRAAGFSDDDSSDPGSPSITFSACSRIGSLQKQEAQEIIPMKSLHRGRKAFSFGYQRNTSQEEYLGGVRRVALRPKPLFHAVDEEGESGGESEGKASLVEVRSRWTADHGHGRDHHRSHSPLLQKK

SEQ ID NO: 64874 - protein, 896 aa, Homo sapiens
MLRAALSLLALPLAGAAEEPTQKPESPGEPPPGLELFRWQWHEVEAPYLVALWILVASLAKIVFHLSRKVTSLVPESCLLILLGLVLGGIVLAVAKKAEYQLEPGTFFLFLLPPIVLDSGYFMPSRLFFDNLGAILTYAVVGTLWNAFTTGAALWGLQQAGLVAPRVQAGLLDFLLFGSLISAVDPVAVLAVFEEVHVNETLFIIVFGESLLNDAVTVVLYKVCNSFVEMGSANVQATDYLKGVASLFVVSLGGAAVGLVFAFLLALTTRFTKRVRIIEPLLVFLLAYAAYLTAEMASLSAILAVTMCGLGCKKYVEANISHKSRTTVKYTMKTLASCAETVIFMLLGISAVDSSKWAWDSGLVLGTLIFILFFRALGVVLQTWVLNQFRLVPLDKIDQVVMSYGGLRGAVAFALVILLDRTKVPAKDYFVATTIVVVFFTVIVQGLTIKPLVKWLKVKRSEHHKPTLNQELHEHTFDHILAAVEDVVGHHGYHYWRDRWEQFDKKYLSQLLMRRSAYRIRDQIWDVYYRLNIRDAISFVDQGGHVLSSTGLTLPSMPSRNSVAETSVTNLLRESGSGACLDLQVIDTVRSGRDREDAVMHHLLCGGLYKPRRRYKASCSRHFISEDAQERQDKEVFQQNMKRRLESFKSTKHNICFTKSKPRPRKTGRRKKDGVANAEATNGKHRGLGFQDTAAVILTVESEEEEEESDSSETEKEDDEGIIFVARATSEVLQEGKVSGSLEVCPSPRIIPPSPTCAEKELPWKSGQGDLAVYVSSETTKIVPVDMQTGWNQSISSLESLASPPCNQAPILTCLPPHPRGTEEPQVPLHLPSDPRSSFAFPPSLAKAGRSRSESSADLPQQQELQPLMGHKDHTHLSPGTATSHWCIQFNRGSRL

SEQ ID NO: 64875 - protein, 435 aa, Homo sapiens
MRRSAYRIRDQIWDVYYRLNIRDAISFVDQGGHVLSSTGLTLPSMPSRNSVAETSVTNLLRESGSGACLDLQVIDTVRSGRDREDAVMHHLLCGGLYKPRRRIELRTEPCGMLLKTFLQTDMDQAFLGTKPAAVATSSQRMRRSGRTRRSSSRMKRRLESFKSTKHNICFTKSKPRPRKTGRRKKDGVANAEATNGKHRGLGFQDTAAVILTVESEEEEEESDSSETEKEDDEGIIFVARATSEVLQEGKVSGSLEVCPSPRIIPPSPTCAEKELPWKSGQGDLAVYVSSETTKIVPVDMQTGWNQSISSLESLASPPCNQAPILTCLPPHPRGTEEPQVPLHLPSDPRSSFAFPPSLAKAGLAVRAALTSPSSRSCSPSWATRTTPISAQAPLPPTGASSSTEAAGCSSRPRGGAGGGIPVGSAPWVMGRALET

SEQ ID NO: 64876 - protein, 701 aa, Homo sapiens
MARRGWRRAPLRRGVGSSPRARRLMRPLWLLLAVGVFDWAGASDGGGGEARAMDEEIVSEKQAEESHRQDSANLLIFILLLTLTILTIWLFKHRRARFLHETGLAMIYGLLVGLVLRYGIHVPSDVNNVTLSCEVQSSPTTLLVNVSGKFYEYMLKGEISSHELNNVQDNEMLRKVTFDPEVFFNILLPPIIFYAGYSLKRRHFFRNLGSILAYAFLGTAISCFVIGSIMYGCVTLMKVTGQLAGDFYFTDCLLFGAIVSATDPVTVLAIFHELQVDVELYALLFGESVLNDAVAIVLSSSIVAYQPAGDNSHTFDVTAMFKSIGIFLGIFSGSFAMGAATGVVTALVTKFTKLREFQLLETGLFFLMSWSTFLLAEAWGFTGVVAVLFCGITQAHYTYNNLSTESQHRTKQLFELLNFLAENFIFSYMGLTLFTFQNHVFNPTFVVGAFVAIFLGRAANIYPLSLLLNLGRRSKIGSNFQHMMMFAGLRGAMAFALAIRDTATYARQMMFSTTLLIVFFTVWVFGGGTTAMLSCLHIRVGVDSDQEHLGVPENERRTTKAESAWLFRMWYNFDHNYLKPLLTHSGPPLTTTLPACCGPIARCLTSPQAYENQEQLKDDDSDLILNDGDISLTYGDSTVNTEPATSSAPRRFMGNSSEDALDRELAFGDHELVIRGTRLVLPMDDSEPPLNLLDNTRHGPA

SEQ ID NO: 64877 - protein, 669 aa, Homo sapiens
MARRGWRRAPLRRGVGSSPRARRLMRPLWLLLAVGVFDWAGASDGGGGEARAMDEEIVSEKQAEESHRQDSANLLIFILLLTLTILTIWLFKHRRARFLHETGLAMIYGLLVGLVLRYGIHVPSDVNNVTLSCEVQSSPTTLLVTFDPEVFFNILLPPIIFYAGYSLKRRHFFRNLGSILAYAFLGTAISCFVIGSIMYGCVTLMKVTGQLAGDFYFTDCLLFGAIVSATDPVTVLAIFHELQVDVELYALLFGESVLNDAVAIVLSSSIVAYQPAGDNSHTFDVTAMFKSIGIFLGIFSGSFAMGAATGVVTALVTKFTKLREFQLLETGLFFLMSWSTFLLAEAWGFTGVVAVLFCGITQAHYTYNNLSTESQHRTKQLFELLNFLAENFIFSYMGLTLFTFQNHVFNPTFVVGAFVAIFLGRAANIYPLSLLLNLGRRSKIGSNFQHMMMFAGLRGAMAFALAIRDTATYARQMMFSTTLLIVFFTVWVFGGGTTAMLSCLHIRVGVDSDQEHLGVPENERRTTKAESAWLFRMWYNFDHNYLKPLLTHSGPPLTTTLPACCGPIARCLTSPQAYENQEQLKDDDSDLILNDGDISLTYGDSTVNTEPATSSAPRRFMGNSSEDALDRELAFGDHELVIRGTRLVLPMDDSEPPLNLLDNTRHGPA

SEQ ID NO: 64878 - protein, 649 aa, Homo sapiens
MDEEIVSEKQAEESHRQDSANLLIFILLLTLTILTIWLFKHRRARFLHETGLAMIYGLLVGLVLRYGIHVPSDVNNVTLSCEVQSSPTTLLVNVSGKFYEYMLKGEISSHELNNVQDNEMLRKVTFDPEVFFNILLPPIIFYAGYSLKRRHFFRNLGSILAYAFLGTAISCFVIGSIMYGCVTLMKVTGQLAGDFYFTDCLLFGAIVSATDPVTVLAIFHELQVDVELYALLFGESVLNDAVAIVLSSSIVAYQPAGDNSHTFDVTAMFKSIGIFLGIFSGSFAMGAATGVVTALVTKFTKLREFQLLETGLFFLMSWSTFLLAEAWGFTGVVAVLFCGITQAHYTYNNLSTESQHRTKQLFELLNFLAENFIFSYMGLTLFTFQNHVFNPTFVVGAFVAIFLGRAANIYPLSLLLNLGRRSKIGSNFQHMMMFAGLRGAMAFALAIRDTATYARQMMFSTTLLIVFFTVWVFGGGTTAMLSCLHIRVGVDSDQEHLGVPENERRTTKAESAWLFRMWYNFDHNYLKPLLTHSGPPLTTTLPACCGPIARCLTSPQAYENQEQLKDDDSDLILNDGDISLTYGDSTVNTEPATSSAPRRFMGNSSEDALDRELAFGDHELVIRGTRLVLPMDDSEPPLNLLDNTRHGPA

SEQ ID NO: 64879 - protein, 725 aa, Homo sapiens
MEPGDAARPGSGRATGAPPPRLLLLPLLLGWGLRVAAAASASSSGAAAEDSSAMEELATEKEAEESHRQDSVSLLTFILLLTLTILTIWLFKHRRVRFLHETGLAMIYGLIVGVILRYGTPATSGRDKSLSCTQEDRAFSTLLVNVSGKFFEYTLKGEISPGKINSVEQNDMLRKVTFDPEVFFNILLPPIIFHAGYSLKKRHFFRNLGSILAYAFLGTAVSCFIIGNLMYGVVKLMKIMGQLSDKFYYTDCLFFGAIISATDPVTVLAIFNELHADVDLYALLFGESVLNDAVAIVLSSSIVAYQPAGLNTHAFDAAAFFKSVGIFLGIFSGSFTMGAVTGVNANVTKFTKLHCFPLLETALFFLMSWSTFLLAEACGFTGVVAVLFCGITQAHYTYNNLSVESRSRTKQLFEVLHFLAENFIFSYMGLALFTFQKHVFSPIFIIGAFVAIFLGRAAHIYPLSFFLNLGRRHKIGWNFQHMMMFSGLRGAMAFALAIRDTASYARQMMFTTTLLIVFFTVWIIGGGTTPMLSWLNIRVGVEEPSEEDQNEHHWQYFRVGVDPDQDPPPNNDSFQVLQGDGPDSARGNRTKQESAWIFRLWYSFDHNYLKPILTHSGPPLTTTLPAWCGLLARCLTSPQVYDNQEPLREEDSDFILTEGDLTLTYGDSTVTANGSSSSHTASTSLEGSRRTKSSSEEVLERDLGMGDQKVSSRGTRLVFPLEDNA

SEQ ID NO: 64880 - protein, 581 aa, Homo sapiens
MGEKMAEEERFPNTTHEGFNVTLHTTLVVTTKLVLPTPGKPILPVQTGEQAQQEEQSSGMTIFFSLLVLAICIILVHLLIRYRLHFLPESVAVVSLGILMGAVIKIIEFKKLANWKEEEMFRPNMFFLLLLPPIIFESGYSLHKGNFFQNIGSITLFAVFGTAISAFVVGGGIYFLGQADVISKLNMTDSFAFGSLISAVDPVATIAIFNALHVDPVLNMLVFGESILNDAVSIVLTNTAEGLTRKNMSDVSGWQTFLQALDYFLKMFFGSAALGTLTGLISALVLKHIDLRKTPSLEFGMMIIFAYLPYGLAEGISLSGIMAILFSGIVMSHYTHHNLSPVTQILMQQTLRTVAFLCETCVFAFLGLSIFSFPHKFEISFVIWCIVLVLFGRAVNIFPLSYLLNFFRDHKITPKMMFIMWFSGLRGAIPYALSLHLDLEPMEKRQLIGTTTIVIVLFTILLLGGSTMPLIRLMDIEDAKAHRRNKKDVNLSKTEKMGNTVESEHLSELTEEEYEAHYIRRQDLKGFVWLDAKYLNPFFTRRLTQEDLHHGRIQMKTLTNKWYEEVRQGPSGSEDDEQELL

SEQ ID NO: 64881 - protein, 597 aa, Homo sapiens
MGEKMAEEERFPNTTHEGFNVTLHTTLVVTTKLVLPTPGKPILPVQTGEQAQQEEQSSGMTIFFSLLVLAICIILVHLLIRYRLHFLPESVAVVSLGILMGAVIKIIEFKKLANWKEEEMFRPNMFFLLLLPPIIFESGYSLHKGNFFQNIGSITLFAVFGTAISAFVVGGGIYFLGQGFFFVCVCVFVCFILQADVISKLNMTDSFAFGSLISAVDPVATIAIFNALHVDPVLNMLVFGESILNDAVSIVLTNTAEGLTRKNMSDVSGWQTFLQALDYFLKMFFGSAALGTLTGLISALVLKHIDLRKTPSLEFGMMIIFAYLPYGLAEGISLSGIMAILFSGIVMSHYTHHNLSPVTQILMQQTLRTVAFLCETCVFAFLGLSIFSFPHKFEISFVIWCIVLVLFGRAVNIFPLSYLLNFFRDHKITPKMMFIMWFSGLRGAIPYALSLHLDLEPMEKRQLIGTTTIVIVLFTILLLGGSTMPLIRLMDIEDAKAHRRNKKDVNLSKTEKMGNTVESEHLSELTEEEYEAHYIRRQDLKGFVWLDAKYLNPFFTRRLTQEDLHHGRIQMKTLTNKWYEEVRQGPSGSEDDEQELL

SEQ ID NO: 64882 - protein, 362 aa, Homo sapiens
MLVFGESILNDAVSIVLTNTAEGLTRKNMSDVSGWQTFLQALDYFLKMFFGSAALGTLTGLISALVLKHIDLRKTPSLEFGMMIIFAYLPYGLAEGISLSGIMAILFSGIVMSHYTHHNLSPVTQILMQQTLRTVAFLCETCVFAFLGLSIFSFPHKFEISFVIWCIVLVLFGRAVNIFPLSYLLNFFRDHKITPKMMFIMWFSGLRGAIPYALSLHLDLEPMEKRQLIGTTTIVIVLFTILLLGGSTMPLIRLMDIEDAKAHRRNKKDVNLSKTEKMGNTVESEHLSELTEEEYEAHYIRRQDLKGFVWLDAKYLNPFFTRRLTQEDLHHGRIQMKTLTNKWYEEVRQGPSGSEDDEQELL

SEQ ID NO: 64883 - protein, 281 aa, Homo sapiens
MMIIFAYLPYGLAEGISLSGIMAILFSGIVMSHYTHHNLSPVTQILMQQTLRTVAFLCETCVFAFLGLSIFSFPHKFEISFVIWCIVLVLFGRAVNIFPLSYLLNFFRDHKITPKMMFIMWFSGLRGAIPYALSLHLDLEPMEKRQLIGTTTIVIVLFTILLLGGSTMPLIRLMDIEDAKAHRRNKKDVNLSKTEKMGNTVESEHLSELTEEEYEAHYIRRQDLKGFVWLDAKYLNPFFTRRLTQEDLHHGRIQMKTLTNKWYEEVRQGPSGSEDDEQELL

SEQ ID NO: 64884 - protein, 645 aa, Homo sapiens
MERQSRVMSEKDEYQFQHQGAVELLVFNFLLILTILTIWLFKNHRFRFLHETGGAMVYGLIMGLILRYATAPTDIESGTVYDCVKLTFSPSTLLVNITDQVYEYKYKREISQHNINPHQGNAILEKMTFDPEIFFNVLLPPIIFHAGYSLKKRHFFQNLGSILTYAFLGTAISCIVIGLIMYGFVKAMIHAGQLKNGDFHFTDCLFFGSLMSATDPVTVLAIFHELHVDPDLYTLLFGESVLNDAVAIVLTYSISIYSPKENPNAFDAAAFFQSVGNFLGIFAGSFAMGSAYAIITALLTKFTKLCEFPMLETGLFFLLSWSAFLSAEAAGLTGIVAVLFCGVTQAHYTYNNLSSDSKIRTKQLFEFMNFLAENVIFCYMGLALFTFQNHIFNALFILGAFLAIFVARACNIYPLSFLLNLGRKQKIPWNFQHMMMFSGLRGAIAFALAIRNTESQPKQMMFTTTLLLVFFTVWVFGGGTTPMLTWLQIRVGVDLDENLKEDPSSQHQEANNLDKNMTKAESARLFRMWYSFDHKYLKPILTHSGPPLTTTLPEWCGPISRLLTSPQAYGEQLKEDDVECIVNQDELAINYQEQASSPCSPPARLGLDQKASPQTPGKENIYEGDLGLGGYELKLEQTLGQSQLN

SEQ ID NO: 64885 - protein, 325 aa, Homo sapiens
LRLQSSWEQMTFDPEIFFNVLLPPIIFHAGYSLKKRHFFQNLGSILTYAFLGTAISCIVIGLIMYGFVKAMIHAGQLKNGDFHFTDCLFFGSLMSATDPVTVLAIFHELHVDPDLYTLLFGESVLNDAVAIVLTYSISIYSPKENPNAFDAAAFFQSVGNFLGIFAGSFAMGSAYAIITALLTKFTKLCEFPMLETGLFFLLSWSAFLSAEAAGLTGIVAVLFCGVTQAHYTYNNLSSDSKIRTKQLFEFMNFLAENVIFCYMGLALFTFQNHIFNALFILGAFVSIFLARAHTELKNLLFFLASFLCYFSHRSKGLPMAGCALP

SEQ ID NO: 64886 - protein, 1177 aa, Homo sapiens
MAGIFKEFFFSTEDLPEVILTLSLISSIGAFLNRHLEDFPIPVPVILFLLGCSFEVLSFTSSQVQRYANAIQWMSPDLFFRIFTPVVFFTTAFDMDTYMLQKLFWQILLISIPGFLVNYILVLWHLASVNQLLLKPTQWLLFSAILVSSDPMLTAAAIRDLGLSRSLISLINGESLMTSVISLITFTSIMDFDQRLQSKRNHTLAEEIVGGICSYIIASFLFGILSSKLIQFWMSTVFGDDVNHISLIFSILYLIFYICELVGMSGIFTLAIVGLLLNSTSFKAAIEETLLLEFWTFLSRIAFLMVFTFFGLLIPAHTYLYIEFVDIYYSLNIYLTLIVLRFLTLLLISPVLSRVGHEFSWRWIFIMVCSEMKGMPNINMALLLAYSDLYFGSDKEKSQILFHGVLVCLITLVVNRFILPVAVTILGLRDATSTKYKSVCCTFQHFQELTKSAASALKFDKDLANADWNMIEKAITLENPYMLNEEETTEHQKVKCPHCNKEIDEIFNTEAMELANRRLLSAQIASYQRQYRNEILSQSAVQVLVGAAESFGEKKGKCMSLDTIKNYSESQKTVTFARKLLLNWVYNTRKEKEGPSKYFFFRICHTIVFTEEFEHVGYLVILMNIFPFIISWISQLNVIYHSELKHTNYCFLTLYILEALLKIAAMRKDFFSHAWNIFELAITLIGILHVILIEIDTIKYIFNETEVIVFIKVVQFFRILRIFKLIAPKLLQIIDKRMSHQKTFWYGILKGYVQGEADIMTIIDQITSSKQIKQMLLKQVIRNMEHAIKELGYLEYDHPEIAVTVKTKEEINVMLNMATEILKAFGLKGIISKTEGAGINKLIMAKKKEVLDSQSIIRPLTVEEVLYHIPWLDKNKDYINFIQEKAKVVTFDCGNDIFEEGDEPKGIYIIISGMVKLEKSKPGLGIDQMVESKEKDFPIIDTDYMLSGEIIGEINCLTNEPMKYSATCKTVVETCFIPKTHLYDAFEQCSPLIKQKMWLKLGLAITARKIREHLSYEDWNYNMQLKLSNIYVVDIPMSTKTDIYDENLIYVILIHGAVEDCLLRKTYRAPFLIPITCHQIQSIEDFTKVVIIQTPINMKTFRRNIRKFVPKHKSYLTPGLIGSVGTLEEGIQEERNVKEDGAHSAATARSPQPCSLLGTKFNCKESPRINLRKVRKE

SEQ ID NO: 64887 - protein, 1129 aa, Homo sapiens
MAGIFKEFFFSTEDLPEVILTLSLISSIGAFLNRHLEDFPIPVPVILFLLGCSFEVLSFTSSQVQRYANAIQWMSPDLFFRIFTPVVFFTTAFDMDTYMLQKLFWQILLISIPGFLVNYILVLWHLASVNQLLLKPTQWLLFSAILVSSDPMLTAAAIRDLGLSRSLISLINGESLMTSVISLITFTSIMDFDQRLQSKRNHTLAEEIVGGICSYIIASFLFGILSSKLIQFWMSTVFGDDVNHISLIFSILYLIFYICELVGMSGIFTLAIVGLLLNSTSFKAAIEETLLLEFLTLLLISPVLSRVGHEFSWRWIFIMVCSEMKGMPNINMALLLAYSDLYFGSDKEKSQILFHGVLVCLITLVVNRFILPVAVTILGLRDATSTKYKSVCCTFQHFQELTKSAASALKFDKDLANADWNMIEKAITLENPYMLNEEETTEHQKVKCPHCNKEIDEIFNTEAMELANRRLLSAQIASYQRQYRNEILSQSAVQVLVGAAESFGEKKGKCMSLDTIKNYSESQKTVTFARKLLLNWVYNTRKEKEGPSKYFFFRICHTIVFTEEFEHVGYLVILMNIFPFIISWISQLNVIYHSELKHTNYCFLTLYILEALLKIAAMRKDFFSHAWNIFELAITLIGILHVILIEIDTIKYIFNETEVIVFIKVVQFFRILRIFKLIAPKLLQIIDKRMSHQKTFWYGILKGYVQGEADIMTIIDQITSSKQIKQMLLKQVIRNMEHAIKELGYLEYDHPEIAVTVKTKEEINVMLNMATEILKAFGLKGIISKTEGAGINKLIMAKKKEVLDSQSIIRPLTVEEVLYHIPWLDKNKDYINFIQEKAKVVTFDCGNDIFEEGDEPKGIYIIISGMVKLEKSKPGLGIDQMVESKEKDFPIIDTDYMLSGEIIGEINCLTNEPMKYSATCKTVVETCFIPKTHLYDAFEQCSPLIKQKMWLKLGLAITARKIREHLSYEDWNYNMQLKLSNIYVVDIPMSTKTDIYDENLIYVILIHGAVEDCLLRKTYRAPFLIPITCHQIQSIEDFTKVVIIQTPINMKTFRRNIRKFVPKHKSYLTPGLIGSVGTLEEGIQEERNVKEDGAHSAATARSPQPCSLLGTKFNCKESPRINLRKVRKE

SEQ ID NO: 64888 - protein, 692 aa, Homo sapiens
MQGKKPGGSSGGGRSGELQGDEAQRNKKKKKKVSCFSNIKIFLVSECALMLAQGTVGAYLVSVLTTLERRFNLQSADVGVIASSFEIGNLALILFVSYFGARGHRPRLIGCGGIVMALGALLSALPEFLTHQYKYEAGEIRWGAEGRDVCAANGSGGDEGPDPDLICRNRTATNMMYLLLIGAQVLLGIGATPVQPLGVSYIDDHVRRKDSSLYIGILFTMLVFGPACGFILGSFCTKIYVDAVFIDTSNLDITPDDPRWIGAWWGGFLLCGALLFFSSLLMFGFPQSLPPHSEPAMESEQAMLSEREYERPKPSNGVLRHPLEPDSSASCFQQLRVIPKVTKHLLSNPVFTCIILAACMEIAVVAGFAAFLGKYLEQQFNLTTSSANQLLGMTAIPCACLGIFLGGLLVKKLSLSALGAIRMAMLVNLVSTACYVSFLFLGCDTGPVAGVTVPYGNSTAPGSALDPYSPCNNNCECQTDSFTPVCGADGITYLSACFAGCNSTNLTGCACLTTVPAENATVVPGKCPSPGCQEAFLTFLCVMCICSLIGAMAQTPSVIILIRTVSPELKSYALGVLFLLLRLLGFIPPPLIFGAGIDSTCLFWSTFCGEQGACVLYDNVVYRYLYVSIAIALKSFAFILYTTTWQCLRKNYKRYIKNHEGGLSTSTEYQDIETEKTCPESHSPSEDSFVRS

SEQ ID NO: 64889 - protein, 691 aa, Homo sapiens
MDQNQHLNKTAEAQPSENKKTRYCNGLKMFLAALSLSFIAKTLGAIIMKSSIIHIERRFEISSSLVGFIDGSFEIGNLLVIVFVSYFGSKLHRPKLIGIGCFIMGIGGVLTALPHFFMGYYRYSKETNINSSENSTSTLSTCLINQILSLNRASPEIVGKGCLKESGSYMWIYVFMGNMLRGIGETPIVPLGLSYIDDFAKEGHSSLYLGILNAIAMIGPIIGFTLGSLFSKMYVDIGYVDLSTIRITPTDSRWVGAWWLNFLVSGLFSIISSIPFFFLPQTPNKPQKERKASLSLHVLETNDEKDQTANLTNQGKNITKNVTGFFQSFKSILTNPLYVMFVLLTLLQVSSYIGAFTYVFKYVEQQYGQPSSKANILLGVITIPIFASGMFLGGYIIKKFKLNTVGIAKFSCFTAVMSLSFYLLYFFILCENKSVAGLTMTYDGNNPVTSHRDVPLSYCNSDCNCDESQWEPVCGNNGITYISPCLAGCKSSSGNKKPIVFYNCSCLEVTGLQNRNYSAHLGECPRDDACTRKFYFFVAIQVLNLFFSALGGTSHVMLIVKIVQPELKSLALGFHSMVIRALGGILAPIYFGALIDTTCIKWSTNNCGTRGSCRTYNSTSFSRVYLGLSSMLRVSSLVLYIILIYAMKKKYQEKDINASENGSVMDEANLESLNKNKHFVPSAGADSETHC

SEQ ID NO: 64890 - protein, 702 aa, Homo sapiens
MDQHQHLNKTAESASSEKKKTRRCNGFKMFLAALSFSYIAKALGGIIMKISITQIERRFDISSSLAGLIDGSFEIGNLLVIVFVSYFGSKLHRPKLIGIGCLLMGTGSILTSLPHFFMGYYRYSKETHINPSENSTSSLSTCLINQTLSFNGTSPEIVEKDCVKESGSHMWIYVFMGNMLRGIGETPIVPLGISYIDDFAKEGHSSLYLGSLNAIGMIGPVIGFALGSLFAKMYVDIGYVDLSTIRITPKDSRWVGAWWLGFLVSGLFSIISSIPFFFLPKNPNKPQKERKISLSLHVLKTNDDRNQTANLTNQGKNVTKNVTGFFQSLKSILTNPLYVIFLLLTLLQVSSFIGSFTYVFKYMEQQYGQSASHANFLLGIITIPTVATGMFLGGFIIKKFKLSLVGIAKFSFLTSMISFLFQLLYFPLICESKSVAGLTLTYDGNNSVASHVDVPLSYCNSECNCDESQWEPVCGNNGITYLSPCLAGCKSSSGIKKHTVFYNCSCVEVTGLQNRNYSAHLGECPRDNTCTRKFFIYVAIQVINSLFSATGGTTFILLTVKIVQPELKALAMGFQSMVIRTLGGILAPIYFGALIDKTCMKWSTNSCGAQGACRIYNSVFFGRVYLGLSIALRFPALVLYIVFIFAMKKKFQGKDTKASDNERKVMDEANLEFLNNGEHFVPSAGTDSKTCNLDMQDNAAAN

SEQ ID NO: 64891 - protein, 702 aa, Homo sapiens; identical to SEQ ID NO: 64890

SEQ ID NO: 64892 - protein, 748 aa, Homo sapiens
MDQHQHLNKTAESASSEKKKTRRCNGFKMFLAALSFSYIAKALGGIIMKISITQIERRFDISSSLAGLIDGSFEIGNLLVIVFVSYFGSKLHRPKLIGIGCLLMGTGSILTSLPHFFMGYYRYSKETHINPSENSTSSLSTCLINQTLSFNGTSPEIVEKDCVKESGSHMWIYVFMGNMLRGIGETPIVPLGISYIDDFAKEGHSSLYLGSLNAIGMIGPVIGFALGSLFAKMYVDIGYVDLSTIRITPKDSRWVGAWWLGFLVSGLFSIISSIPFFFLPKNPNKPQKERKISLSLHVLKTNDDRNQTANLTNQGKNVTKNVTGFFQSLKSILTNPLYVIFLLLTLLQVSSFIGSFTYVFKYMEQQYGQSASHANFLLGIITIPTVATGMFLGGFIIKKFKLSLVGIAKFSFLTSMISFLFQLLYFPLICESKSVAGLTLTYDGNNSVASHVDVPLSYCNSECNCDESQWEPVCGNNGITYLSPCLAGCKSSSGIKKHTVFYNCSCVEVTGLQNRNYSAHLGECPRDNTCTRKFFIYVAIQVINSLFSATGGTTFILLTVKIVQPELKALAMGFQSMVIRTLGGILAPIYFGALIDKTCMKWSTNSCGAQGACRIYNSVFFGIVQPELKALAIGFHSMIMRSLGGILVPIYFGALIDTTCMKWSTNSCGARGACRIYNSTYLGRAFFGLKVALIFPVLVLLTVFIFVVRKKSHGKDTKVLENERQVMDEANLEFLNDSEHFVPSAEEQ

SEQ ID NO: 64893 - protein, 712 aa, Homo sapiens
MDTSSKENIQLFCKTSVQPVGRPSFKTEYPSSEEKQPCCGELKVFLCALSFVYFAKALAEGYLKSTITQIERRFDIPSSLVGVIDGSFEIGNLLVITFVSYFGAKLHRPKIIGAGCVIMGVGTLLIAMPQFFMEQYKYERYSPSSNSTLSISPCLLESSSQLPVSVMEKSKSKISNECEVDTSSSMWIYVFLGNLLRGIGETPIQPLGIAYLDDFASEDNAAFYIGCVQTVAIIGPIFGFLLGSLCAKLYVDIGFVNLDHITITPKDPQWVGAWWLGYLIAGIISLLAAVPFWYLPKSLPRSQSREDSNSSSEKSKFIIDDHTDYQTPQGENAKIMEMARDFLPSLKNLFGNPVYFLYLCTSTVQFNSLFGMVTYKPKYIEQQYGQSSSRANFVIGLINIPAVALGIFSGGIVMKKFRISVCGAAKLYLGSSVFGYLLFLSLFALGCENSDVAGLTVSYQGTKPVSYHERALFSDCNSRCKCSETKWEPMCGENGITYVSACLAGCQTSNRSGKNIIFYNCTCVGIAASKSGNSSGIVGRCQKDNGCPQMFLYFLVISVITSYTLSLGGIPGYILLLRCIKPQLKSFALGIYTLAIRVLAGIPAPVYFGVLIDTSCLKWGFKRCGSRGSCRLYDSNVFRHIYLGLTVILGTVSILLSIAVLFILKKNYVSKHRSFITKRERTMVSTRFQKENYTTSDHLLQPNYWPGKETQL

SEQ ID NO: 64894 - protein, 730 aa, Homo sapiens
MDTSSKENIQLFCKTSVQPVGRPSFKTEYPSSEEKQPCCGELKVFLCALSFVYFAKALAEGYLKSTITQIERRFDIPSSLVGVIDGSFEIGNLLVITFVSYFGAKLHRPKIIGAGCVIMGVGTLLIAMPQFFMEQYKYERYSPSSNSTLSISPCLLESSSQLPVSVMEKSKSKISNECEVDTSSSMWIYVFLGNLLRGIGETPIQPLGIAYLDDFASEDNAAFYIGCVQTVAIIGPIFGFLLGSLCAKLYVDIGFVNLDHITITPKDPQWVGAWWLGYLIAGIISLLAAVPFWYLPKSLPRSQSREDSNSSSEKSKFIIDDHTDYQTPQGENAKIMEMARDFLPSLKNLFGNPVYFLYLCTSTVQFNSLFGMVTYKPKYIEQQYGQSSSRANFVIGLINIPAVALGIFSGGIVMKKFRISVCGAAKLYLGSSVFGYLLFLSLFALGCENSDVAGLTVSYQGTKPVSYHERALFSDCNSRCKCSETKWEPMCGENGITYVSACLAGCQTSNRSGKNIIFYNCTCVGIAASKSGNSSGIVGRCQKDNGCPQMFLYFLVISVITSYTLSLGGIPGYILLLRCIKPQLKSFALGIYTLAIRVLAGIPAPVYFGVLIDTSCLKWGFKRCGSRGSCRLYDSNVFRYQIKSIPASHCYSIPDLHNATDTNKFSCHFTACKTYISGTNCDTGHSVNSPKHCSTFHFKEKLCFKTQKFYNQERKNNGVYKIPKGKLHYK

SEQ ID NO: 64895 - protein, 663 aa, Homo sapiens
MDTSSKENIQLFCKTSVQPVGRPSFKTEYPSSEEKQPCCGELKVFLCALSFVYFAKALAEGYLKSTITQIERRFDIPSSLVGVIDGSFEIGNLLVITFVSYFGAKLHRPKIIGAGCVIMGVGTLLIAMPQFFMEQYKYERYSPSSNSTLSISPCLLESSSQLPVSVMEKSKSKISNGCVQTVAIIGPIFGFLLGSLCAKLYVDIGFVNLDHITITPKDPQWVGAWWLGYLIAGIISLLAAVPFWYLPKSLPRSQSREDSNSSSEKSKFIIDDHTDYQTPQGENAKIMEMARDFLPSLKNLFGNPVYFLYLCTSTVQFNSLFGMVTYKPKYIEQQYGQSSSRANFVIGLINIPAVALGIFSGGIVMKKFRISVCGAAKLYLGSSVFGYLLFLSLFALGCENSDVAGLTVSYQGTKPVSYHERALFSDCNSRCKCSETKWEPMCGENGITYVSACLAGCQTSNRSGKNIIFYNCTCVGIAASKSGNSSGIVGRCQKDNGCPQMFLYFLVISVITSYTLSLGGIPGYILLLRCIKPQLKSFALGIYTLAIRVLAGIPAPVYFGVLIDTSCLKWGFKRCGSRGSCRLYDSNVFRHIYLGLTVILGTVSILLSIAVLFILKKNYVSKHRSFITKRERTMVSTRFQKENYTTSDHLLQPNYWPGKETQL

SEQ ID NO: 64896 - protein, 612 aa, Homo sapiens
MGVGTLLIAMPQFFMEQYKYERYSPSSNSTLSISPCLLESSSQLPVSVMEKSKSKISNECEVDTSSSMWIYVFLGNLLRGIGETPIQPLGIAYLDDFASEDNAAFYIGCVQTVAIIGPIFGFLLGSLCAKLYVDIGFVNLDHITITPKDPQWVGAWWLGYLIAGIISLLAAVPFWYLPKSLPRSQSREDSNSSSEKSKFIIDDHTDYQTPQGENAKIMEMARDFLPSLKNLFGNPVYFLYLCTSTVQFNSLFGMVTYKPKYIEQQYGQSSSRANFVIGLINIPAVALGIFSGGIVMKKFRISVCGAAKLYLGSSVFGYLLFLSLFALGCENSDVAGLTVSYQGTKPVSYHERALFSDCNSRCKCSETKWEPMCGENGITYVSACLAGCQTSNRSGKNIIFYNCTCVGIAASKSGNSSGIVGRCQKDNGCPQMFLYFLVISVITSYTLSLGGIPGYILLLRCIKPQLKSFALGIYTLAIRVLAGIPAPVYFGVLIDTSCLKWGFKRCGSRGSCRLYDSNVFRYQIKSIPASHCYSIPDLHNATDTNKFSCHFTACKTYISGTNCDTGHSVNSPKHCSTFHFKEKLCFKTQKFYNQERKNNGVYKIPKGKLHYK

SEQ ID NO: 64897 - protein, 730 aa, Homo sapiens; identical to SEQ ID NO: 64894

SEQ ID NO: 64898 - protein, 643 aa, Homo sapiens [sequence omitted]

SEQ ID NO: 64899 - protein, 415 aa, Homo sapiens
MGLLPKLGASQGSDTSTSRAGRCARSVFGNIKVFVLCQGLLQLCQLLYSAYFKSSLTTIEKRFGLSSSSSGLISSLNEISNAILIIFVSYFGSRVHRPRLIGIGGLFLAAGAFILTLPHFLSEPYQYTLASTGNNSRLQAELCQKHWQDLPPSKCHSTTQNPQKETSSMWGLMVVAQLLAGIGTVPIQPFGISYVDDFSEPSNSPLYISILFAISVFGPAFGYLLGSVMLQIFVDYGRVNTAAVNLVPGDPRWIGAWWLGLLISSALLVLTSFPFFFFPRAMPIGAKRAPATADEARKLEEAKSRGSLVDFIKRFPCIFLRLLMNSLFVLVVLAQCTFSSVIAGLSTFLNKFLEKQYGTSAAYANFLIAHQVLYIRSLLPAAGTARAQILSSTRSVETMESSTSPLAMPAAATST

SEQ ID NO: 64900 - protein, 710 aa, Homo sapiens
MQGKKPGGSSGGGRSGELQGDEAQRNKKKKKKVSCFSNIKIFLVSECALMLAQGTVGAYLVSVLTTLERRFNLQSADVGVIASSFEIGNLALILFVSYFGARGHRPRLIGCGGIVMALGALLSALPEFLTHQYKYEAGEIRWGAEGRDVCAANGSGGDEGPDPDLICRNRTATNMMYLLLIGAQVLLGIGATPVQPLGVSYIDDHVRRKDSSLYIGILFTMLVFGPACGFILGSFCTKIYVDAVFIDTSNLDITPDDPRWIGAWWGGFLLCGALLFFSSLLMFGFPQSLPPHSEPAMESEQAMLSEREYERPKPSNGVLRHPLEPDSSASCFQQLRVIPKVTKHLLSNPVFTCIILAACMEIAVVAGFAAFLGKYLEQQFNLTTSSANQLLGMTAIPCACLGIFLGGLLVKKLSLSALGAIRMAMLVNLVSTACYVSFLFLGCDTGPVAGVTVPYGNSTAPGSALDPYSPCNNNCECQTDSFTPVCGADGITYLSACFAGCNSTNLTGCACLTTVPAENATVVPGKCPSPGCQEAFLTFLCVMCICSLIGAMAQTPSVIILIRTVSPELKSYALGVLFLLLRLLGFIPPPLIFGAGIDSTCLFWSTFCGEQGACVLYDNVVYRYLYVSIAIALKSFAFILYTTTWQCLRKNYKRYIKNHEGGLSTSEFFASTLTLDNLGRDPVPANQTHRTKFIYNLEDHEWCENMESVL

SEQ ID NO: 64901 - protein, 722 aa, Homo sapiens
MPLHQLGDKPLTFPSPNSAMENGLDHTPPSRRASPGTPLSPGSLRSAAHSPLDTSKQPLCQLWAEKHGARGTHEVRYVSAGQSVACGWWAFAPPCLQVLNTPKGILFFLCAAAFLQGMTVNGFINTVITSLERRYDLHSYQSGLIASSYDIAACLCLTFVSYFGGSGHKPRWLGWGVLLMGTGSLVFALPHFTAGRYEVELDAGVRTCPANPGAVCADSTSGLSRYQLVFMLGQFLHGVGATPLYTLGVTYLDENVKSSCSPVYIAIFYTAAILGPAAGYLIGGALLNIYTEMGRRTELTTESPLWVGAWWVGFLGSGAAAFFTAVPILGYPRQLPGSQRYAVMRAAEMHQLKDSSRGEASNPDFGKTIRDLPLSIWLLLKNPTFILLCLAGATEATLITGMSTFSPKFLESQFSLSASEAATLFGYLVVPAGGGGTFLGGFFVNKLRLRGSAVIKFCLFCTVVSLLGILVFSLHCPSVPMAGVTASYGGSLLPEGHLNLTAPCNAACSCQPEHYSPVCGSDGLMYFSLCHAGCPAATETNVDGQKVYRDCSCIPQNLSSGFGHATAGKCTSTCQRKPLLLVFIFVVIFFTFLSSIPALTATLRCVRDPQRSFALGIQWIVVRILGGIPGPIAFGWVIDKACLLWQDQCGQQGSCLVYQNSAMSRYILIMGLLYKVLGVLFFAIACFLYKPLSESSDGLETCLPSQSSAPDSATDSQLQSSV

SEQ ID NO: 64902 - protein, 582 aa, Homo sapiens
MPLHQLGDKPLTFPSPNSAMENGLDHTPPSRRASPGTPLSPGSLRSAAHSPLDTSKQPLCQLWAEKHGARGTHEVRYVSAGQSVACGWWAFAPPCLQVLNTPKGILFFLCAAAFLQGMTVNGFINTVITSLERRYDLHSYQSGLIASSYDIAACLCLTFVSYFGGSGHKPRWLGWGVLLMGTGSLVFALPHFTAGRYEVELDAGVRTCPANPGAVCADSTSGLSRYQLVFMLGQFLHGVGATPLYTLGVTYLGMSTFSPKFLESQFSLSASEAATLFGYLVVPAGGGGTFLGGFFVNKLRLRGSAVIKFCLFCTVVSLLGILVFSLHCPSVPMAGVTASYGGSLLPEGHLNLTAPCNAACSCQPEHYSPVCGSDGLMYFSLCHAGCPAATETNVDGQKVYRDCSCIPQNLSSGFGHATAGKCTSTCQRKPLLLVFIFVVIFFTFLSSIPALTATLRCVRDPQRSFALGIQWIVVRILGGIPGPIAFGWVIDKACLLWQDQCGQQGSCLVYQNSAMSRYILIMGLLYKVLGVLFFAIASSRAASDHRPRPPGHGGHSAFPDDRTVPLGDAITRELLFDLQPST

SEQ ID NO: 64903 - protein, 722 aa, Homo sapiens; identical to SEQ ID NO: 64901

SEQ ID NO: 64904 - protein, 722 aa, Homo sapiens
MPLHQLGDKPLTFPSPNSAMENGLDHTPPSRRASPGTPLSPGSLRSAAHSPLDTSKQPLCQLWAEKHGARGTHEVRYVSAGQSVACGWWAFAPPCLQVLNTPKGILFFLCAAAFLQGMTVNGFINTVITSLERRYDLHSYQSGLIASSYDIAACLCLTFVSYFGGSGHKPRWLGWGVLLMGTGSLVFALPHFTAGRYEVELDAGVRTCPANPGAVCADSTSGLSRYQLVFMLGQFLHGVGATPLYTLGVTYLDENVKSSCSPVYIAIFYTAAILGPAAGYLIGGALLNIYTEMGRRTELTTESPLWVGAWWVGFLGSGAAAFFTAVPILGYPRQLPGSQRYAVMRAAEMHQLKDSSRGEASNPDFGKTIRDLPLSIWLLLKNPTFILLCLAGATEATLITGMSTFSPKFLESQFSLSASEAATLFGYLVVPAGGGGTFLGGFFVNKLRLRGSAVIKFCLFCTVVSLLGILVFSLHCPSVPMAGVTASYGGSLLPEGHLNLTAPCNAACSCQPEHYSPVCGSDGLMYFSLCHAGCPAATETNVDGQKVYRDCSCIPQNLSSGFGHATAGKCTSTFLYIPQQHSCTNGNSTTGALQETPRSKRACRCVRDPQRSFALGIQWIVVRILGGIPGPIAFGWVIDKACLLWQDQCGQQGSCLVYQNSAMSRYILIMGLLYKVLGVLFFAIACFLYKPLSESSDGLETCLPSQSSAPDSATDSQLQSSV

SEQ ID NO: 64905 - protein, 151 aa, Homo sapiens
TTALCAARTASCTSHCATQGALQPRRRMWTARRCVRDPQRSFALGIQWIVVRILGGIPGPIAFGWVIDKACLLWQDQCGQQGSCLVYQNSAMSRYILIMGLLYKVLGVLFFAIACFLYKPLSESSDGLETCLPSQSSAPDSATDSQLQSSV

SEQ ID NO: 64906 - protein, 620 aa, Homo sapiens
MPLHQLGDKPLTFPSPNSAMENGLDHTPPSRRASPGTPLSPGSLRSAAHSPLDTSKQPLCQLWAEKHGARGTHEVRYVSAGQSVACGWWAFAPPCLQVLNTPKGILFFLCAAAFLQGMTVNGFINTVITSLERRYDLHSYQSGLIASSYDIAACLCLTFVSYFGGSGHKPRWLGWGVLLMGTGSLVFALPHFTAGRYEVELDAGVRTCPANPGAVCADSTSGLSRYQLVFMLGQFLHGVGATPLYTLGVTYLDENVKSSCSPVYIAIFYTAAILGPAAGYLIGGALLNIYTEMGRRTELTTESPLWVGAWWVGFLGSGAAAFFTAVPILGYPRQLPGSQRYAVMRAAEMHQLKDSSRGEASNPDFGKTIRDLPLSIWLLLKNPTFILLCLAGATEATLITGMSTFSPKFLESQFSLSASEAATLFGYLVVPAGGGGTFLGGFFVNKLRLRGSAVIKFCLFCTVVSLLGILVFSLHCPSVPMAGVTASYGGSLLPEGHLNLTAPCNAACSCQPEHYSPVCGSDGLMYFSLCHAGCPAATETNVDGQKVSGAAAYRPCPPLDPGKGPPCLPLVIGAIVGLPRCTETVAVSLRIFPLVLAMPLQGNALQLVRESPSFWFSYSL

SEQ ID NO: 64907 - protein, 719 aa, Homo sapiens
MFVGVARHSGSQDEVSRGVEPLEAARAQPAKDRRAKGTPKSSKPGKKHRYLRLLPEALIRFGGFRKRKKAKSSVSKKPGEVDDSLEQPCGLGCLVSTCCECCNNIRCFMIFYCILLICQGVVFGLIDVSIGDFQKEYQLKTIEKLALEKSYDISSGLVAIFIAFYGDRKKVIWFVASSFLIGLGSLLCAFPSINEENKQSKVGIEDICEEIKVVSGCQSSGISFQSKYLSFFILGQTVQGIAGMPLYILGITFIDENVATHSAGIYLGIAECTSMIGYALGYVLGAPLVKVPENTTSATNTTVNNGSPEWLWTWWINFLFAAVVAWCTLIPLSCFPNNMPGSTRIKARKRKQLHFFDSRLKDLKLGTNIKDLCAALWILMKNPVLICLALSKATEYLVIIGASEFLPIYLENQFILTPTVATTLAGLVLIPGGALGQLLGGVIVSTLEMSCKALMRFIMVTSVISLILLVFIIFVRCNPVQFAGINEDYDGTGKLGNLTAPCNEKCRCSSSIYSSICGRDDIEYFSPCFAGCTYSKAQNQKKMYYNCSCIKEGLITADAEGDFIDARPGKCDAKCYKLPLFIAFIFSTLIFSGFSGVPIVLAMTRVVPDKLRSLALGVSYVILRIFGTIPGPSIFKMSGETSCILRDVNKCGHTGRCWIYNKTKMAFLLVGICFLCKLCTIIFTTIAFFIYKRRLNENTDFPDVTVKNPKVKKKEETDL

SEQ ID NO: 64908 - protein, 466 aa, Homo sapiens
MFVGVARHSGSQDEVSRGVEPLEAARAQPAKDRRAKGTPKSSKPGKKHRYLRLLPEALIRFGGFRKRKKAKSSVSKKPGEVDDSLEQPCGLGCLVSTCCECCNNIRCFMIFYCILLICQGVVFGLIDVSIGDFQKEYQLKTIEKLALEKSYDISSGLVAIFIAFYGDRKKVIWFVASSFLIGLGSLLCAFPSINEENKQSKVGIEGIAECTSMIGYALGYVLGAPLVKVPENTTSATKTGKLGNLTAPCNEKCRCSSSIYSSICGRDDIEYFSPCFAGCTYSKAQNQKKMYYNCSCIKEGLITADAEGDFIDARPGKCDAKCYKLPLFIAFIFSTLIFSGFSGVPIVLAMTRVVPDKLRSLALGVSYVILRIFGTIPGPSIFKMSGETSCILRDVNKCGHTGRCWIYNKTKMAFLLVGICFLCKLCTIIFTTIAFFIYKRRLNENTDFPDVTVKNPKVKKKEETDL

SEQ ID NO: 64909 - protein, 657 aa, Homo sapiens
MFVGVARHSGSQDEVSRGVEPLEAARAQPAKDRRAKGTPKSSKPGKKHRYLRLLPEALIRFGGFRKRKKAKSSVSKKPGEVDDSLEQPCGLGCLVSTCCECCNNIRCFMIFYCILLICQGVVFGLIDVSIGDFQKEYQLKTIEKLALEKSYDISSGLVAIFIAFYGDRKKVIWFVASSFLIGLGSLLCAFPSINEENKQSKVGIEGIAECTSMIGYALGYVLGAPLVKVPENTTSATNTTVNNGSPEWLWTWWINFLFAAVVAWCTLIPLSCFPNNMPGSTRIKARKRKQLHFFDSRLKDLKLGTNIKDLCAALWILMKNPVLICLALSKATEYLVIIGASEFLPIYLENQFILTPTVATTLAGLVLIPGGALGQLLGGVIVSTLEMSCKALMRFIMVTSVISLILLVFIIFVRCNPVQFAGINEDYDGTGKLGNLTAPCNEKCRCSSSIYSSICGRDDIEYFSPCFAGCTYSKAQNQKKMYYNCSCIKEGLITADAEGDFIDARPGKCDAKCYKLPLFIAFIFSTLIFSGFSGVPIVLAMTRVVPDKLRSLALGVSYVILRIFGTIPGPSIFKMSGETSCILRDVNKCGHTGRCWIYNKTKMAFLLVGICFLCKLCTIIFTTIAFFIYKRRLNENTDFPDVTVKNPKVKKKEETDL

SEQ ID NO: 64910 - protein, 719 aa, Homo sapiens; identical to SEQ ID NO: 64907

SEQ ID NO: 64911 - protein, 25 aa, Homo sapiens
LNENTDFPDVTVKNPKVKKKEETDL

SEQ ID NO: 64912 - protein, 466 aa, Homo sapiens; identical to SEQ ID NO: 64908

SEQ ID NO: 64913 - protein, 116 aa, Homo sapiens
MLSCRLQCALAALSIVLALGCVTGAPSDPRLRQFLQKSLAAAAGKQELAKYFLAELLSEPNQTENDALEPEDLSQAAEQDEMRLELQRSANSNPAMAPRERKAGCKNFFWKTFTSC

SEQ ID NO: 64914 - protein, 391 aa, Homo sapiens
MFPNGTASSPSSSPSPSPGSCGEGGGSRGPGAGAADGMEEPGRNASQNGTLSEGQGSAILISFIYSVVCLVGLCGNSMVIYVILRYAKMKTATNIYILNLAIADELLMLSVPFLVTSTLLRHWPFGALLCRLVLSVDAVNMFTSIYCLTVLSVDRYVAVVHPIKAARYRRPTVAKVVNLGVWVLSLLVILPIVVFSRTAANSDGTVACNMLMPEPAQRWLVGFVLYTFLMGFLLPVGAICLCYVLIIAKMRMVALKAGWQQRKRSERKITLMVMMVVMVFVICWMPFYVVQLVNVFAEQDDATVSQLSVILGYANSCANPILYGFLSDNFKRSFQRILCLSWMDNAAEEPVDYYATALKSRAYSVEDFQPENLESGGVFRNGTCTSRITTL

SEQ ID NO: 64915 - protein, 418 aa, Homo sapiens
MDMLHPSSVSTTSEPENASSAWPPDATLGNVSAGPSPAGLAVSGVLIPLVYLVVCVVGLLGNSLVIYVVLRHTASPSVTNVYILNLALADELFMLGLPFLAAQNALSYWPFGSLMCRLVMAVDGINQFTSIFCLTVMSVDRYLAVVHPTRSARWRTAPVARTVSAAVWVASAVVVLPVVVFSGVPRGMSTCHMQWPEPAAAWRAGFIIYTAALGFFGPLLVICLCYLLIVVKVRSAGRRVWAPSCQRRRRSERRVTRMVVAVVALFVLCWMPFYVLNIVNVVCPLPEEPAFFGLYFLVVALPYANSCANPILYGFLSYRFKQGFRRVLLRPSRRVRSQEPTVGPPEKTEEEDEEEEDGEESREGGKGKEMNGRVSQITQPGTSGQERPPSRVASKEQQLLPQEASTGEKSSTMRISYL

SEQ ID NO: 64916 - protein, 418 aa, Homo sapiens; identical to SEQ ID NO: 64915

SEQ ID NO: 64917 - protein, 388 aa, Homo sapiens
MSAPSTLPPGGEEGLGTAWPSAANASSAPAEAEEAVAGPGDARAAGMVAIQCIYALVCLVGLVGNALVIFVILRYAKMKTATNIYLLNLAVADELFMLSVPFVASSAALRHWPFGSVLCRAVLSVDGLNMFTSVFCLTVLSVDRYVAVVHPLRAATYRRPSVAKLINLGVWLASLLVTLPIAIFADTRPARGGQAVACNLQWPHPAWSAVFVVYTFLLGFLLPVLAIGLCYLLIVGKMRAVALRAGWQQRRRSEKKITRLVLMVVVVFVLCWMPFYVVQLLNLFVTSLDATVNHVSLILSYANSCANPILYGFLSDNFRRFFQRVLCLRCCLLEGAGGAEEEPLDYYATALKSKGGAGCMCPPLPCQQEALQPEPGRKRIPLTRTTTF

SEQ ID NO: 64918 - protein, 364 aa, Homo sapiens
MEPLFPASTPSWNASSPGAASGGGDNRTLVGPAPSAGARAVLVPVLYLLVCAAGLGGNTLVIYVVLRFAKMKTVTNIYILNLAVADVLYMLGLPFLATQNAASFWPFGPVLCRLVMTLDGVNQFTSVFCLTVMSVDRYLAVVHPLSSARWRRPRVAKLASAAAWVLSLCMSLPLLVFADVQEGGTCNASWPEPVGLWGAVFIIYTAVLGFFAPLLVICLCYLLIVVKVRAAGVRVGCVRRRSERKVTRMVLVVVLVFAGCWLPFFTVNIVNLAVALPQEPASAGLYFFVVILSYANSCANPVLYGFLSDNFRQSFQKVLCLRKGSGAKDADATEPRPDRIRQQQEATPPAHRAAANGLMQTSKL

SEQ ID NO: 64919 - protein, 364 aa, Homo sapiens; identical to SEQ ID NO: 64918

SEQ ID NO: 64920 - protein, 273 aa, Homo sapiens
MEPLFPASTPSWNASSPGAASGGGDNRTLVGPAPSAGARAVLVPVLYLLVCAAGLGGNTLVIYVVLRFAKMKTVTNIYILNLAVADVLYMLGLPFLATQNAASFWPFGPVLCRLVMTLDGVNQFTSVFCLTVMSVDRYLAVVHPLSSARWRRPRVAKLASAAAWVLSLCMSLPLLVFADVQEGGTCNASWPEPVGLWGAVFIIYTAVLGFFAPLLRGSGRAGDANGRPWESRRLPPRIVLPPPPQTPAFPGAPGPERGPREPCWGLWGTLALL

SEQ ID NO: 64921 - protein, 2325 aa, Homo sapiens
MATNIEQIFRSFVVSKFREIQQELSSGRNEGQLNGETNTPIEGNQAGDAAASARSLPNEEIVQKIEEVLSGVLDTELRYKPDLKEGSRKSRCVSVQTDPTDEIPTKKSKKHKKHKNKKKKKKKEKEKKYKRQPEESESKTKSHDDGNIDLESDSFLKFDSEPSAVALELPTRAFGPSETNESPAVVLEPPVVSMEVSEPHILETLKPATKTAELSVVSTSVISEQSEQSVAVMPEPSMTKILDSFAAAPVPTTTLVLKSSEPVVTMSVEYQMKSVLKSVESTSPEPSKIMLVEPPVAKVLEPSETLVVSSETPTEVYPEPSTSTTMDFPESSAIEALRLPEQPVDVPSEIADSSMTRPQELPELPKTTALELQESSVASAMELPGPPATSMPELQGPPVTPVLELPGPSATPVPELPGPLSTPVPELPGPPATAVPELPGPSVTPVPQLSQELPGLPAPSMGLEPPQEVPEPPVMAQELPGLPLVTAAVELPEQPAVTVAMELTEQPVTTTELEQPVGMTTVEHPGHPEVTTATGLLGQPEATMVLELPGQPVATTALELPGQPSVTGVPELPGLPSATRALELSGQPVATGALELPGPLMAAGALEFSGQSGAAGALELLGQPLATGVLELPGQPGAPELPGQPVATVALEISVQSVVTTSELSTMTVSQSLEVPSTTALESYNTVAQELPTTLVGETSVTVGVDPLMAPESHILASNTMETHILASNTMDSQMLASNTMDSQMLASNTMDSQMLASSTMDSQMLATSSMDSQMLATSSMDSQMLATSTMDSQMLATSSMDSQMLATSSMDSQMLATSSMDSQMLATSSMDSQMLATSTMDSQMLATSTMDSQMLATSSMDSQMLASGTMDSQMLASGTMDAQMLASGTMDAQMLASSTQDSAMLGSKSPDPYRLAQDPYRLAQDPYRLGHDPYRLGHDAYRLGQDPYRLGHDPYRLTPDPYRMSPRPYRIAPRSYRIAPRPYRLAPRPLMLASRRSMMMSYAAERSMMSSYERSMMSYERSMMSPMAERSMMSAYERSMMSAYERSMMSPMAERSMMSAYERSMMSAYERSMMSPMADRSMMSMGADRSMMSSYSAADRSMMSSYSAADRSMMSSYTADRSMMSMAADSYTDSYTDTYTEAYMVPPLPPEEPPTMPPLPPEEPPMTPPLPPEEPPEGPALPTEQSALTAENTWPTEVPSSPSEESVSQPEPPVSQSEISEPSAVPTDYSVSASDPSVLVSEAAVTVPEPPPEPESSITLTPVESAVVAEEHEVVPERPVTCMVSETPAMSAEPTVLASEPPVMSETAETFDSMRASGHVASEVSTSLLVPAVTTPVLAESILEPPAMAAPESSAMAVLESSAVTVLESSTVTVLESSTVTVLEPSVVTVPEPPVVAEPDYVTIPVPVVSALEPSVPVLEPAVSVLQPSMIVSEPSVSVQESTVTVSEPAVTVSEQTQVIPTEVAIESTPMILESSIMSSHVMKGINLSSGDQNLAPEIGMQEIALHSGEEPHAEEHLKGDFYESEHGINIDLNINNHLIAKEMEHNTVCAAGTSPVGEIGEEKILPTSETKQRTVLDTYPGVSEADAGETLSSTGPFALEPDATGTSKGIEFTTASTLSLVNKYDVDLSLTTQDTEHDMVISTSPSGGSEADIEGPLPAKDIHLDLPSNNNLVSKDTEEPLPVKESDQTLAALLSPKESSGGEKEVPPPPKETLPDSGFSANIEDINEADLVRPLLPKDMERLTSLRAGIEGPLLASDVGRDRSAASPVVSSMPERASESSSEEKDDYEIFVKVKDTHEKSKKNKNRDKGEKEKKRDSSLRSRSKRSKSSEHKSRKRTSESRSRARKRSSKSKSHRSQTRSRSRSRRRRRSSRSRSKSRGRRSVSKEKRKRSPKHRSKSRERKRKRSSSRDNRKTVRARSRTPSRRSRSHTPSRRRRSRSVGRRRSFSISPSRRSRTPSRRSRTPSRRSRTPSRRSRTPSRRSRTPSRRSRTPSRRRRSRSVVRRRSFSISPVRLRRSRTPLRRRFSRSPIRRKRSRSSERGRSPKRLTDLDKAQLLEIAKANAAAMCAKAGVPLPPNLKPAPPPTIEEKVAKKSGGATIEELTEKCKQIAQSKEDDDVIVNKPHVSDEEEEEPPFYHHPFKLSEPKPIFFNLNIAAAKPTPPKSQVTLTKEFPVSSGSQHRKKEADSVYGEWVPVEKNGEENKDDDNVFSSNLPSEPVDISTAMSERALAQKRLSENAFDLEAMSMLNRAQERIDAWAQLNSIPGQFTGSTGVQVLTQEQLANTGAQAWIKKGQILVAVFLPRSVPAVLFTTLLLPRPRISS

SEQ ID NO: 64922 - protein, 2303 aa, Homo sapiens
MATNIEQIFRSFVVSKFREIQQELSSGRNEGQLNGETNTPIEGNQAGDAAASARSLPNEEIVQKIEEVLSGVLDTELRYKPDLKEGSRKSRCVSVQTDPTDEIPTKKSKKHKKHKNKKKKKKKEKEKKYKRQPEESESKTKSHDDGNIDLESDSFLKFDSEPSAVALELPTRAFGPSETNESPAVVLEPPVVSMEVSEPHILETLKPATKTAELSVVSTSVISEQSEQSVAVMPEPSMTKILDSFAAAPVPTTTLVLKSSEPVVTMSVEYQMKSVLKSVESTSPEPSKIMLVEPPVAKVLEPSETLVVSSETPTEVYPEPSTSTTMDFPESSAIEALRLPEQPVDVPSEIADSSMTRPQELPELPKTTALELQESSVASAMELPGPPATSMPELQGPPVTPVLELPGPSATPVPELPGPLSTPVPELPGPPATAVPELPGPSVTPVPQLSQELPGLPAPSMGLEPPQEVPEPPVMAQELPGLPLVTAAVELPEQPAVTVAMELTEQPVTTTELEQPVGMTTVEHPGHPEVTTATGLLGQPEATMVLELPGQPVATTALELPGQPSVTGVPELPGLPSATRALELSGQPVATGALELPGPLMAAGALEFSGQSGAAGALELLGQPLATGVLELPGQPGAPELPGQPVATVALEISVQSVVTTSELSTMTVSQSLEVPSTTALESYNTVAQELPTTLVGETSVTVGVDPLMAPESHILASNTMETHILASNTMDSQMLASNTMDSQMLASNTMDSQMLASSTMDSQMLATSSMDSQMLATSSMDSQMLATSTMDSQMLATSSMDSQMLATSSMDSQMLATSSMDSQMLATSSMDSQMLATSTMDSQMLATSTMDSQMLATSSMDSQMLASGTMDSQMLASGTMDAQMLASGTMDAQMLASSTQDSAMLGSKSPDPYRLAQDPYRLAQDPYRLGHDPYRLGHDAYRLGQDPYRLGHDPYRLTPDPYRMSPRPYRIAPRSYRIAPRPYRLAPRPLMLASRRSMMMSYAAERSMMSSYERSMMSYERSMMSPMAERSMMSAYERSMMSAYERSMMSPMAERSMMSAYERSMMSAYERSMMSPMADRSMMSMGADRSMMSSYSAADRSMMSSYSAADRSMMSSYTADRSMMSMAADSYTDSYTDTYTEAYMVPPLPPEEPPTMPPLPPEEPPMTPPLPPEEPPEGPALPTEQSALTAENTWPTEVPSSPSEESVSQPEPPVSQSEISEPSAVPTDYSVSASDPSVLVSEAAVTVPEPPPEPESSITLTPVESAVVAEEHEVVPERPVTCMVSETPAMSAEPTVLASEPPVMSETAETFDSMRASGHVASEVSTSLLVPAVTTPVLAESILEPPAMAAPESSAMAVLESSAVTVLESSTVTVLESSTVTVLEPSVVTVPEPPVVAEPDYVTIPVPVVSALEPSVPVLEPAVSVLQPSMIVSEPSVSVQESTVTVSEPAVTVSEQTQVIPTEVAIESTPMILESSIMSSHVMKGINLSSGDQNLAPEIGMQEIALHSGEEPHAEEHLKGDFYESEHGINIDLNINNHLIAKEMEHNTVCAAGTSPVGEIGEEKILPTSETKQRTVLDTYPGVSEADAGETLSSTGPFALEPDATGTSKGIEFTTASTLSLVNKYDVDLSLTTQDTEHDMVISTSPSGGSEADIEGPLPAKDIHLDLPSNNNLVSKDTEEPLPVKESDQTLAALLSPKESSGGEKEVPPPPKETLPDSGFSANIEDINEADLVRPLLPKDMERLTSLRAGIEGPLLASDVGRDRSAASPVVSSMPERASESSSEEKDDYEIFVKVKDTHEKSKKNKNRDKGEKEKKRDSSLRSRSKRSKSSEHKSRKRTSESRSRARKRSSKSKSHRSQTRSRSRSRRRRRSSRSRSKSRGRRSVSKEKRKRSPKHRSKSRERKRKRSSSRDNRKTVRARSRTPSRRSRSHTPSRRRRSRSVGRRRSFSISPSRRSRTPSRRSRTPSRRSRTPSRRSRTPSRRSRTPSRRSRTPSRRRRSRSVVRRRSFSISPVRLRRSRTPLRRRFSRSPIRRKRSRSSERGRSPKRLTDLDKAQLLEIAKANAAAMCAKAGVPLPPNLKPAPPPTIEEKVAKKSGGATIEELTEKCKQIAQSKEDDDVIVNKPHVSDEEEEEPPFYHHPFKLSEPKPIFFNLNIAAAKPTPPKSQVTLTKEFPVSSGSQHRKKEADSVYGEWVPVEKNGEENKDDDNVFSSNLPSEGRVKRQGRVRRQMKQPAASHLTVTRCNSLCGTKPQSEKHRIAENSVITSLPNIGPSLHLWEGSPRYNYLASRFASRLYSSRFWW

SEQ ID NO: 64923 - protein, 2426 aa, Homo sapiens
MATNIEQIFRSFVVSKFREIQQELSSGRNEGQLNGETNTPIEGNQAGDAAASARSLPNEEIVQKIEEVLSGVLDTELRYKPDLKEGSRKSRCVSVQTDPTDEIPTKKSKKHKKHKNKKKKKKKEKEKKYKRQPEESESKTKSHDDGNIDLESDSFLKFDSEPSAVALELPTRAFGPSETNESPAVVLEPPVVSMEVSEPHILETLKPATKTAELSVVSTSVISEQSEQSVAVMPEPSMTKILDSFAAAPVPTTTLVLKSSEPVVTMSVEYQMKSVLKSVESTSPEPSKIMLVEPPVAKVLEPSETLVVSSETPTEVYPEPSTSTTMDFPESSAIEALRLPEQPVDVPSEIADSSMTRPQELPELPKTTALELQESSVASAMELPGPPATSMPELQGPPVTPVLELPGPSATPVPELPGPLSTPVPELPGPPATAVPELPGPSVTPVPQLSQELPGLPAPSMGLEPPQEVPEPPVMAQELPGLPLVTAAVELPEQPAVTVAMELTEQPVTTTELEQPVGMTTVEHPGHPEVTTATGLLGQPEATMVLELPGQPVATTALELPGQPSVTGVPELPGLPSATRALELSGQPVATGALELPGPLMAAGALEFSGQSGAAGALELLGQPLATGVLELPGQPGAPELPGQPVATVALEISVQSVVTTSELSTMTVSQSLEVPSTTALESYNTVAQELPTTLVGETSVTVGVDPLMAPESHILASNTMETHILASNTMDSQMLASNTMDSQMLASNTMDSQMLASSTMDSQMLATSSMDSQMLATSSMDSQMLATSTMDSQMLATSSMDSQMLATSSMDSQMLATSSMDSQMLATSSMDSQMLATSTMDSQMLATSTMDSQMLATSSMDSQMLASGTMDSQMLASGTMDAQMLASGTMDAQMLASSTQDSAMLGSKSPDPYRLAQDPYRLAQDPYRLGHDPYRLGHDAYRLGQDPYRLGHDPYRLTPDPYRMSPRPYRIAPRSYRIAPRPYRLAPRPLMLASRRSMMMSYAAERSMMSSYERSMMSYERSMMSPMAERSMMSAYERSMMSAYERSMMSPMAERSMMSAYERSMMSAYERSMMSPMADRSMMSMGADRSMMSSYSAADRSMMSSYSAADRSMMSSYTADRSMMSMAADSYTDSYTDTYTEAYMVPPLPPEEPPTMPPLPPEEPPMTPPLPPEEPPEGPALPTEQSALTAENTWPTEVPSSPSEESVSQPEPPVSQSEISEPSAVPTDYSVSASDPSVLVSEAAVTVPEPPPEPESSITLTPVESAVVAEEHEVVPERPVTCMVSETPAMSAEPTVLASEPPVMSETAETFDSMRASGHVASEVSTSLLVPAVTTPVLAESILEPPAMAAPESSAMAVLESSAVTVLESSTVTVLESSTVTVLEPSVVTVPEPPVVAEPDYVTIPVPVVSALEPSVPVLEPAVSVLQPSMIVSEPSVSVQESTVTVSEPAVTVSEQTQVIPTEVAIESTPMILESSIMSSHVMKGINLSSGDQNLAPEIGMQEIALHSGEEPHAEEHLKGDFYESEHGINIDLNINNHLIAKEMEHNTVCAAGTSPVGEIGEEKILPTSETKQRTVLDTYPGVSEADAGETLSSTGPFALEPDATGTSKGIEFTTASTLSLVNKYDVDLSLTTQDTEHDMVISTSPSGGSEADIEGPLPAKDIHLDLPSNNNLVSKDTEEPLPVKESDQTLAALLSPKESSGGEKEVPPPPKETLPDSGFSANIEDINEADLVRPLLPKDMERLTSLRAGIEGPLLASDVGRDRSAASPVVSSMPERASESSSEEKDDYEIFVKVKDTHEKSKKNKNRDKGEKEKKRDSSLRSRSKRSKSSEHKSRKRTSESRSRARKRSSKSKSHRSQTRSRSRSRRRRRSSRSRSKSRGRRSVSKEKRKRSPKHRSKSRERKRKRSSSRDNRKTVRARSRTPSRRSRSHTPSRRRRSRSVGRRRSFSISPSRRSRTPSRRSRTPSRRSRTPSRRSRTPSRRSRTPSRRSRTPSRRRRSRSVVRRRSFSISPVRLRRSRTPLRRRFSRSPIRRKRSRSSERGRSPKRLTDLDKAQLLEIAKANAAAMCAKAGVPLPPNLKPAPPPTIEEKVAKKSGGATIEELTEKCKQIAQSKEDDDVIVNKPHVSDEEEEEPPFYHHPFKLSEPKPIFFNLNIAAAKPTPPKSQVTLTKEFPVSSGSQHRKKEADSVYGEWVPVEKNGEENKDDDNVFSSNLPSEPVDISTAMSERALAQKRLSENAFDLEAMSMLNRAQERIDAWAQLNSIPGQFTGSTGVQVLTQEQLANTGAQAWIKKDQFLRAAPVTGGMGAVLMRKMGWREGEGLGKNKEGNKEPILVDFKTDRKGLVAVGERAQKRSGNFSAAMKDLSGKHPVSALMEICNKRRWQPPEFLLVHDSGPDHRKHFLFRVLRNGALTRPNCMFFLNRY

SEQ ID NO: 64924 - protein, 1332 aa, Homo sapiens [sequence omitted]

SEQ ID NO: 64925 - protein, 1299 aa, Homo sapiens
MQQAPQPYEFFSEENSPKWRGLLVSALRKVQEQVHPTLSANEESLYYIEELIFQLLNKLCMAQPRTVQDVEERVQKTFPHPIDKWAIADAQSAIEKRKRRNPLLLPVDKIHPSLKEVLGYKVDYHVSLYIVAVLEYISADILKLAGNYVFNIRHYEISQQDIKVSMCADKVLMDMFDQDDIGLVSLCEDEPSSSGELNYYDLVRTEIAEERQYLRELNMIIKVFREAFLSDRKLFKPSDIEKIFSNISDIHELTVKLLGLIEDTVEMTDESSPHPLAGSCFEDLAEEQAFDPYETLSQDILSPEFHEHFNKLMARPAVALHFQQLKACSEEQEDRECLNQAITALMNLQGSMDRIYKQYSPRRRPGDPVCPFYSHQLRSKHLAIKKMNEIQKNIDGWEGKDIGQCCNEFIMEGPLTRIGAKHERHIFLFDGLMISCKPNHGQTRLPGYSSAEYRLKEKFVMRKIQICDKEDTCEHKHAFELVSKDENSIIFAAKSAEEKNNWMAALISLHYRSTLDRMLDSVLLKEENEQPLRLPSPEVYRFVVKDSEENIVFEDNLQSRSGIPIIKGGTVVKLIERLTYHMYADPNFVRTFLTTYRSFCKPQELLSLLIERFEIPEPEPTDADKLAIEKGEQPISADLKRFRKEYVQPVQLRILNVFRHWVEHHFYDFERDLELLERLESFISSVRGKAMKKWVESIAKIIRRKKQAQANGVSHNITFESPPPPIEWHISKPGQFETFDLMTLHPIEIARQLTLLESDLYRKVQPSELVGSVWTKEDKEINSPNLLKMIRHTTNLTLWFEKCIVEAENFEERVAVLSRIIEILQVFQDLNNFNGVLEIVSAVNSVSVYRLDHTFEALQERKRKILDEAVELSQDHFKKYLVKLKSINPPCVPFFGIYLTNILKTEEGNNDFLKKKGKDLINFSKRRKVAEITGEIQQYQNQPYCLRIEPDMRRFFENLNPMGSASEKEFTDYLFNKSLEIEPRNCKQPPRFPRKSTFSLKSPGIRPNTGRHGSTSGTLRGHPTPLEREPCKISFSRIAETELESTVSAPTSPNTPSTPPVSASSDLSVFLDVDLNSSCGSNSIFAPVLLPHSKSFFSSCGSLHKLSEEPLIPPPLPPRKKFDHDASNSKGNMKSDDDPPAIPPRQPPPPKVKPRVPVPTGAFDGPLHSPPPPPPRDPLPDTPPPVPLRPPEHFINCPFNLQPPPLGHLHRDSDWLRDISTCPNSPSTPPSTPSPRVPRRCYVLSSSQNNLAHPPAPPVPPRQNSSPHLPKLPPKTYKRELSHPPLYRLPLLENAETPQ

SEQ ID NO: 64926 - protein, 462 aa, Homo sapiens
MLLLARCLLLVLVSSLLVCSGLACGPGRGFGKRRHPKKLTPLAYKQFIPNVAEKTLGASGRYEGKISRNSERFKELTPNYNPDIIFKDEENTGADRLMTQRCKDKLNALAISVMNQWPGVKLRVTEGWDEDGHHSEESLHYEGRAVDITTSDRDRSKYGMLARLAVEAGFDWVYYESKAHIHCSVKAENSVAAKSGGCFPGSATVHLEQGGTKLVKDLSPGDRVLAADDQGRLLYSDFLTFLDRDDGAKKVFYVIETREPRERLLLTAAHLLFVAPHNDSATGEPEASSGSGPPSGGALGPRALFASRVRPGQRVYVVAERDGDRRLLPAAVHSVTLSEEAAGAYAPLTAQGTILINRVLASCYAVIEEHSWAHRAFAPFRLAHALLAALAPARTDRGGDSGGGDRGGGGGRVALTAPGAADAPGAGATAGIHWYSQLLYQIGTWLLDSEALHPLGMAVKSS
